United States Patent Application Publication US 2026/0337666 A1 - sequence listing, part 5

SEQ ID NO: 5903 - DNA, 6985 bp, Homo sapiens
  source 1..6985: mol_type = unassigned DNA
ccgcagcagccatggccgagcgccgcgccttcgcccagaagatcagcagaacggtggcagccgaagttaggaagcagatctccggacaatatagtggttctccccaactgctcaaaaaccttaatattgttggcaatatatcccatcacaccacagtgccccttaccgaagcagtagatccagtggatttggaagattacctcattactcatcctttggctgtggattctgggcctttacgggatttgattgaatttcctccagatgatattgaagttgtttatagtcctcgggactgcagaactcttgtttcagctgtacctgaagaaagtgaaatggatccacatgttagagactgtataagaagttatacagaagactgggcaattgtcatcagaaaatatcataaattgggaacaggatttaatcccaatacattagataaacagaaagaaaggcaaaaaggtttgccaaaacaagtttttgaatctgatgaagctccagatggcaacagctaccaggatgatcaagatgaccttaaaagacgttcaatgtcaatagatgataccccaaggggtagctgggcctgtagtatctttgacttgaaaaattcacttcctgatgctttgcttcccaatttacttgatcgaactccaaatgaagaaatagaccgtcagaatgatgaccaaaggaaatcaaaccgtcacaaagaactttttgctttgcatccatcaccagatgaggaagaaccaatagaacggcttagtgttcctgatatacccaaagaacattttggtcaaagacttcttgtaaaatgcttatcactcaagtttgaaattgaaattgaacccatttttgcaagtttggctttatatgatgtcaaggaaaagaaaaagatttcagaaaacttttattttgaccttaattctgagcagatgaaagggttgttacgtccacatgtaccacctgctgccattactaccctggcaagatcagcaattttttctatcacttatccttcccaagatgtttttcttgtaataaagctagaaaaagtcctacagcaaggagacattggagagtgtgcagaaccatatatgattttcaaagaagcagatgccaccaagaataaagaaaaactggagaaactgaagagtcaagcagatcagttttgccaaagacttgggaaatatcgcatgccttttgcttggactgcaatccatttaatgaatattgttagcagtgctgggagtttggaaagagattctacagaagtagaaatcagtactggagaacgaaaagggtcttggtcagagaggaggaattctagtattgttggcagacgatcacttgaaaggacaacaagtggagatgatgcttgtaacttgacgagctttcgaccagctactctcacagtgacaaatttttttaagcaggaaggagaccgcttaagtgatgaagatctctacaaattccttgctgatatgagaaggccatcttctgtcttacggcgactaagacctattacagctcagctcaagatagacatttctcccgcacctgaaaatccccattattgcctaactccggagctgcttcaagtgaagctttaccctgacagtagagttagacctaccagagaaatcttagagtttcccgcaagggatgtttatgttccaaacactacttacagaaatcttctctacatataccctcagagtcttaattttgccaatcgtcaaggttctgctagaaatataacagtgaaagtccagtttatgtatggagaggatccaagcaatgccatgccggtaatctttggtaaatctagctgttcagaattttcaaaggaagcctatacagccgtagtatatcataacaggtctcctgattttcatgaagaaatcaaggttaagcttcctgctactttaactgaccatcatcacttgctttttactttttatcatgttagttgtcaacaaaaacaaaatactcctcttgaaacaccagttggatatacatggataccaatgcttcagaatggacggttgaagactggccagttttgcttgccagtctcattggaaaaaccaccacaggcttattctgtactgtctcctgaggttcctctacctggcatgaaatgggtagataatcacaaaggtgtttttaatgttgaagttgttgctgtttcgtctatccatacacaagatccttatcttgacaaattttttgctctggtcaatgctctggatgaacacctgttcccagtccgaattggggacatgcgaatcatggaaaataacttagaaaatgaattgaagagcagtatttcagcactgaattcatcccagctggaaccagtggtccgatttcttcatcttctgctagataaactgatacttttagttattagacctcctgtcattgctggccaaatagttaacctaggtcaagcatcttttgaagccatggcatcaattataaatcgacttcacaaaaacttggaaggaaatcatgaccagcatggcagaaacagccttcttgcatcatatattcattatgttttccgcctaccaaatacttaccctaattcatcatcaccaggtcctgggggtttgggaggatcagtgcattatgccacaatggctagatctgcggtgagacctgcaagccttaatttaaatcgttctcgaagccttagtaatagcaatccagatatatctgggactcccacgtcaccagatgatgaagttcgatcaatcatcgggagtaagggtttagatcgctccaattcctgggttaacactggtggtccaaaagctgccccatggggatccaaccccagtccaagtgcagaatcaacacaggctatggatcgaagttgtaatcgtatgtcttcgcacacagagacgtcaagtttcttacaaacattaacgggacgcttaccaactaaaaagctttttcacgaggagctggctttgcagtgggttgtttgcagtggcagcgttcgggaatcagctttgcaacaagcctggttcttttttgaattaatggtaaagagcatggtgcaccatttatactttaatgataaacttgaggctccaaggaaaagtcgttttccagaacgtttcatggatgacattgcagctcttgtcagcacgattgctagtgatatagtttcacgatttcagaaggacacagaaatggttgagagactcaatacaagccttgcattctttctcaatgatctgttgtctgttatggacagaggatttgtttttagccttataaagtcctgctataaacaggtgtcttcaaagctttactcattaccgaatcccagtgttctggtgtccttgaggctggattttctacgaatcatctgcagtcatgagcactatgttacattaaacttaccctgcagcttacttactccacctgcatctccatcaccttctgtttcttctgcaacatctcagagttctggattttctacgaatgtacaagaccaaaagattgcaaatatgtttgaattatccgtgcctttccgccaacagcattatttggcaggacttgtgttaacagagctggctgtcattttagaccctgatgctgaaggactgtttggattgcataagaaagtcatcaatatggtacacaatttactctccagtcacgactcagacccgcggtactctgaccctcagataaaggctcgagtggccatgttgtatctacctctgattggtattatcatggaaactgtacctcagctgtatgattttacagaaactcacaatcaacgaggaagaccaatttgtatagccactgatgattatgaaagtgagagcggaagtatgataagccagaccgttgccatggcaatcgcagggacatcggtccctcaactaacaaggcctggcagtttcctcctcacgtcaacgagtggcaggcaacacactaccttttcagcagaatcaagtcgaagccttttgatctgtctactttgggttctcaaaaatgcagatgaaacagttctacagaagtggtttacagatctctcagtcttgcagctaaaccggctattagatctgctttatctctgtgtgtcttgctttgagtataaagggaaaaaagtgtttgaacgaatgaatagcttgacctttaagaaatcaaaagacatgagagcaaagcttgaagaagctattcttgggagcataggtgccaggcaagaaatggtacggcgaagccgaggacagctcgagagaagcccatctggaagtgcctttggaagtcaagaaaatttgaggtggaggaaagatatgactcactggcgtcaaaacacagagaagcttgacaaatcaagagcagagattgaacacgaagcactgattgatggaaacctggctacagaagcaaacctaatcattttagatacattagagattgttgttcagaccgtttctgtaacggaatccaaagagagcattcttggtggagtgctaaaagtgctactacacagcatggcctgtaaccaaagtgcagtttatctacaacactgttttgctacacagagagccttggtttcaaagtttcctgaactcttatttgaagaagagacagagcagtgtgctgatttatgcctcaggcttctccgacactgtagcagtagcatcggtacaatacggtcacacgccagtgcctccctttacctactaatgaggcaaaactttgagattgggaataactttgccagggttaaaatgcaggtaacaatgtcactatcctccttggtgggcacatctcagaattttaatgaagaattcttaagacgttctctaaagactatattgacatatgctgaagaagatctggaattgagggaaacaacatttcctgatcaggtccaggatctggttttcaatctccatatgattctttctgatactgtgaaaatgaaggaacaccaggaggatcctgaaatgttgattgatctaatgtacagaattgccaagggttaccagacctctccagatctgcgattgacctggttgcagaacatggcaggcaagcactcagaacgaagcaatcatgctgaagctgcacagtgtctagtccactcagcagcacttgttgctgaatatttgagcatgctggaggaccggaaatatcttcctgtgggatgtgtaacatttcagaatatttcatctaatgttttagaagaatctgcggtctcagatgatgtggtatctccagatgaagaaggtatctgctctggaaaatactttactgagtcaggacttgtgggattactggaacaagcagctgcttccttctctatggctggcatgtatgaagcagttaatgaagtttacaaagtacttattcctattcatgaagctaatcgggatgcaaagaaactatccacaattcatggtaaacttcaagaagcattcagcaaaattgttcatcaggatggtaagcggatgtttggcacctattttcgtgttggtttttatggaaccaagttcggggatttggatgaacaagaatttgtttacaaggagcctgcaataaccaaacttgcagagatatctcacagattggagggattttacggagaaagatttggagaggatgtggttgaagtaatcaaagactctaatcctgtagacaagtgtaaattagatcctaacaaggcatatattcagattacctatgtggagccatactttgacacatatgagatgaaggacagaatcacctatttcgacaaaaattacaatcttcgtcgattcatgtactgtacaccctttactttagatggccgtgcccatggggaacttcatgaacaattcaaaaggaagaccattctgactacgtctcatgcctttccttatattaaaacaagggtcaatgtcactcataaagaagagatcatcttaacaccaattgaagttgctattgaggacatgcagaaaaagacacaggagttggcatttgcaacacatcaggatcccgcagaccccaaaatgcttcagatggtactccagggatctgtaggcaccacagtgaatcaggggcctttggaagttgcccaggtttttctgtctgaaatacctagtgacccaaagctcttcagacatcataataaactgcgactctgctttaaagattttactaaaaggtgtgaagatgccttaagaaaaaataagagcttaattgggccggatcaaaaggagtatcaaagggaactggagagaaactatcatcgccttaaagaggccctacagccactgatcaacagaaagatccctcagttatacaaggcagtattgcctgtcacctgccacagagattccttcagtcgaatgagccttcgcaaaatggatctctaaactgaatgcacttgttttattcatctgcaaagagccatgtattcaacatcgagtgtgaaaagatctattggaaaacaacatggaatggaattctggaaattattattcattgaagaatgcagtggccaagaaaatatcaaatgtagattgttaacgcttgagaatcatggctatggtttctaatgttctggtaacaagctgttatcttttaagacattttaatgactcaaaggtacactatacatttaccattatttataccatagctaaggttaaaaatttattcactttaagttcgtattttttaatttatattaccatttatagattcattttggaaccattttaaatgtagtaatgcttattttaaaggtactattaaatatgtgaatgtttacactaattttaccgagtgggacttcaaaatttttattattgacaatggcagagaacaattaaagggttgactcaagaactagttccaaacctagcagaataaaaatcatagatagccccaaattaatgagtttggtaactgtttcaaagttattttccatttacatacccaaaacaggaatttagaa

SEQ ID NO: 5904 - DNA, 2221 bp, Homo sapiens
  source 1..2221: mol_type = unassigned DNA
ctttatgttccattttaaatttctggtaggggatatttgacctctttcatttaatcttgccagagcttagtttgtttttttagttttttcaaagaaccaacttttgcaatttttgatactctattttaaaatcttatttcctttctaatactttaagttgcttaactcttcagttttagccttctaatataagcatttgatgctatgtgttttctactaagcatcactttagtggcattccacaaatatgtagagatatatatattatttgtaaatatcctttccttcattgtctgtcagggtccagatacttttctcaaatacttgaattaacttggataaaggactgtcatcaaaatctattcatttagccgggcacggtggctcacgcctgtaatcccagcacttagggaggccaaggcgggtggatcacgaggtcaggagttcgagaccagcctggctaagatggtgaaacccgtctctactaaaaataaggaaaattagctgggcgtggtggcaggcgcctgtaatcccagctacccaggaggttgaggtaggagaatcgcttgaacctgggaggcagaggttgcagtgagccgagatcgcgccactgcactccagcctgcgctacagagtgagactccatctcaaaaaaaaaaaaaaacaaaacctattaagaaatatttgaacacaggcagacactgtgccagatgacattggtgccacataaatgagcatgattacatccctgaaagagcttctagtcaagtggtgatgtgaaaaaaatgccttcagataattttcaatttaatgacactggaagtaaatagtagattttacaggaactcagttgattatctgttccctgccttaaacctaaaacaaaagatgattatttaacattcagctgaaaaactaaatgtcctcatcatggtgaatacacacacatttgtttcagatagtcccactcggttgcccaggctggagtgcagtgatgcaatctcagcgcgcgcgtacacacacacacacacacacacacacacccacgtttgagacagtcccactctgttgccctggctggattgcagtggtacaatctcagctcactgcattctccacttcctgggctgaagcatcctcccacttcagcctcatgaatagctggggctacaggagtgcaccaccatgcctggctaatttttgcatttttttgtagagacgaggttttgccatgttgtccagactggtctcagaactcctgggctcaagtggtccacctgccttgacctcccaaagtgctgggattacagccatgagccaccatgcctggcctatatttttgtgtgtatgtgtgtgtgattaggcccacatatatagtctgtgttgtgtgtcattaagcccacatatatatgtatatgtattttgcgtgtgtatggcattaaacccacaaactatgccagaagtaatatcttgataacatcctgtttttcctaggtgtgaagatgccttaagaaaaaataagagcttaattgggccggatcaaaaggagtatcaaagggaactggagagaaactatcatcgccttaaagaggccctacagccactgatcaacagaaagatccctcagttatacaaggcagtattgcctgtcacctgccacagagattccttcagtcgaatgagccttcgcaaaatggatctctaaactgaatgcacttgttttattcatctgcaaagagccatgtattcaacatcgagtgtgaaaagatctattggaaaacaacatggaatggaattctggaaattattattcattgaagaatgcagtggccaagaaaatatcaaatgtagattgttaacgcttgagaatcatggctatggtttctaatgttctggtaacaagctgttatcttttaagacattttaatgactcaaaggtacactatacatttaccattatttataccatagctaaggttaaaaatttattcactttaagttcgtattttttaatttatattaccatttatagattcattttggaaccattttaaatgtagtaatgcttattttaaaggtactattaaatatgtgaatgtttacactaattttaccgagtgggacttcaaaatttttattattgacaatggcagagaacaattaaagggttgactcaagaactagttccaaacctagcagaataaaaatcatagatagcccc

SEQ ID NO: 5905 - DNA, 6506 bp, Homo sapiens
  source 1..6506: mol_type = unassigned DNA; mol_type = unassigned DNA
ggatttgtatgaatcatttctattgctgccaccccttaaaggaacccatacatgcagtctgccttcaaacctagaaaccactttatcagcctagacataacatgcttggacaaagtacatatcatttctgttcttaaggagcttatatacttgtggtcctaagtgttatggaaaggaacaaagcaaaagaaaaggaaaaggaggtattggagagtgggaggcctttctaaggaggcgataaaggaaaatttgtgagaagaacaattaggaaaaaggaacaacaaccattgcacaggttgtaagtcagaagcgtagtcagagtatatactgatagattcgcaaggataacagaaagcggtaagcaagaggaagaatggtaggaaataaagtcatatcatgtaaggccttataagccatggttaagattttaagcaaaccaatgttagaacatttgcttatttaagtgggtattgttttaaagaaaagatactgcatatagcaagtacatttcttctgaaattattgtgaaaatttttaataaaaagcaccattgtcaggtttttcaacttgtactgaggataaaatggcttgtacaaattattgttgtatatttcttacatgattgcaagtatacatatatgtggtccaactgaaataacatttgaaaattggttttgaaatttatttgacagagagaagcccatctggaagtgcctttggaagtcaagaaaatttgaggtggaggaaagatatgactcactggcgtcaaaacacagagaagcttgacaaatcaagagcagagattgaacacgaagcactgattgatggaaacctggctacagaagcaaacctaatcattttagatacattagagattgttgttcagaccgtttctgtaacggaatccaaagagagcattcttggtggagtgctaaaagtgctactacacagcatggcctgtaaccaaagtgcagtttatctacaacactgttttgctacacagagagccttggtttcaaagtttcctgaactcttatttgaagaagagacagagcagtgtgctgatttatgcctcaggcttctccgacactgtagcagtagcatcggtacaatacggtcacacgccagtgcctccctttacctactaatgaggcaaaactttgagattgggaataactttgccagggttaaaatgcaggtaacaatgtcactatcctccttggtgggcacatctcagaattttaatgaagaattcttaagacgttctctaaagactatattgacatatgctgaagaagatctggaattgagggaaacaacatttcctgatcaggtccaggatctggttttcaatctccatatgattctttctgatactgtgaaaatgaaggaacaccaggaggatcctgaaatgttgattgatctaatgtacagaattgccaagggttaccagacctctccagatctgcgattgacctggttgcagaacatggcaggcaagcactcagaacgaagcaatcatgctgaagctgcacagtgtctagtccactcagcagcacttgttgctgaatatttgagcatgctggaggaccggaaatatcttcctgtgggatgtgtaacatttcagaatatttcatctaatgttttagaagaatctgcggtctcagatgatgtggtatctccagatgaagaaggtatctgctctggaaaatactttactgagtcaggacttgtgggattactggaacaagcagctgcttccttctctatggctggcatgtatgaagcagttaatgaagtttacaaagtacttattcctattcatgaagctaatcgggatgcaaagaaactatccacaattcatggtaaacttcaagaagcattcagcaaaattgttcatcaggtaatgattccaatttctagcttcactataaagggaaaaaactgtctgaaagcattaatgttgttttgcactgatgtcaaactagatcccgtgaaatgaccattttaatcagactacaaatgagcggtcaaaatgatagttcatggccaaagcaaagctcattaacaataaaaatgaattcacctaaagtaaatggtgatcatcataaactttctgcatagcttttttttttcatttttgaattattaattagcaagtttttaaaaattgtgattttctgtttcacaaggtagatcatagttgtgaatctcattttaaaattgatacctattcctttgctgtgaaaatgaagtttttatatttcagttttttaaattaaatgatgtgaaactttaataattaaactactaatatttttaatgactgcaactgaactttatttttcctagatgtttacaatcatcctttgatatatttctaatacaaaaatattattttgtgaaaataatgaataaaatggttgtcttaatgtatatttaattctaatagtatttcattacttaatctttgtagttcattatggaatctacatattatcactaaaattagcatcaaattaaacttaattttaaaatgaagtacactactagcagttgatttctttgaaactaaatccttggcttcattgaaatactgcaaaatatcctatcgagtctcctcctcctccacttttctgttcccttccccgtgctaccctactgttacctactgctgctagtgtcaaaggagttggagtatgactatccacttttgtattcagtattagtcctactttgttacctatcagcttgacctcttcttttttgcaatgaattaagctgttctaaatgaactgattaatctgaaaagcctttgacagtctaaaaatagggctgctatcctgttaagtcaggattttattgtcatctattaaaatgttaaagttgaaaaatattgattaggtttcatgaccatgacaggtaggtcttttaataatcagttgtatatatactatcacaggaacctcaagccagtttctagagctgtaaattgcaaattataaatgttaggtctggaacatttagagctagtcgtttctgagaaacttttagccatttgtgtcgttggcatttgagcagagttgcagtttgtattttaatttatcctggatacttggtgaagtgcagctcaccttagttagagatcttacttaaacatgtaaatggaacaagctgctggctctctttccctaaaatttgtactttcacttaaagtttttaaaaggcaaaattttagccactgggttttgaccaagcaatttatgaaattattgcaggtcttaagtaaatgaatatgctgtttaaaatatcctgctgtcttctgtttgtggagaagaatttatggtatatggtgcctttggccttttttgttctttcaaacagtttttttatgacttgcccttttttactttttattatacagagtactggctgggaggtaggtaatgttttagttagttaaagacactaatagattgattttatcagatttcttatgccaatgctttgcccacatgtgctagctgtgggcattctgttgctatctgctatcaactgaattcattaaccaaagaaattttgttaaaatattgtaagttattttaagaaatatcttattatgaggtcgtaggcagtgcatggaaatccatatgttacactaatgagattctttggtaaatgagccactttgtcatcactttagtttttaccctttgaagcatttctctcatcaacatttatacacagatttctttttttaaccatattgtttcacctcattttacagaggtcgatttatgtgttattgctcagaggtgtaaataaaaaatactctatttcatctgatctcagatggcatcaattacaaaacatactagtattttatatgcctttaagaaaggaaaaaaaaaatccctgtgtattaaaccaggatatcctattagttgaaagatgaataccaactacaaaaacattaaaatgtgagcaaaaaaagtacattttagaattgatgagatactgtgttaatttgatcttgagtcacttcaccttgactatgagcactactgaggaaagaaattcacttttgtcatttaatttttgttggggaaagggataaagaaattaagagaacttataatttaatttgacctcgtattctgacagcatttgatatattgtttgataagactacacatgcttccttttatgtagtagttaagactcacaaaaagttatatgtaaatacaatcttacccgaaaaaaatgccaggaagaattgattaccattattttaaacgtttctgcaaaggaaataattctataaaatatgccctaatttattttgatgaggtaaagcaaggtagtaataagtcaggtttatttaaagctaggtatatttgtaaagttgtgtgctttgcctctcacttgttgtcagatttatgttgatcgaacacttaggcttctctttttgggtttgcattgcaatccttgttttaagacccaaatagaaaaccttgggaataaatattactactgagttttcctctatttctgaaatagtacccaagtcttgtttttctttagatgaagccagtacttttataaatctaccttaattctctagattaaatgtatatgactgtatcaatactcaaaatataatcctcattcctatggctcagttaagacatacataaagagacttgccatggttatctatgaatgataaaactccttataaatttcctaacattaaatagaattagttgaaaattaggcataaaataataaattgaaacctctgagcagtttattactagtttccgtgatgctaaatcgacccctgaaaggtataattttcactggttatgacattaatatcattctgtcatcatgtttattgcatggtaaaagtctcacagactttattttcttgttatatacttgtcactaccttttactggacctttagctttgtagctgctaaatttgttgcacgtttgttttttgcttttcctttgtaaaacttaaatggatgcctgcatttaaaaaatgtgttttctaccatttgctgcttatttgttttgaaatttctgtaattaaaatgctttctgttttctcttctctcttgtccctggttgctgaccctactccccacttttactattgtctattgtggatggtaagcggatgtttggcacctattttcgtgttggtttttatggaaccaagttcggggatttggatgaacaagaatttgtttacaaggagcctgcaataaccaaacttgcagagatatctcacagattggagggattttacggagaaagatttggagaggatgtggttgaagtaatcaaagactctaatcctgtagacaagtgtaaattagatcctaacaaggcatatattcagattacctatgtggagccatactttgacacatatgagatgaaggacagaatcacctatttcgacaaaaattacaatcttcgtcgattcatgtactgtacaccctttactttagatggccgtgcccatggggaacttcatgaacaattcaaaaggaagaccattctgactacgtctcatgcctttccttatattaaaacaagggtcaatgtcactcataaagaagagatcatcttaacaccaattgaagttgctattgaggacatgcagaaaaagacacaggagttggcatttgcaacacatcaggatcccgcagaccccaaaatgcttcagatggtactccagggatctgtaggcaccacagtgaatcaggggcctttggaagttgcccaggtttttctgtctgaaatacctagtgacccaaagctcttcagacatcataataaactgcgactctgctttaaagattttactaaaaggtgtgaagatgccttaagaaaaaataagagcttaattgggccggatcaaaaggagtatcaaagggaactggagagaaactatcatcgccttaaagaggccctacagccactgatcaacagaaagatccctcagttatacaaggcagtattgcctgtcacctgccacagagattccttcagtcgaatgagccttcgcaaaatggatctctaaactgaatgcacttgttttattcatctgcaaagagccatgtattcaacatcgagtgtgaaaagatctattggaaaacaacatggaatggaattctggaaattattattcattgaagaatgcagtggccaagaaaatatcaaatgtagattgttaacgcttgagaatcatggctatggtttctaatgttctggtaacaagctgttatcttttaagacattttaatgactcaaaggtacactatacatttaccattatttataccatagctaaggttaaaaatttattcactttaagttcgtattttttaatttatattaccatttatagattcattttggaaccattttaaatgtagtaatgcttattttaaaggtactattaaatatgtgaatgtttacactaat

SEQ ID NO: 5906 - DNA, 6731 bp, Homo sapiens
  source 1..6731: mol_type = unassigned DNA; mol_type = unassigned DNA
atggccgagcgccgcgccttcgcccagaagatcagcagaacggtggcagccgaagttaggaagcagatctccggacaatatagtggttctccccaactgctcaaaaaccttaatattgttggcaatatatcccatcacaccacagtgccccttaccgaagcagtagatccagtggatttggaagattacctcattactcatcctttggctgtggattctgggcctttacgggatttgattgaatttcctccagatgatattgaagttgtttatagtcctcgggactgcagaactcttgtttcagctgtacctgaagaaagtgaaatggatccacatgttagagactgtataagaagttatacagaagactgggcaattgtcatcagaaaatatcataaattgggaacaggatttaatcccaatacattagataaacagaaagaaaggcaaaaaggtttgccaaaacaagtttttgaatctgatgaagctccagatggcaacagctaccaggatgatcaagatgaccttaaaagacgttcaatgtcaatagatgataccccaaggggtagctgggcctgtagtatctttgacttgaaaaattcacttcctgatgctttgcttcccaatttacttgatcgaactccaaatgaagaaatagaccgtcagaatgatgaccaaaggaaatcaaaccgtcacaaagaactttttgctttgcatccatcaccagatgaggaagaaccaatagaacggcttagtgttcctgatatacccaaagaacattttggtcaaagacttcttgtaaaatgcttatcactcaagtttgaaattgaaattgaacccatttttgcaagtttggctttatatgatgtcaaggaaaagaaaaagatttcagaaaacttttattttgaccttaattctgagcagatgaaagggttgttacgtccacatgtaccacctgctgccattactaccctggcaagatcagcaattttttctatcacttatccttcccaagatgtttttcttgtaataaagctagaaaaagtcctacagcaaggagacattggagagtgtgcagaaccatatatgattttcaaagaagcagatgccaccaagaataaagaaaaactggagaaactgaagagtcaagcagatcagttttgccaaagacttgggaaatatcgcatgccttttgcttggactgcaatccatttaatgaatattgttagcagtgctgggagtttggaaagagattctacagaagtagaaatcagtactggagaacgaaaagggtcttggtcagagaggaggaattctagtattgttggcagacgatcacttgaaaggacaacaagtggagatgatgcttgtaacttgacgagctttcgaccagctactctcacagtgacaaatttttttaagcaggaaggagaccgcttaagtgatgaagatctctacaaattccttgctgatatgagaaggccatcttctgtcttacggcgactaagacctattacagctcagctcaagatagacatttctcccgcacctgaaaatccccattattgcctaactccggagctgcttcaagtgaagctttaccctgacagtagagttagacctaccagagaaatcttagagtttcccgcaagggatgtttatgttccaaacactacttacagaaatcttctctacatataccctcagagtcttaattttgccaatcgtcaaggttctgctagaaatataacagtgaaagtccagtttatgtatggagaggatccaagcaatgccatgccggtaatctttggtaaatctagctgttcagaattttcaaaggaagcctatacagccgtagtatatcataacaggtctcctgattttcatgaagaaatcaaggttaagcttcctgctactttaactgaccatcatcacttgctttttactttttatcatgttagttgtcaacaaaaacaaaatactcctcttgaaacaccagttggatatacatggataccaatgcttcagaatggacggttgaagactggccagttttgcttgccagtctcattggaaaaaccaccacaggcttattctgtactgtctcctgaggttcctctacctggcatgaaatgggtagataatcacaaaggtgtttttaatgttgaagttgttgctgtttcgtctatccatacacaagatccttatcttgacaaattttttgctctggtcaatgctctggatgaacacctgttcccagtccgaattggggacatgcgaatcatggaaaataacttagaaaatgaattgaagagcagtatttcagcactgaattcatcccagctggaaccagtggtccgatttcttcatcttctgctagataaactgatacttttagttattagacctcctgtcattgctggccaaatagttaacctaggtcaagcatcttttgaagccatggcatcaattataaatcgacttcacaaaaacttggaaggaaatcatgaccagcatggcagaaacagccttcttgcatcatatattcattatgttttccgcctaccaaatacttaccctaattcatcatcaccaggtcctgggggtttgggaggatcagtgcattatgccacaatggctagatctgcggtgagacctgcaagccttaatttaaatcgttctcgaagccttagtaatagcaatccagatatatctgggactcccacgtcaccagatgatgaagttcgatcaatcatcgggagtaaggctatggatcgaagttgtaatcgtatgtcttcgcacacagagacgtcaagtttcttacaaacattaacgggacgcttaccaactaaaaagctttttcacgaggagctggctttgcagtgggttgtttgcagtggcagcgttcgggaatcagctttgcaacaagcctggttcttttttgaattaatggtaaagagcatggtgcaccatttatactttaatgataaacttgaggctccaaggaaaagtcgttttccagaacgtttcatggatgacattgcagctcttgtcagcacgattgctagtgatatagtttcacgatttcagaaggacacagaaatggttgagagactcaatacaagccttgcattctttctcaatgatctgttgtctgttatggacagaggatttgtttttagccttataaagtcctgctataaacaggtgtcttcaaagctttactcattaccgaatcccagtgttctggtgtccttgaggctggattttctacgaatcatctgcagtcatgagcactatgttacattaaacttaccctgcagcttacttactccacctgcatctccatcaccttctgtttcttctgcaacatctcagagttctggattttctacgaatgtacaagaccaaaagattgcaaatatgtttgaattatccgtgcctttccgccaacagcattatttggcaggacttgtgttaacagagctggctgtcattttagaccctgatgctgaaggactgtttggattgcataagaaagtcatcaatatggtacacaatttactctccagtcacgactcagacccgcggtactctgaccctcagataaaggctcgagtggccatgttgtatctacctctgattggtattatcatggaaactgtacctcagctgtatgattttacagaaactcacaatcaacgaggaagaccaatttgtatagccactgatgattatgaaagtgagagcggaagtatgataagccagaccgttgccatggcaatcgcagggacatcggtccctcaactaacaaggcctggcagtttcctcctcacgtcaacgagtggcaggcaacacactaccttttcagcagaatcaagtcgaagccttttgatctgtctactttgggttctcaaaaatgcagatgaaacagttctacagaagtggtttacagatctctcagtcttgcagctaaaccggctattagatctgctttatctctgtgtgtcttgctttgagtataaagggaaaaaagtgtttgaacgaatgaatagcttgacctttaagaaatcaaaagacatgagagcaaagcttgaagaagctattcttgggagcataggtgccaggcaagaaatggtacggcgaagccgaggacagctcggtacgtacacaatagcttctcctcctgagagaagcccatctggaagtgcctttggaagtcaagaaaatttgaggtggaggaaagatatgactcactggcgtcaaaacacagagaagcttgacaaatcaagagcagagattgaacacgaagcactgattgatggaaacctggctacagaagcaaacctaatcattttagatacattagagattgttgttcagaccgtttctgtaacggaatccaaagagagcattcttggtggagtgctaaaagtgctactacacagcatggcctgtaaccaaagtgcagtttatctacaacactgttttgctacacagagagccttggtttcaaagtttcctgaactcttatttgaagaagagacagagcagtgtgctgatttatgcctcaggcttctccgacactgtagcagtagcatcggtacaatacggtcacacgccagtgcctccctttacctactaatgaggcaaaactttgagattgggaataactttgccagggttaaaatgcaggtaacaatgtcactatcctccttggtgggcacatctcagaattttaatgaagaattcttaagacgttctctaaagactatattgacatatgctgaagaagatctggaattgagggaaacaacatttcctgatcaggtccaggatctggttttcaatctccatatgattctttctgatactgtgaaaatgaaggaacaccaggaggatcctgaaatgttgattgatctaatgtacagaattgccaagggttaccagacctctccagatctgcgattgacctggttgcagaacatggcaggcaagcactcagaacgaagcaatcatgctgaagctgcacagtgtctagtccactcagcagcacttgttgctgaatatttgagcatgctggaggaccggaaatatcttcctgtgggatgtgtaacatttcagaatatttcatctaatgttttagaagaatctgcggtctcagatgatgtggtatctccagatgaagaaggtatctgctctggaaaatactttactgagtcaggacttgtgggattactggaacaagcagctgcttccttctctatggctggcatgtatgaagcagttaatgaagtttacaaagtacttattcctattcatgaagctaatcgggatgcaaagaaactatccacaattcatggtaaacttcaagaagcattcagcaaaattgttcatcagagtactggctgggagcggatgtttggcacctattttcgtgttggtttttatggaaccaagttcggggatttggatgaacaagaatttgtttacaaggagcctgcaataaccaaacttgcagagatatctcacagattggagggattttacggagaaagatttggagaggatgtggttgaagtaatcaaagactctaatcctgtagacaagtgtaaattagatcctaacaaggcatatattcagattacctatgtggagccatactttgacacatatgagatgaaggacagaatcacctatttcgacaaaaattacaatcttcgtcgattcatgtactgtacaccctttactttagatggccgtgcccatggggaacttcatgaacaattcaaaaggaagaccattctgactacgtctcatgcctttccttatattaaaacaagggtcaatgtcactcataaagaagagatcatcttaacaccaattgaagttgctattgaggacatgcagaaaaagacacaggagttggcatttgcaacacatcaggatcccgcagaccccaaaatgcttcagatggtactccagggatctgtaggcaccacagtgaatcaggggcctttggaagttgcccaggtttttctgtctgaaatacctagtgacccaaagctcttcagacatcataataaactgcgactctgctttaaagattttactaaaaggtgtgaagatgccttaagaaaaaataagagcttaattgggccggatcaaaaggagtatcaaagggaactggagagaaactatcatcgccttaaagaggccctacagccactgatcaacagaaagatccctcagttatacaaggcagtattgcctgtcacctgccacagagattccttcagtcgaatgagccttcgcaaaatggatctctaaactgaatgcacttgttttattcatctgcaaagagccatgtattcaacatcgagtgtgaaaagatctattggaaaacaacatggaatggaattctggaaattattattcattgaagaatgcagtggccaagaaaatatcaaatgtagattgttaacgcttgagaatcatggctatggtttctaatgttctggtaacaagctgttatcttttaagacattttaatgactcaaaggtacactatacatttaccattatttataccatagctaaggttaaaaatttattcactttaagttcgtattttttaatttatattaccatttatagattcattttggaaccattttaaatgtagtaatgcttattttaaaggtactattaaatatgtgaatgtttacact

SEQ ID NO: 5907 - DNA, 4071 bp, Homo sapiens
  source 1..4071: mol_type = unassigned DNA; mol_type = unassigned DNA
gatgaagttcgatcaatcatcgggagtaagggtttagatcgctccaattcctgggttaacactggtggtccaaaagctgccccatggggatccaaccccagtccaagtgcagaatcaacacaggctatggatcgaagttgtaatcgtatgtcttcgcacacagagacgtcaagtttcttacaaacattaacgggacgcttaccaactaaaaagggaaaggaagatgagttagaaaaattgtcactcttactttttcacgaggagctggctttgcagtgggttgtttgcagtggcagcgttcgggaatcagctttgcaacaagcctggttcttttttgaattaatggtaaagagcatggtgcaccatttatactttaatgataaacttgaggctccaaggaaaagtcgttttccagaacgtttcatggatgacattgcagctcttgtcagcacgattgctagtgatatagtttcacgatttcagaaggacacagaaatggttgagagactcaatacaagccttgcattctttctcaatgatctgttgtctgttatggacagaggatttgtttttagccttataaagtcctgctataaacaggtgtcttcaaagctttactcattaccgaatcccagtgttctggtgtccttgaggctggattttctacgaatcatctgcagtcatgagcactatgttacattaaacttaccctgcagcttacttactccacctgcatctccatcaccttctgtttcttctgcaacatctcagagttctggattttctacgaatgtacaagaccaaaagattgcaaatatgtttgaattatccgtgcctttccgccaacagcattatttggcaggacttgtgttaacagagctggctgtcattttagaccctgatgctgaaggactgtttggattgcataagaaagtcatcaatatggtacacaatttactctccagtcacgactcagacccgcggtactctgaccctcagataaaggctcgagtggccatgttgtatctacctctgattggtattatcatggaaactgtacctcagctgtatgattttacagaaactcacaatcaacgaggaagaccaatttgtatagccactgatgattatgaaagtgagagcggaagtatgataagccagaccgttgccatggcaatcgcagggacatcggtccctcaactaacaaggcctggcagtttcctcctcacgtcaacgagtggcaggcaacacactaccttttcagcagaatcaagtcgaagccttttgatctgtctactttgggttctcaaaaatgcagatgaaacagttctacagaagtggtttacagatctctcagtcttgcagctaaaccggctattagatctgctttatctctgtgtgtcttgctttgagtataaagggaaaaaagtgtttgaacgaatgaatagcttgacctttaagaaatcaaaagacatgagagcaaagcttgaagaagctattcttgggagcataggtgccaggcaagaaatggtacggcgaagccgaggacagctcgagagaagcccatctggaagtgcctttggaagtcaagaaaatttgaggtggaggaaagatatgactcactggcgtcaaaacacagagaagcttgacaaatcaagagcagagattgaacacgaagcactgattgatggaaacctggctacagaagcaaacctaatcattttagatacattagagattgttgttcagaccgtttctgtaacggaatccaaagagagcattcttggtggagtgctaaaagtgctactacacagcatggcctgtaaccaaagtgcagtttatctacaacactgttttgctacacagagagccttggtttcaaagtttcctgaactcttatttgaagaagagacagagcagtgtgctgatttatgcctcaggcttctccgacactgtagcagtagcatcggtacaatacggtcacacgccagtgcctccctttacctactaatgaggcaaaactttgagattgggaataactttgccagggttaaaatgcaggtaacaatgtcactatcctccttggtgggcacatctcagaattttaatgaagaattcttaagacgttctctaaagactatattgacatatgctgaagaagatctggaattgagggaaacaacatttcctgatcaggtccaggatctggttttcaatctccatatgattctttctgatactgtgaaaatgaaggaacaccaggaggatcctgaaatgttgattgatctaatgtacagaattgccaagggttaccagacctctccagatctgcgattgacctggttgcagaacatggcaggcaagcactcagaacgaagcaatcatgctgaagctgcacagtgtctagtccactcagcagcacttgttgctgaatatttgagcatgctggaggaccggaaatatcttcctgtgggatgtgtaacatttcagaatatttcatctaatgttttagaagaatctgcggtctcagatgatgtggtatctccagatgaagaaggtatctgctctggaaaatactttactgagtcaggacttgtgggattactggaacaagcagctgcttccttctctatggctggcatgtatgaagcagttaatgaagtttacaaagtacttattcctattcatgaagctaatcgggatgcaaagaaactatccacaattcatggtaaacttcaagaagcattcagcaaaattgttcatcaggatggtaagcggatgtttggcacctattttcgtgttggtttttatggaaccaagttcggggatttggatgaacaagaatttgtttacaaggagcctgcaataaccaaacttgcagagatatctcacagattggagggattttacggagaaagatttggagaggatgtggttgaagtaatcaaagactctaatcctgtagacaagtgtaaattagatcctaacaaggcatatattcagattacctatgtggagccatactttgacacatatgagatgaaggacagaatcacctatttcgacaaaaattacaatcttcgtcgattcatgtactgtacaccctttactttagatggccgtgcccatggggaacttcatgaacaattcaaaaggaagaccattctgactacgtctcatgcctttccttatattaaaacaagggtcaatgtcactcataaagaagagatcatcttaacaccaattgaagttgctattgaggacatgcagaaaaagacacaggagttggcatttgcaacacatcaggatcccgcagaccccaaaatgcttcagatggtactccagggatctgtaggcaccacagtgaatcaggggcctttggaagttgcccaggtttttctgtctgaaatacctagtgacccaaagctcttcagacatcataataaactgcgactctgctttaaagattttactaaaaggtgtgaagatgccttaagaaaaaataagagcttaattgggccggatcaaaaggagtatcaaagggaactggagagaaactatcatcgccttaaagaggccctacagccactgatcaacagaaagatccctcagttatacaaggcagtattgcctgtcacctgccacagagattccttcagtcgaatgagccttcgcaaaatggatctctaaactgaatgcacttgttttattcatctgcaaagagccatgtattcaacatcgagtgtgaaaagatctattggaaaacaacatggaatggaattctggaaattattattcattgaagaatgcagtggccaagaaaatatcaaatgtagattgttaacgcttgagaatcatggctatggtttctaatgttctggtaacaagctgttatcttttaagacattttaatgactcaaaggtacactatacatttaccattatttataccatagctaaggttaaaaatttattcactttaagttcgtattttttaatttatattaccatttatagattcattttggaaccattttaaatgtagtaatgcttattttaaaggtactatta

SEQ ID NO: 5908 - DNA, 6303 bp, Homo sapiens
  source 1..6303: mol_type = unassigned DNA; mol_type = unassigned DNA
atggccgagcgccgcgccttcgcccagaagatcagcagaacggtggcagccgaagttaggaagcagatctccggacaatatagtggttctccccaactgctcaaaaaccttaatattgttggcaatatatcccatcacaccacagtgccccttaccgaagcagtagatccagtggatttggaagattacctcattactcatcctttggctgtggattctgggcctttacgggatttgattgaatttcctccagatgatattgaagttgtttatagtcctcgggactgcagaactcttgtttcagctgtacctgaagaaagtgaaatggatccacatgttagagactgtataagaagttatacagaagactgggcaattgtcatcagaaaatatcataaattgggaacaggatttaatcccaatacattagataaacagaaagaaaggcaaaaaggtttgccaaaacaagtttttgaatctgatgaagctccagatggcaacagctaccaggatgatcaagatgaccttaaaagacgttcaatgtcaatagatgataccccaaggggtagctgggcctgtagtatctttgacttgaaaaattcacttcctgatgctttgcttcccaatttacttgatcgaactccaaatgaagaaatagaccgtcagaatgatgaccaaaggaaatcaaaccgtcacaaagaactttttgctttgcatccatcaccagatgaggaagaaccaatagaacggcttagtgttcctgatatacccaaagaacattttggtcaaagacttcttgtaaaatgcttatcactcaagtttgaaattgaaattgaacccatttttgcaagtttggctttatatgatgtcaaggaaaagaaaaagatttcagaaaacttttattttgaccttaattctgagcagatgaaagggttgttacgtccacatgtaccacctgctgccattactaccctggcaagatcagcaattttttctatcacttatccttcccaagatgtttttcttgtaataaagctagaaaaagtcctacagcaaggagacattggagagtgtgcagaaccatatatgattttcaaagaagcagatgccaccaagaataaagaaaaactggagaaactgaagagtcaagcagatcagttttgccaaagacttgggaaatatcgcatgccttttgcttggactgcaatccatttaatgaatattgttagcagtgctgggagtttggaaagagattctacagaagtagaaatcagtactggagaacgaaaagggtcttggtcagagaggaggaattctagtattgttggcagacgatcacttgaaaggacaacaagtggagatgatgcttgtaacttgacgagctttcgaccagctactctcacagtgacaaatttttttaagcaggaaggagaccgcttaagtgatgaagatctctacaaattccttgctgatatgagaaggccatcttctgtcttacggcgactaagacctattacagctcagctcaagatagacatttctcccgcacctgaaaatccccattattgcctaactccggagctgcttcaagtgaagctttaccctgacagtagagttagacctaccagagaaatcttagagtttcccgcaagggatgtttatgttccaaacactacttacagaaatcttctctacatataccctcagagtcttaattttgccaatcgtcaaggttctgctagaaatataacagtgaaagtccagtttatgtatggagaggatccaagcaatgccatgccggtaatctttggtaaatctagctgttcagaattttcaaaggaagcctatacagccgtagtatatcataacaggtctcctgattttcatgaagaaatcaaggttaagcttcctgctactttaactgaccatcatcacttgctttttactttttatcatgttagttgtcaacaaaaacaaaatactcctcttgaaacaccagttggatatacatggataccaatgcttcagaatggacggttgaagactggccagttttgcttgccagtctcattggaaaaaccaccacaggcttattctgtactgtctcctgaggttcctctacctggcatgaaatgggtagataatcacaaaggtgtttttaatgttgaagttgttgctgtttcgtctatccatacacaagatccttatcttgacaaattttttgctctggtcaatgctctggatgaacacctgttcccagtccgaattggggacatgcgaatcatggaaaataacttagaaaatgaattgaagagcagtatttcagcactgaattcatcccagctggaaccagtggtccgatttcttcatcttctgctagataaactgatacttttagttattagacctcctgtcattgctggccaaatagttaacctaggtcaagcatcttttgaagccatggcatcaattataaatcgacttcacaaaaacttggaaggaaatcatgaccagcatggcagaaacagccttcttgcatcatatattcattatgttttccgcctaccaaatacttaccctaattcatcatcaccaggtcctgggggtttgggaggatcagtgcattatgccacaatggctagatctgcggtgagacctgcaagccttaatttaaatcgttctcgaagccttagtaatagcaatccagatatatctgggactcccacgtcaccagatgatgaagttcgatcaatcatcgggagtaaggctatggatcgaagttgtaatcgtatgtcttcgcacacagagacgtcaagtttcttacaaacattaacgggacgcttaccaactaaaaagctttttcacgaggagctggctttgcagtgggttgtttgcagtggcagcgttcgggaatcagctttgcaacaagcctggttcttttttgaattaatggtaaagagcatggtgcaccatttatactttaatgataaacttgaggctccaaggaaaagtcgttttccagaacgtttcatggatgacattgcagctcttgtcagcacgattgctagtgatatagtttcacgatttcagaaggacacagaaatggttgagagactcaatacaagccttgcattctttctcaatgatctgttgtctgttatggacagaggatttgtttttagccttataaagtcctgctataaacaggtgtcttcaaagctttactcattaccgaatcccagtgttctggtgtccttgaggctggattttctacgaatcatctgcagtcatgagcactatgttacattaaacttaccctgcagcttacttactccacctgcatctccatcaccttctgtttcttctgcaacatctcagagttctggattttctacgaatgtacaagaccaaaagattgcaaatatgtttgaattatccgtgcctttccgccaacagcattatttggcaggacttgtgttaacagagctggctgtcattttagaccctgatgctgaaggactgtttggattgcataagaaagtcatcaatatggtacacaatttactctccagtcacgactcagacccgcggtactctgaccctcagataaaggctcgagtggccatgttgtatctacctctgattggtattatcatggaaactgtacctcagctgtatgattttacagaaactcacaatcaacgaggaagaccaatttgtatagccactgatgattatgaaagtgagagcggaagtatgataagccagaccgttgccatggcaatcgcagggacatcggtccctcaactaacaaggcctggcagtttcctcctcacgtcaacgagtggcaggcaacacactaccttttcagcagaatcaagtcgaagccttttgatctgtctactttgggttctcaaaaatgcagatgaaacagttctacagaagtggtttacagatctctcagtcttgcagctaaaccggctattagatctgctttatctctgtgtgtcttgctttgagtataaagggaaaaaagtgtttgaacgaatgaatagcttgacctttaagaaatcaaaagacatgagagcaaagcttgaagaagctattcttgggagcataggtgccaggcaagaaatggtacggcgaagccgaggacagctcgagagaagcccatctggaagtgcctttggaagtcaagaaaatttgaggtggaggaaagatatgactcactggcgtcaaaacacagagaagcttgacaaatcaagagcagagattgaacacgaagcactgattgatggaaacctggctacagaagcaaacctaatcattttagatacattagagattgttgttcagaccgtttctgtaacggaatccaaagagagcattcttggtggagtgctaaaagtgctactacacagcatggcctgtaaccaaagtgcagtttatctacaacactgttttgctacacagagagccttggtttcaaagtttcctgaactcttatttgaagaagagacagagcagtgtgctgatttatgcctcaggcttctccgacactgtagcagtagcatcggtacaatacggtcacacgccagtgcctccctttacctactaatgaggcaaaactttgagattgggaataactttgccagggttaaaatgcaggtaacaatgtcactatcctccttggtgggcacatctcagaattttaatgaagaattcttaagacgttctctaaagactatattgacatatgctgaagaagatctggaattgagggaaacaacatttcctgatcaggtccaggatctggttttcaatctccatatgattctttctgatactgtgaaaatgaaggaacaccaggaggatcctgaaatgttgattgatctaatgtacagaattgccaagggttaccagacctctccagatctgcgattgacctggttgcagaacatggcaggcaagcactcagaacgaagcaatcatgctgaagctgcacagtgtctagtccactcagcagcacttgttgctgaatatttgagcatgctggaggaccggaaatatcttcctgtgggatgtgtaacatttcagaatatttcatctaatgttttagaagaatctgcggtctcagatgatgtggtatctccagatgaagaaggtatctgctctggaaaatactttactgagtcaggacttgtgggattactggaacaagcagctgcttccttctctatggctggcatgtatgaagcagttaatgaagtttacaaagtacttattcctattcatgaagctaatcgggatgcaaagaaactatccacaattcatggtaaacttcaagaagcattcagcaaaattgttcatcagagtactggctgggagcggatgtttggcacctattttcgtgttggtttttatggaaccaagttcggggatttggatgaacaagaatttgtttacaaggagcctgcaataaccaaacttgcagagatatctcacagattggagggattttacggagaaagatttggagaggatgtggttgaagtaatcaaagactctaatcctgtagacaagtgtaaattagatcctaacaaggcatatattcagattacctatgtggagccatactttgacacatatgagatgaaggacagaatcacctatttcgacaaaaattacaatcttcgtcgattcatgtactgtacaccctttactttagatggccgtgcccatggggaacttcatgaacaattcaaaaggaagaccattctgactacgtctcatgcctttccttatattaaaacaagggtcaatgtcactcataaagaagagatcatcttaacaccaattgaagttgctattgaggacatgcagaaaaagacacaggagttggcatttgcaacacatcaggatcccgcagaccccaaaatgcttcagatggtactccagggatctgtaggcaccacagtgaatcaggggcctttggaagttgcccaggtttttctgtctgaaatacctagtgacccaaagctcttcagacatcataataaactgcgactctgctttaaagattttactaaaaggtgtgaagatgccttaagaaaaaataagagcttaattgggccggatcaaaaggagtatcaaagggaactggagagaaactatcatcgccttaaagaggccctacagccactgatcaacagaaagatccctcagttatacaaggcagtattgcctgtcacctgccacagagattccttcagtcgaatgagccttcgcaaaatggatctctaa

SEQ ID NO: 5909 - DNA, 6297 bp, Homo sapiens
  source 1..6297: mol_type = unassigned DNA; mol_type = unassigned DNA
atggccgagcgccgcgccttcgcccagaagatcagcagaacggtggcagccgaagttaggaagcagatctccggacaatatagtggttctccccaactgctcaaaaaccttaatattgttggcaatatatcccatcacaccacagtgccccttaccgaagcagtagatccagtggatttggaagattacctcattactcatcctttggctgtggattctgggcctttacgggatttgattgaatttcctccagatgatattgaagttgtttatagtcctcgggactgcagaactcttgtttcagctgtacctgaagaaagtgaaatggatccacatgttagagactgtataagaagttatacagaagactgggcaattgtcatcagaaaatatcataaattgggaacaggatttaatcccaatacattagataaacagaaagaaaggcaaaaaggtttgccaaaacaagtttttgaatctgatgaagctccagatggcaacagctaccaggatgatcaagatgaccttaaaagacgttcaatgtcaatagatgataccccaaggggtagctgggcctgtagtatctttgacttgaaaaattcacttcctgatgctttgcttcccaatttacttgatcgaactccaaatgaagaaatagaccgtcagaatgatgaccaaaggaaatcaaaccgtcacaaagaactttttgctttgcatccatcaccagatgaggaagaaccaatagaacggcttagtgttcctgatatacccaaagaacattttggtcaaagacttcttgtaaaatgcttatcactcaagtttgaaattgaaattgaacccatttttgcaagtttggctttatatgatgtcaaggaaaagaaaaagatttcagaaaacttttattttgaccttaattctgagcagatgaaagggttgttacgtccacatgtaccacctgctgccattactaccctggcaagatcagcaattttttctatcacttatccttcccaagatgtttttcttgtaataaagctagaaaaagtcctacagcaaggagacattggagagtgtgcagaaccatatatgattttcaaagaagcagatgccaccaagaataaagaaaaactggagaaactgaagagtcaagcagatcagttttgccaaagacttgggaaatatcgcatgccttttgcttggactgcaatccatttaatgaatattgttagcagtgctgggagtttggaaagagattctacagaagtagaaatcagtactggagaacgaaaagggtcttggtcagagaggaggaattctagtattgttggcagacgatcacttgaaaggacaacaagtggagatgatgcttgtaacttgacgagctttcgaccagctactctcacagtgacaaatttttttaagcaggaaggagaccgcttaagtgatgaagatctctacaaattccttgctgatatgagaaggccatcttctgtcttacggcgactaagacctattacagctcagctcaagatagacatttctcccgcacctgaaaatccccattattgcctaactccggagctgcttcaagtgaagctttaccctgacagtagagttagacctaccagagaaatcttagagtttcccgcaagggatgtttatgttccaaacactacttacagaaatcttctctacatataccctcagagtcttaattttgccaatcgtcaaggttctgctagaaatataacagtgaaagtccagtttatgtatggagaggatccaagcaatgccatgccggtaatctttggtaaatctagctgttcagaattttcaaaggaagcctatacagccgtagtatatcataacaggtctcctgattttcatgaagaaatcaaggttaagcttcctgctactttaactgaccatcatcacttgctttttactttttatcatgttagttgtcaacaaaaacaaaatactcctcttgaaacaccagttggatatacatggataccaatgcttcagaatggacggttgaagactggccagttttgcttgccagtctcattggaaaaaccaccacaggcttattctgtactgtctcctgaggttcctctacctggcatgaaatgggtagataatcacaaaggtgtttttaatgttgaagttgttgctgtttcgtctatccatacacaagatccttatcttgacaaattttttgctctggtcaatgctctggatgaacacctgttcccagtccgaattggggacatgcgaatcatggaaaataacttagaaaatgaattgaagagcagtatttcagcactgaattcatcccagctggaaccagtggtccgatttcttcatcttctgctagataaactgatacttttagttattagacctcctgtcattgctggccaaatagttaacctaggtcaagcatcttttgaagccatggcatcaattataaatcgacttcacaaaaacttggaaggaaatcatgaccagcatggcagaaacagccttcttgcatcatatattcattatgttttccgcctaccaaatacttaccctaattcatcatcaccaggtcctgggggtttgggaggatcagtgcattatgccacaatggctagatctgcggtgagacctgcaagccttaatttaaatcgttctcgaagccttagtaatagcaatccagatatatctgggactcccacgtcaccagatgatgaagttcgatcaatcatcgggagtaaggctatggatcgaagttgtaatcgtatgtcttcgcacacagagacgtcaagtttcttacaaacattaacgggacgcttaccaactaaaaagctttttcacgaggagctggctttgcagtgggttgtttgcagtggcagcgttcgggaatcagctttgcaacaagcctggttcttttttgaattaatggtaaagagcatggtgcaccatttatactttaatgataaacttgaggctccaaggaaaagtcgttttccagaacgtttcatggatgacattgcagctcttgtcagcacgattgctagtgatatagtttcacgatttcagaaggacacagaaatggttgagagactcaatacaagccttgcattctttctcaatgatctgttgtctgttatggacagaggatttgtttttagccttataaagtcctgctataaacaggtgtcttcaaagctttactcattaccgaatcccagtgttctggtgtccttgaggctggattttctacgaatcatctgcagtcatgagcactatgttacattaaacttaccctgcagcttacttactccacctgcatctccatcaccttctgtttcttctgcaacatctcagagttctggattttctacgaatgtacaagaccaaaagattgcaaatatgtttgaattatccgtgcctttccgccaacagcattatttggcaggacttgtgttaacagagctggctgtcattttagaccctgatgctgaaggactgtttggattgcataagaaagtcatcaatatggtacacaatttactctccagtcacgactcagacccgcggtactctgaccctcagataaaggctcgagtggccatgttgtatctacctctgattggtattatcatggaaactgtacctcagctgtatgattttacagaaactcacaatcaacgaggaagaccaatttgtatagccactgatgattatgaaagtgagagcggaagtatgataagccagaccgttgccatggcaatcgcagggacatcggtccctcaactaacaaggcctggcagtttcctcctcacgtcaacgagtggcaggcaacacactaccttttcagcagaatcaagtcgaagccttttgatctgtctactttgggttctcaaaaatgcagatgaaacagttctacagaagtggtttacagatctctcagtcttgcagctaaaccggctattagatctgctttatctctgtgtgtcttgctttgagtataaagggaaaaaagtgtttgaacgaatgaatagcttgacctttaagaaatcaaaagacatgagagcaaagcttgaagaagctattcttgggagcataggtgccaggcaagaaatggtacggcgaagccgaggacagctcgagagaagcccatctggaagtgcctttggaagtcaagaaaatttgaggtggaggaaagatatgactcactggcgtcaaaacacagagaagcttgacaaatcaagagcagagattgaacacgaagcactgattgatggaaacctggctacagaagcaaacctaatcattttagatacattagagattgttgttcagaccgtttctgtaacggaatccaaagagagcattcttggtggagtgctaaaagtgctactacacagcatggcctgtaaccaaagtgcagtttatctacaacactgttttgctacacagagagccttggtttcaaagtttcctgaactcttatttgaagaagagacagagcagtgtgctgatttatgcctcaggcttctccgacactgtagcagtagcatcggtacaatacggtcacacgccagtgcctccctttacctactaatgaggcaaaactttgagattgggaataactttgccagggttaaaatgcaggtaacaatgtcactatcctccttggtgggcacatctcagaattttaatgaagaattcttaagacgttctctaaagactatattgacatatgctgaagaagatctggaattgagggaaacaacatttcctgatcaggtccaggatctggttttcaatctccatatgattctttctgatactgtgaaaatgaaggaacaccaggaggatcctgaaatgttgattgatctaatgtacagaattgccaagggttaccagacctctccagatctgcgattgacctggttgcagaacatggcaggcaagcactcagaacgaagcaatcatgctgaagctgcacagtgtctagtccactcagcagcacttgttgctgaatatttgagcatgctggaggaccggaaatatcttcctgtgggatgtgtaacatttcagaatatttcatctaatgttttagaagaatctgcggtctcagatgatgtggtatctccagatgaagaaggtatctgctctggaaaatactttactgagtcaggacttgtgggattactggaacaagcagctgcttccttctctatggctggcatgtatgaagcagttaatgaagtttacaaagtacttattcctattcatgaagctaatcgggatgcaaagaaactatccacaattcatggtaaacttcaagaagcattcagcaaaattgttcatcaggatggtaagcggatgtttggcacctattttcgtgttggtttttatggaaccaagttcggggatttggatgaacaagaatttgtttacaaggagcctgcaataaccaaacttgcagagatatctcacagattggagggattttacggagaaagatttggagaggatgtggttgaagtaatcaaagactctaatcctgtagacaagtgtaaattagatcctaacaaggcatatattcagattacctatgtggagccatactttgacacatatgagatgaaggacagaatcacctatttcgacaaaaattacaatcttcgtcgattcatgtactgtacaccctttactttagatggccgtgcccatggggaacttcatgaacaattcaaaaggaagaccattctgactacgtctcatgcctttccttatattaaaacaagggtcaatgtcactcataaagaagagatcatcttaacaccaattgaagttgctattgaggacatgcagaaaaagacacaggagttggcatttgcaacacatcaggatcccgcagaccccaaaatgcttcagatggtactccagggatctgtaggcaccacagtgaatcaggggcctttggaagttgcccaggtttttctgtctgaaatacctagtgacccaaagctcttcagacatcataataaactgcgactctgctttaaagattttactaaaaggtgtgaagatgccttaagaaaaaataagagcttaattgggccggatcaaaaggagtatcaaagggaactggagagaaactatcatcgccttaaagaggccctacagccactgatcaacagaaagatccctcagttatacaaggcagtattgcctgtcacctgccacagagattccttcagtcgaatgagccttcgcaaaatggatctctaa

SEQ ID NO: 5910 - DNA, 6423 bp, Homo sapiens
  source 1..6423: mol_type = unassigned DNA; mol_type = unassigned DNA
atggccgagcgccgcgccttcgcccagaagatcagcagaacggtggcagccgaagttaggaagcagatctccggacaatatagtggttctccccaactgctcaaaaaccttaatattgttggcaatatatcccatcacaccacagtgccccttaccgaagcagtagatccagtggatttggaagattacctcattactcatcctttggctgtggattctgggcctttacgggatttgattgaatttcctccagatgatattgaagttgtttatagtcctcgggactgcagaactcttgtttcagctgtacctgaagaaagtgaaatggatccacatgttagagactgtataagaagttatacagaagactgggcaattgtcatcagaaaatatcataaattgggaacaggatttaatcccaatacattagataaacagaaagaaaggcaaaaaggtttgccaaaacaagtttttgaatctgatgaagctccagatggcaacagctaccaggatgatcaagatgaccttaaaagacgttcaatgtcaatagatgataccccaaggggtagctgggcctgtagtatctttgacttgaaaaattcacttcctgatgctttgcttcccaatttacttgatcgaactccaaatgaagaaatagaccgtcagaatgatgaccaaaggaaatcaaaccgtcacaaagaactttttgctttgcatccatcaccagatgaggaagaaccaatagaacggcttagtgttcctgatatacccaaagaacattttggtcaaagacttcttgtaaaatgcttatcactcaagtttgaaattgaaattgaacccatttttgcaagtttggctttatatgatgtcaaggaaaagaaaaagatttcagaaaacttttattttgaccttaattctgagcagatgaaagggttgttacgtccacatgtaccacctgctgccattactaccctggcaagatcagcaattttttctatcacttatccttcccaagatgtttttcttgtaataaagctagaaaaagtcctacagcaaggagacattggagagtgtgcagaaccatatatgattttcaaagaagcagatgccaccaagaataaagaaaaactggagaaactgaagagtcaagcagatcagttttgccaaagacttgggaaatatcgcatgccttttgcttggactgcaatccatttaatgaatattgttagcagtgctgggagtttggaaagagattctacagaagtagaaatcagtactggagaacgaaaagggtcttggtcagagaggaggaattctagtattgttggcagacgatcacttgaaaggacaacaagtggagatgatgcttgtaacttgacgagctttcgaccagctactctcacagtgacaaatttttttaagcaggaaggagaccgcttaagtgatgaagatctctacaaattccttgctgatatgagaaggccatcttctgtcttacggcgactaagacctattacagctcagctcaagatagacatttctcccgcacctgaaaatccccattattgcctaactccggagctgcttcaagtgaagctttaccctgacagtagagttagacctaccagagaaatcttagagtttcccgcaagggatgtttatgttccaaacactacttacagaaatcttctctacatataccctcagagtcttaattttgccaatcgtcaaggttctgctagaaatataacagtgaaagtccagtttatgtatggagaggatccaagcaatgccatgccggtaatctttggtaaatctagctgttcagaattttcaaaggaagcctatacagccgtagtatatcataacaggtctcctgattttcatgaagaaatcaaggttaagcttcctgctactttaactgaccatcatcacttgctttttactttttatcatgttagttgtcaacaaaaacaaaatactcctcttgaaacaccagttggatatacatggataccaatgcttcagaatggacggttgaagactggccagttttgcttgccagtctcattggaaaaaccaccacaggcttattctgtactgtctcctgaggttcctctacctggcatgaaatgggtagataatcacaaaggtgtttttaatgttgaagttgttgctgtttcgtctatccatacacaagatccttatcttgacaaattttttgctctggtcaatgctctggatgaacacctgttcccagtccgaattggggacatgcgaatcatggaaaataacttagaaaatgaattgaagagcagtatttcagcactgaattcatcccagctggaaccagtggtccgatttcttcatcttctgctagataaactgatacttttagttattagacctcctgtcattgctggccaaatagttaacctaggtcaagcatcttttgaagccatggcatcaattataaatcgacttcacaaaaacttggaaggaaatcatgaccagcatggcagaaacagccttcttgcatcatatattcattatgttttccgcctaccaaatacttaccctaattcatcatcaccaggtcctgggggtttgggaggatcagtgcattatgccacaatggctagatctgcggtgagacctgcaagccttaatttaaatcgttctcgaagccttagtaatagcaatccagatatatctgggactcccacgtcaccagatgatgaagttcgatcaatcatcgggagtaagggtttagatcgctccaattcctgggttaacactggtggtccaaaagctgccccatggggatccaaccccagtccaagtgcagaatcaacacaggctatggatcgaagttgtaatcgtatgtcttcgcacacagagacgtcaagtttcttacaaacattaacgggacgcttaccaactaaaaagctttttcacgaggagctggctttgcagtgggttgtttgcagtggcagcgttcgggaatcagctttgcaacaagcctggttcttttttgaattaatggtaaagagcatggtgcaccatttatactttaatgataaacttgaggctccaaggaaaagtcgttttccagaacgtttcatggatgacattgcagctcttgtcagcacgattgctagtgatatagtttcacgatttcagaaggacacagaaatggttgagagactcaatacaagccttgcattctttctcaatgatctgttgtctgttatggacagaggatttgtttttagccttataaagtcctgctataaacaggtgtcttcaaagctttactcattaccgaatcccagtgttctggtgtccttgaggctggattttctacgaatcatctgcagtcatgagcactatgttacattaaacttaccctgcagcttacttactccacctgcatctccatcaccttctgtttcttctgcaacatctcagagttctggattttctacgaatgtacaagaccaaaagattgcaaatatgtttgaattatccgtgcctttccgccaacagcattatttggcaggacttgtgttaacagagctggctgtcattttagaccctgatgctgaaggactgtttggattgcataagaaagtcatcaatatggtacacaatttactctccagtcacgactcagacccgcggtactctgaccctcagataaaggctcgagtggccatgttgtatctacctctgattggtattatcatggaaactgtacctcagctgtatgattttacagaaactcacaatcaacgaggaagaccaatttgtatagccactgatgattatgaaagtgagagcggaagtatgataagccagaccgttgccatggcaatcgcagggacatcggtccctcaactaacaaggcctggcagtttcctcctcacgtcaacgagtggcaggcaacacactaccttttcagcagaatcaagtcgaagccttttgatctgtctactttgggttctcaaaaatgcagatgaaacagttctacagaagtggtttacagatctctcagtcttgcagctaaaccggctattagatctgctttatctctgtgtgtcttgctttgagtataaagggaaaaaagtgtttgaacgaatgaatagcttgacctttaagaaatcaaaagacatgagagcaaagcttgaagaagctattcttgggagcataggtgccaggcaagaaatggtacggcgaagccgaggacagctcggtacgtacacaatagcttctcctcctgagagaagcccatctggaagtgcctttggaagtcaagaaaatttgaggtggaggaaagatatgactcactggcgtcaaaacacagagaagcttgacaaatcaagagcagagattgaacacgaagcactgattgatggaaacctggctacagaagcaaacctaatcattttagatacattagagattgttgttcagaccgtttctgtaacggaatccaaagagagcattcttggtggagtgctaaaagtgctactacacagcatggcctgtaaccaaagtgcagtttatctacaacactgttttgctacacagagagccttggtttcaaagtttcctgaactcttatttgaagaagagacagagcagtgtgctgatttatgcctcaggcttctccgacactgtagcagtagcatcggtacaatacggtcacacgccagtgcctccctttacctactaatgaggcaaaactttgagattgggaataactttgccagggttaaaatgcaggtaacaatgtcactatcctccttggtgggcacatctcagaattttaatgaagaattcttaagacgttctctaaagactatattgacatatgctgaagaagatctggaattgagggaaacaacatttcctgatcaggtccaggatctggttttcaatctccatatgattctttctgatactgtgaaaatgaaggaacaccaggaggatcctgaaatgttgattgatctaatgtacagaattgccaagggttaccagacctctccagatctgcgattgacctggttgcagaacatggcaggcaagcactcagaacgaagcaatcatgctgaagctgcacagtgtctagtccactcagcagcacttgttgctgaatatttgagcatgctggaggaccggaaatatcttcctgtgggatgtgtaacatttcagaatatttcatctaatgttttagaagaatctgcggtctcagatgatgtggtatctccagatgaagaaggtatctgctctggaaaatactttactgagtcaggacttgtgggattactggaacaagcagctgcttccttctctatggctggcatgtatgaagcagttaatgaagtttacaaagtacttattcctattcatgaagctaatcgggatgcaaagaaactatccacaattcatggtaaacttcaagaagcattcagcaaaattgttcatcagagtactggctgggagcggatgtttggcacctattttcgtgttggtttttatggaaccaagttcggggatttggatgaacaagaatttgtttacaaggagcctgcaataaccaaacttgcagagatatctcacagattggagggattttacggagaaagatttggagaggatgtggttgaagtaatcaaagactctaatcctgtagacaagtgtaaattagatcctaacaaggcatatattcagattacctatgtggagccatactttgacacatatgagatgaaggacagaatcacctatttcgacaaaaattacaatcttcgtcgattcatgtactgtacaccctttactttagatggccgtgcccatggggaacttcatgaacaattcaaaaggaagaccattctgactacgtctcatgcctttccttatattaaaacaagggtcaatgtcactcataaagaagagatcatcttaacaccaattgaagttgctattgaggacatgcagaaaaagacacaggagttggcatttgcaacacatcaggatcccgcagaccccaaaatgcttcagatggtactccagggatctgtaggcaccacagtgaatcaggggcctttggaagttgcccaggtttttctgtctgaaatacctagtgacccaaagctcttcagacatcataataaactgcgactctgctttaaagattttactaaaaggtgtgaagatgccttaagaaaaaataagagcttaattgggccggatcaaaaggagtatcaaagggaactggagagaaactatcatcgccttaaagaggccctacagccactgatcaacagaaagatccctcagttatacaaggcagtattgcctgtcacctgccacagagattccttcagtcgaatgagccttcgcaaaatggatctctaa

SEQ ID NO: 5911 - DNA, 100 bp, Homo sapiens
  source 1..100: mol_type = unassigned DNA; mol_type = unassigned DNA
tgacccaaagctcttcagacatcataataaactgcgactctgctttaaagattttactaaaaggaattaataaacttggccagtgtggtaccttatgcct

SEQ ID NO: 5912 - DNA, 1855 bp, Homo sapiens
  source 1..1855: mol_type = unassigned DNA; mol_type = unassigned DNA
ctgaggtgacacttttttaaaaaaaattgtaaaaattgcatagaaagtgtccaaatatttatctttattgaaagaatttgtcttctgatatgctgtgtgagagttaaggtgatcttaatgtactttgtacctgacatgaatgtgtagttaatgcatgccaatgggtggtttgggtgatttagaataaccaactcatctcaaaaattttttacttattatctttcactcatagatttttttttccttttctgttccatttttagtaactcttctacataaaaattttttactgggctgggtgcggtggctcacgcctataatctcagcactttgggaggctgaggtgggtagatcacctgaggccaggagtttgagaacagcctagccaacatgctgaaacccgtctctactaaaaatacaaaaattagccaggtgtggtggcatatgcctgtaatcccagctactcgggaggctgaggcaggagaatcacttgaacttgggaggtagaggttgcagtgagccaagattgtgccactgcactccagcctgggcaaaagagtgagacgccatctaaataataataataataataatttattggcacagggctgctaattgtagaatttttgcattagtgcttctggagggtcttgacatttacattgcctgctctatgccaggtgctatctttgactcctaacttttacaatctcatttaatacgtgaagaggttatataaaggctaatgctaatttaaaaatatgtaagtgttgttttaaaatttaacttgacctagtatgctctagtatcagtacaattaagacagtttatatcaagcatcttttcttgcaataaggaaaatgagttaatttatctcagttatatagatttaaaaaacatagaccaatgtgatagaggcacttcgtacaaactccgaaaaatattatatgtgatttagtcacttgttagtagccctatttgcatacttatttgttagaaataatgaaaaaggaaagactgtttactttgtttaaaccttcatttaaaatattataattttgaattaaaactttttgcaatgttttggaaattttatgctgtaacaatctaaacataatgtgaaaaacaggaagatttcatattaaagtttctccattttcctaaacctaggatggtaagcggatgtttggcacctattttcgtgttggtttttatggaaccaagttcggggatttggatgaacaagaatttgtttacaaggagcctgcaataaccaaacttgcagagatatctcacagattggagggattttacggagaaagatttggagaggatgtggttgaagtaatcaaagactctaatcctgtagacaagtgtaaattagatcctaacaaggcatatattcagattacctatgtggagccatactttgacacatatgagatgaaggacagaatcacctatttcgacaaaaattacaatcttcgtcgattcatgtactgtacaccctttactttagatggccgtgcccatggggaacttcatgaacaattcaaaaggaagaccattctgactacgtctcatgcctttccttatattaaaacaagggtcaatgtcactcataaagaagagatcatcttaacaccaattgaagttgctattgaggacatgcagaaaaagacacaggagttggcatttgcaacacatcaggatcccgcagaccccaaaatgcttcagatggtactccagggatctgtaggcaccacagtgaatcaggggcctttggaagttgcccaggtttttctgtctgaaatacctagtgacccaaagctcttcagacatcataataaactgc

SEQ ID NO: 5913 - DNA, 855 bp, Homo sapiens
  source 1..855: mol_type = unassigned DNA; mol_type = unassigned DNA
ttcatataaaatgtttctttttctttattgtagggattttacggagaaagatttggagaggatgtggttgaagtaatcaaagactctaatcctgtagacaagtgtaaattagatcctaacaaggcatatattcagattacctatgtggagccatactttgacacatatgagatgaaggacagaatcacctatttcgacaaaaattacaatcttcgtcgattcatgtactgtacaccctttactttagatggccgtgcccatggggaacttcatgaacaattcaaaaggaagaccattctgactacgtctcatgcctttccttatattaaaacaagggtcaatgtcactcataaagaagaggtaagtccattaatgggcaaacagcattagtgaagcaaatacattcaagccatgtaacaacaactcagatgtaccagaagatatgtaccatcccttataccataacatattagaactttacccatttttgagtcctcaattttttacttcttttctaagaccctaattcacccccagctttttctttaaaaggttgattttttttttttcatttaggaatccaagtttggaattttattgttacatgaaagtttacaattgatcttttttttttctaatttcagttgattatacataaagttcattaaatagttttcagtcagtacactgatttaacagatgctcttttactcagatcatcttaacaccaattgaagttgctattgaggacatgcagaaaaagacacaggagttggcatttgcaacacatcaggatcccgcagaccccaaaatgcttcagatggtactccagggatctgtaggcaccacagtgaa

SEQ ID NO: 5914 - DNA, 123 bp, Homo sapiens
  source 1..123: mol_type = unassigned DNA; mol_type = unassigned DNA
ctgtgaatcaaagtctgcattttaacaagatccccagggattttacggagaaagatttggagaggatgtggttgaagtaatcaaagactctaatcctgtagacaagtgtaaattagatcctaa

SEQ ID NO: 5915 - DNA, 382 bp, Homo sapiens
  source 1..382: mol_type = unassigned DNA; mol_type = unassigned DNA
tttactgagtcaggacttgtgggattactggaacaagcagctgcttccttctctatggctggcatgtatgaagcagttaatgaagtttacaaagtacttattcctattcatgaagctaatcgggatgcaaagaaactatccacaattcatggtaaacttcaagaagcattcagcaaaattgttcatcagtttttttatgacttgcccttttttactttttattatacagagtactggctgggagcggatgtttggcacctattttcgtgttggtttttatggaaccaagttcggggatttggatgaacaagaatttgtttacaaggagcctgcaataaccaaacttgcagagatatctcacagattggagggattttacgga

SEQ ID NO: 5916 - DNA, 126 bp, Homo sapiens
  source 1..126: mol_type = unassigned DNA; mol_type = unassigned DNA
caagaatttgtttacaaggagcctgcaataaccaaacttgcagagatatctcacagattggagtgtagtggatggaccggaagcattgggttcacctgggagattgtttgaaatgcagaacctcag

SEQ ID NO: 5917 - DNA, 100 bp, Homo sapiens
  source 1..100: mol_type = unassigned DNA; mol_type = unassigned DNA
agaagaaataaagatgaagatggtaagcggatgtttggcacctattttcgtgttggtttttatggaaccaagttcggggatttggatgaacaagaatttg

SEQ ID NO: 5918 - DNA, 117 bp, Homo sapiens
  source 1..117: mol_type = unassigned DNA; mol_type = unassigned DNA
tttttcctgcaggcgaagcaatatgactgtgcttccgtgaagcatacttccgtagtagtttgacactagagggagttaactcttctacataaaaattttttactgggctgggtgcgg

SEQ ID NO: 5919 - DNA, 100 bp, Homo sapiens
  source 1..100: mol_type = unassigned DNA; mol_type = unassigned DNA
agtattctggtagatctttcactggattgaagtccaaaaaacaggtatcatcctgtggtccaaagctctgaagaagaaataaagatgaagtgagtttttc

SEQ ID NO: 5920 - DNA, 100 bp, Homo sapiens
  source 1..100: mol_type = unassigned DNA; mol_type = unassigned DNA
gctgaccctactccccacttttactattgtctattgtgaaaaacaggtatcatcctgtggtccaaagctctgaagaagaaataaagatgaagtgagtttt

SEQ ID NO: 5921 - DNA, 8283 bp, Homo sapiens
  source 1..8283: mol_type = unassigned DNA; mol_type = unassigned DNA
acgagcgaggaggcacgcgcccgccggtccgcacccggcccgccgcagccgccgccgccgtcgccgtcgccgcagcagccatggccgagcgccgcgccttcgcccagaagatcagcagaacggtggcagccgaagttaggaagcagatctccggacaatatagtggttctccccaactgctcaaaaaccttaatattgttggcaatatatcccatcacaccacagtgccccttaccgaagcagtagatccagtggatttggaagattacctcattactcatcctttggctgtggattctgggcctttacgggatttgattgaatttcctccagatgatattgaagttgtttatagtcctcgggactgcagaactcttgtttcagctgtacctgaagaaagtgaaatggatccacatgttagagactgtataagaagttatacagaagactgggcaattgtcatcagaaaatatcataaattgggaacaggatttaatcccaatacattagataaacagaaagaaaggcaaaaaggtttgccaaaacaagtttttgaatctgatgaagctccagatggcaacagctaccaggatgatcaagatgaccttaaaagacgttcaatgtcaatagatgataccccaaggggtagctgggcctgtagtatctttgacttgaaaaattcacttcctgatgctttgcttcccaatttacttgatcgaactccaaatgaagaaatagaccgtcagaatgatgaccaaaggaaatcaaaccgtcacaaagaactttttgctttgcatccatcaccagatgaggaagaaccaatagaacggcttagtgttcctgatatacccaaagaacattttggtcaaagacttcttgtaaaatgcttatcactcaagtttgaaattgaaattgaacccatttttgcaagtttggctttatatgatgtcaaggaaaagaaaaagatttcagaaaacttttattttgaccttaattctgagcagatgaaagggttgttacgtccacatgtaccacctgctgccattactaccctggcaagatcagcaattttttctatcacttatccttcccaagatgtttttcttgtaataaagctagaaaaagtcctacagcaaggagacattggagagtgtgcagaaccatatatgattttcaaagaagcagatgccaccaagaataaagaaaaactggagaaactgaagagtcaagcagatcagttttgccaaagacttgggaaatatcgcatgccttttgcttggactgcaatccatttaatgaatattgttagcagtgctgggagtttggaaagagattctacagaagtagaaatcagtactggagaacgaaaagggtcttggtcagagaggaggaattctagtattgttggcagacgatcacttgaaaggacaacaagtggagatgatgcttgtaacttgacgagctttcgaccagctactctcacagtgacaaatttttttaagcaggaaggagaccgcttaagtgatgaagatctctacaaattccttgctgatatgagaaggccatcttctgtcttacggcgactaagacctattacagctcagctcaagatagacatttctcccgcacctgaaaatccccattattgcctaactccggagctgcttcaagtgaagctttaccctgacagtagagttagacctaccagagaaatcttagagtttcccgcaagggatgtttatgttccaaacactacttacagaaatcttctctacatataccctcagagtcttaattttgccaatcgtcaaggttctgctagaaatataacagtgaaagtccagtttatgtatggagaggatccaagcaatgccatgccggtctcctgattttcatgaagaaatcaaggttaagcttcctgctactttaactgaccatcatcacttgctttttactttttatcatgttagttgtcaacaaaaacaaaatactcctcttgaaacaccagttggatatacatggataccaatgcttcagaatggacggttgaagactggccagttttgcttgccagtctcattggaaaaaccaccacaggcttattctgtactgtctcctgaggttcctctacctggcatgaaatgggtagataatcacaaaggtgtttttaatgttgaagttgttgctgtttcgtctatccatacacaagatccttatcttgacaaattttttgctctggtcaatgctctggatgaacacctgttcccagtccgaattggggacatgcgaatcatggaaaataacttagaaaatgaattgaagagcagtatttcagcactgaattcatcccagctggaaccagtggtccgatttcttcatcttctgctagataaactgatacttttagttattagacctcctgtcattgctggccaaatagttaacctaggtcaagcatcttttgaagccatggcatcaattataaatcgacttcacaaaaacttggaaggaaatcatgaccagcatggcagaaacagccttcttgcatcatatattcattatgttttccgcctaccaaatacttaccctaattcatcatcaccaggtcctgggggtttgggaggatcagtgcattatgccacaatggctagatctgcggtgagacctgcaagccttaatttaaatcgttctcgaagccttagtaatagcaatccagatatatctgggactcccacgtcaccagatgatgaagttcgatcaatcatcgggagtaagggtttagatcgctccaattcctgggttaacactggtggtccaaaagctgccccatggggatccaaccccagtccaagtgcagaatcaacacaggctatggatcgaagttgtaatcgtatgtcttcgcacacagagacgtcaagtttcttacaaacattaacgggacgcttaccaactaaaaagctttttcacgaggagctggctttgcagtgggttgtttgcagtggcagcgttcgggaatcagctttgcaacaagcctggttcttttttgaattaatggtaaagagcatggtgcaccatttatactttaatgataaacttgaggctccaaggaaaagtcgttttccagaacgtttcatggatgacattgcagctcttgtcagcacgattgctagtgatatagtttcacgatttcagaaggacacagaaatggttgagagactcaatacaagccttgcattctttctcaatgatctgttgtctgttatggacagaggatttgtttttagccttataaagtcctgctataaacaggtgtcttcaaagctttactcattaccgaatcccagtgttctggtgtccttgaggctggattttctacgaatcatctgcagtcatgagcactatgttacattaaacttaccctgcagcttacttactccacctgcatctccatcaccttctgtttcttctgcaacatctcagagttctggattttctacgaatgtacaagaccaaaagattgcaaatatgtttgaattatccgtgcctttccgccaacagcattatttggcaggacttgtgttaacagagctggctgtcattttagaccctgatgctgaaggactgtttggattgcataagaaagtcatcaatatggtacacaatttactctccagtcacgactcagacccgcggtactctgaccctcagataaaggctcgagtggccatgttgtatctacctctgattggtattatcatggaaactgtacctcagctgtatgattttacagaaactcacaatcaacgaggaagaccaatttgtatagccactgatgattatgaaagtgagagcggaagtatgataagccagaccgttgccatggcaatcgcagggacatcggtccctcaactaacaaggcctggcagtttcctcctcacgtcaacgagtggcaggcaacacactaccttttcagcagaatcaagtcgaagccttttgatctgtctactttgggttctcaaaaatgcagatgaaacagttctacagaagtggtttacagatctctcagtcttgcagctaaaccggctattagatctgctttatctctgtgtgtcttgctttgagtataaagggaaaaaagtgtttgaacgaatgaatagcttgacctttaagaaatcaaaagacatgagagcaaagcttgaagaagctattcttgggagcataggtgccaggcaagaaatggtacggcgaagccgaggacagctcgagagaagcccatctggaagtgcctttggaagtcaagaaaatttgaggtggaggaaagatatgactcactggcgtcaaaacacagagaagcttgacaaatcaagagcagagattgaacacgaagcactgattgatggaaacctggctacagaagcaaacctaatcattttagatacattagagattgttgttcagaccgtttctgtaacggaatccaaagagagcattcttggtggagtgctaaaagtgctactacacagcatggcctgtaaccaaagtgcagtttatctacaacactgttttgctacacagagagccttggtttcaaagtttcctgaactcttatttgaagaagagacagagcagtgtgctgatttatgcctcaggcttctccgacactgtagcagtagcatcggtacaatacggtcacacgccagtgcctccctttacctactaatgaggcaaaactttgagattgggaataactttgccagggttaaaatgcaggtaacaatgtcactatcctccttggtgggcacatctcagaattttaatgaagaattcttaagacgttctctaaagactatattgacatatgctgaagaagatctggaattgagggaaacaacatttcctgatcaggtccaggatctggttttcaatctccatatgattctttctgatactgtgaaaatgaaggaacaccaggaggatcctgaaatgttgattgatctaatgtacagaattgccaagggttaccagacctctccagatctgcgattgacctggttgcagaacatggcaggcaagcactcagaacgaagcaatcatgctgaagctgcacagtgtctagtccactcagcagcacttgttgctgaatatttgagcatgctggaggaccggaaatatcttcctgtgggatgtgtaacatttcagaatatttcatctaatgttttagaagaatctgcggtctcagatgatgtggtatctccagatgaagaaggtatctgctctggaaaatactttactgagtcaggacttgtgggattactggaacaagcagctgcttccttctctatggctggcatgtatgaagcagttaatgaagtttacaaagtacttattcctattcatgaagctaatcgggatgcaaagaaactatccacaattcatggtaaacttcaagaagcattcagcaaaattgttcatcagagtactggctgggagttctatcttgtgtatatttttctttttgactcgatgaaaacttcagtaattttgttttttctaaaagcaatgtttcctagctaattttctagtattctggtagatctttcactggattgaagtccagtaaggataatctgtgcattgtagaaaggctctttgaattgataacttgctccccaacttacaggaaaaccccatctgggcttatatattagtcacatgtttcatttttttattgtgctccttgatttagtgcaaattatttgagttggcaaagctttttagaagggtgtgtgtgtgtgtgtgtgaaagataactctaaaacttagtatttcagtaaagtctttaccatgcaaaataataaatcatgaacctttcgggagtcatgtggctgttatctcctctggtagtttcagttctttaatggctgtttagtgttcacttttatttttacttttccctcgaaatagtaggaagtaaaagcatgtttgttgtcttttaaaatttttgtttatgagatggggtctcactctgtaattcagactggagtgcagtggcacgatcacagctcactgcagccttgacacctcctgagttcaggtgatcttcccacctcagcctcccgagtagctaggactgtaggcgcatgccaccagctaattttttgtatttttgtagagacagggttgtgccatgttgctcaggttgatctcaaactcctggccccaagcaatccacctgcctcagcctcccaaagtgctaggattataggaataagccaccatgcccagcctaaaagcatgttttgaactcttctttttttatgattcatatttaattatttttagcagaaagagaaatgttaaatttctgtatgaaaatttttataaccactttctatgttatgtatgtatatatacatatatatttttgtaattatgtttgtaccagcctggacaacatagtgagaccatctctacagaaaattagaaaaattggccaggtatggtgttgtgcatatgtactcccagctactcgggaggcagaggcaggaggattgcttcaccccaggcatcaaggctgcagtgagctatgatggtgccattgcactctagcctggatgacagagtgagaccctatcttagggtcagggttaaaaaagaaaagtttgttcagttatcaaatagtgacgaatttgtattcagaagtacactaatacaagtttaaatttttcagaaaaatcaatccccagtgataacatagtcatgtgatacttttttttccattcaaagatcacaacatatttctttaaagaacaccactactctagtaaagtatatcttacattttctggaaaggctagagaagatctctactagatccctaaggaaatatagattaccctaacttttgagattgacagatgcaaattgactatatcttaactctcattattggactgaatggacatgaatgtgagccagtattttggtttttatatgttcagaaatactggccatagttctggctcagtggcttctgttggatttttattttcttcaatccacactaaagctgagtgacataaagtaacacatccaagcagttaaaagatagaacaggattagaaacagcaaattataatgagcagggcgatcaactctgaaagagggaaatgaaataaaaattcaagaatagagcatagtgaaaacaagtacttttgggtagtcaagtgggtaaatgtgacactctaaaggagaaagtaaaacaggtcaggcacagtggcccacacctgtaatcccagcactttgggaggccaaggtgggaggatcgctttagttcaggagtttaagaccagcatggtcaacatggcaaaacccatgtctctaccaaaaagaaacaaaaaaaattgctggggcatgtacctgtggtctcagctacttggaaggctgaggtgggaggattgcttgagccgggaaggtagagtttgcagtgcgctgagaccatgctactatgctccagcctgggcaacaaaacgagaccctgtctcaaaaaaaaaaaaaagaaatcagaacattgtaggtataaaacatccatgagcctttacctcagaaaggtaaagttagatatgaagaaagttaaggaaaacatagtaaatgggaagaatcttagtatctctaagaggagatactttctggtagttagtgactccctgatgactggtatagacccataactgagcacctgataatatatcccataccactgattttttttctgccccttatgctacttttgagaagaaaaagaaagatatgaaagcccagcatggtggctgacacctgtaatcccaacattatgggaggccaaggcgcgatcctcgcttgaggcctgaagtttgaaaccagtctgggcaacactgagatctcatctctacccaaaaaaaaaaaaaaaaaaaaaaaaaaaaaaaaaaaaattagctgggcatggtggtgtgtacctgtggtcctagctacttgggagactgaagcaggaagatcacttaggcccaagagtttgaggttacagtgaactatgatcaccactgcactctagcctgggtgacatagtaagaccctgtcttttaaaaagaaagaaaaatatggacagcaaatatttactatgtagatgatattagatgtggtttctttttttcggactgggacataaaatggtcagatatgtccttctgataagaaatggagtacaatatatcttggaagaatgtgttttgtcagtaagccaccaacc

SEQ ID NO: 5922 - DNA, 1566 bp, Homo sapiens
  source 1..1566: mol_type = unassigned DNA; mol_type = unassigned DNA
ttctaatggtagattgaaagtccaaatgcactttttccaggtggcatctttggatcttctgtgtctcttcttttaagaacaatgcaaatgtacttattgattatcaaaaacgaggatttttttaagtattcataacacacatttaacaccttggtgtcctgggccccagagttcctttgaaggcccataccaatattttcagtgtaaaactcagtcttttcagaagaaaatacagtatatgaatgttttacgataacattaattacctgattttcaatacagttatgactgaagaatgatatttctaagggcacattttgaaaactccataaatcgtattgtattaacaccttaatagatacaatagtaaaacttaagaatttttctctgtcatatgaccctctgttcctgcagttttggggttcattaaaagcacaaataaaacaatttaatctctttgaaataaagtaataaaagtaccttttagaagttttctttttcccttgtgtataaaacttctctatgtttctgtaatgaacacataaatttccatactttttcccttaactggttattttcttaaaagtcagaatttaatatggcgtatttcttttttgcccctcctgccccccccaccaactgatattatccattccataggccacagttatttctctaggcctgcatagcgacattttcatactactttaaaactaagtaggttgtgcacagtatcaaaaacctttctaggtaaactctgagcgagctatctaaactccctcccagcttgggaagcacatactaatggagaagaatttctgttctaattagaattgccaagggttaccagacctctccagatctgcgattgacctggttgcagaacatggcaggcaagcactcagaacgaagcaatcatgctgaagctgcacagtgtctagtccactcagcagcacttgttgctgaatatttgagcatgctggaggaccggaaatatcttcctgtgggatgtgtaacatttcagaatatttcatctaatgttttagaagaatctgcggtctcagatgatgtggtatctccagatgaagaaggtatctgctctggaaaatactttactgagtcaggacttgtgggattactggaacaagcagctgcttccttctctatggtagatgactcttgttaattcttttcccacagtttcatacctctaattatcaatgacatgtgtatttattctctctggcttatgaccctacttttctttaaagataatttattctggacccagtatggtggctcatgcctgtaatctcagcactttgagaggctaagacgggaggattgcttgaatccaggagttcaagaccagcatggggaacatagtgagataccgtctctacaaaaaattaaaaattcaccaggcatggtggctcatgcctgtggtcccagctacttgagaggctgaggtgggaggattgcttgagcccaagaggttgaggctgcagtgagccatgattatgctgctgcactccagcctggacaacagagtaaaaccctgtctcc

SEQ ID NO: 5923 - DNA, 100 bp, Homo sapiens
  source 1..100: mol_type = unassigned DNA; mol_type = unassigned DNA
gaagaagatctggaattgagggaaacaacatttcctgatcaggtgaaagaacaaaaataaacatagtctgctgaggaatttatataaagtttactaccct

SEQ ID NO: 5924 - DNA, 580 bp, Homo sapiens
  source 1..580: mol_type = unassigned DNA; mol_type = unassigned DNA
gtggaagaattttaggagaaggggcagacatggcaagtgagagtggcaggcaacacactaccttttcagcagaatcaagtcgaagccttttgatctgtctactttgggttctcaaaaatgcagatgaaacagttctacagaagtggtttacagatctctcagtcttgcagctaaaccggctattagatctgctttatctctgtgtgtcttgctttgagtataaagggaaaaaagtgtttgaacgaatgaatagcttgacctttaagaaatcaaaagacatgagagcaaagcttgaagaagctattcttgggagcataggtgccaggcaagaaatggtacggcgaagccgaggacagctcgagagaagcccatctggaagtgcctttggaagtcaagaaaatttgaggtggaggaaagatatgactcactggcgtcaaaacacagagaagcttgacaaatcaagagcagagattgaacacgaagcactgattgatggaaacctggctacagaagcaaacctaatcattttagatacattagagattgttgttcagaccgtttctgtaacggaatccaaaga

SEQ ID NO: 5925 - DNA, 765 bp, Homo sapiens
  source 1..765: mol_type = unassigned DNA; mol_type = unassigned DNA
acaaaggtgtttttaatgttgaagttgttgctgtttcgtctatccatacacaagatccttatcttgacaaattttttgctctggtcaatgctctggatgaacacctgttcccagtccgaattggggacatgcgaatcatggaaaataacttagaaaatgaattgaagagcagtatttcagcactgaattcatcccagctggaaccagtggtccgatttcttcatcttctgctagataaactgatacttttagttattagacctcctgtcattgctggccaaatagttaacctaggtcaagcatcttttgaagccatggcatcaattataaatcgacttcacaaaaacttggaaggaaatcatgaccagcatggcagaaacagccttcttgcatcatatattcattatgttttccgcctaccaaatacttaccctaattcatcatcaccaggtcctgggggtttgggaggatcagtgcattatgccacaatggctagatctgcggtgagacctgcaagccttaatttaaatcgttctcgaagccttagtaatagcaatccagatatatctgggactcccacgtcaccagatgatgaagttcgatcaatcatcgggagtaagctttttcacgaggagctggctttgcagtgggttgtttgcagtggcagcgttcgggaatcagctttgcaacaagcctggttcttttttgaattaatggtaaagagcatggtgcaccatttatactttaatgataaacttgaggctc

SEQ ID NO: 5926 - DNA, 745 bp, Homo sapiens
  source 1..745: mol_type = unassigned DNA; mol_type = unassigned DNA
tcgtctatccatacacaagatccttatcttgacaaattttttgctctggtcaatgctctggatgaacacctgttcccagtccgaattggggacatgcgaatcatggaaaataacttagaaaatgaattgaagagcagtatttcagcactgaattcatcccagctggaaccagtggtccgatttcttcatcttctgctagataaactgatacttttagttattagacctcctgtcattgctggccaaatagttaacctaggtcaagcatcttttgaagccatggcatcaattataaatcgacttcacaaaaacttggaaggaaatcatgaccagcatggcagaaacagccttcttgcatcatatattcattatgttttccgcctaccaaatacttaccctaattcatcatcaccaggtcctgggggtttgggaggatcagtgcattatgccacaatggctagatctgcggtgagacctgcaagccttaatttaaatcgttctcgaagccttagtaatagcaatccagatatatctgggactcccacgtcaccagatgatgaagttcgatcaatcatcgggagtaagggtttagatcgctccaattcctgggttaacactggtggtccaaaagctgccccatggggatccaaccccagtccaagtgcagaatcaacacagctttttcacgaggagctggctttgcagtgggttgtttgcagtggcagcgttcgggaatcagctttgc

SEQ ID NO: 5927 - DNA, 275 bp, Homo sapiens
  source 1..275: mol_type = unassigned DNA; mol_type = unassigned DNA
cctgggggtttgggaggatcagtgcattatgccacaatggctagatctgcggtgagacctgcaagccttaatttaaatcgttctcgaagccttagtaatagcaatccagatatatctgggactcccacgtcaccagatgatgaagttcgatcaatcatcgggagtaaggctatggatcgaagttgtaatcgtatgtcttcgcacacagagacgtcaagtttcttacaaacattaacgggacgcttaccaactaaaaaggtagattcatatgaaga

SEQ ID NO: 5928 - DNA, 100 bp, Homo sapiens
  source 1..100: mol_type = unassigned DNA; mol_type = unassigned DNA
tgcatcatatattcattatgttttccgcctaccaaatacttaccctaattcatcatcaccagagtgctgttgggcattaaaggagaaatgtggtggctcg

SEQ ID NO: 5929 - DNA, 681 bp, Homo sapiens
  source 1..681: mol_type = unassigned DNA; mol_type = unassigned DNA
cactacttacagaaatcttctctacatataccctcagagtcttaattttgccaatcgtcaaggttctgctagaaatataacagtgaaagtccagtttatgtatggagaggatccaagcaatgccatgccggtctcctgattttcatgaagaaatcaaggttaagcttcctgctactttaactgaccatcatcacttgctttttactttttatcatgttagttgtcaacaaaaacaaaatactcctcttgaaacaccagttggatatacatggataccaatgcttcagaatggacggttgaagactggccagttttgcttgccagtctcattggaaaaaccaccacaggcttattctgtactgtctcctgaggttcctctacctggcatgaaatgggtagataatcacaaaggtgtttttaatgttgaagttgttgctgtttcgtctatccatacacaagatccttatcttgacaaattttttgctctggtcaatgctctggatgaacacctgttcccagtccgaattggggacatgcgaatcatggaaaataacttagaaaatgaattgaagagcagtatttcagcactgaattcatcccagctggaaccagtggtccgatttcttcatcttctgctagataaactgatacttttagttattagacctcctgtcattgctg

SEQ ID NO: 5930 - DNA, 2678 bp, Homo sapiens
  source 1..2678: mol_type = unassigned DNA; mol_type = unassigned DNA
ggcggaggccgcgagggagggagcacgagcgaggaggcacgcgcccgccggtccgcacccggcccgccgcagccgccgccgccgtcgccgtcgccgcagcagccatggccgagcgccgcgccttcgcccagaagatcagcagaacggtggcagccgaagttaggaagcagatctccggacaatatagtggttctccccaactgctcaaaaaccttaatattgttggcaatatatcccatcacaccacagtgccccttaccgaagcagtagatccagtggatttggaagattacctcattactcatcctttggctgtggattctgggcctttacgggatttgattgaatttcctccagatgatattgaagttgtttatagtcctcgggactgcagaactcttgtttcagctgtacctgaagaaagtgaaatggatccacatgttagagactgtataagaagttatacagaagactgggcaattgtcatcagaaaatatcataaattgggaacaggatttaatcccaatacattagataaacagaaagaaaggcaaaaaggtttgccaaaacaagtttttgaatctgatgaagctccagatggcaacagctaccaggatgatcaagatgaccttaaaagacgttcaatgtcaatagatgataccccaaggggtagctgggcctgtagtatctttgacttgaaaaattcacttcctgatgctttgcttcccaatttacttgatcgaactccaaatgaagaaatagaccgtcagaatgatgaccaaaggaaatcaaaccgtcacaaagaactttttgctttgcatccatcaccagatgaggaagaaccaatagaacggcttagtgttcctgatatacccaaagaacattttggtcaaagacttcttgtaaaatgcttatcactcaagtttgaaattgaaattgaacccatttttgcaagtttggctttatatgatgtcaaggaaaagaaaaagatttcagaaaacttttattttgaccttaattctgagcagatgaaagggttgttacgtccacatgtaccacctgctgccattactaccctggcaagatcagcaattttttctatcacttatccttcccaagatgtttttcttgtaataaagctagaaaaagtcctacagcaaggagacattggagagtgtgcagaaccatatatgattttcaaagaagcagatgccaccaagaataaagaaaaactggagaaactgaagagtcaagcagatcagttttgccaaagacttgggaaatatcgcatgccttttgcttggactgcaatccatttaatgaatattgttagcagtgctgggagtttggaaagagattctacagaagtagaaatcagtactggagaacgaaaagggtcttggtcagagaggaggaattctagtattgttggcagacgatcacttgaaaggacaacaagtggagatgatgcttgtaacttgacgagctttcgaccagctactctcacagtgacaaatttttttaagcaggaaggagaccgcttaagtgatgaagatctctacaaattccttgctgatatgagaaggccatcttctgtcttacggcgactaagacctattacagctcagctcaagatagacatttctcccgcacctgaaaatccccattattgcctaactccggagctgcttcaagtgaagctttaccctgacagtagagttagacctaccagagaaatcttagagtttcccgcaagggatgtttatgttccaaacactacttacagaaatcttctctacatataccctcagagtcttaattttgccaatcgtcaaggttctgctagaaatataacagtgaaagtccagtttatgtatggagaggatccaagcaatgccatgccgagccccagctgcacccatcctataccgacagttagacctctccctctttggtgctaccatagcatcttctcacttctttcatgggactttatcacttgatgattctatatttcttaatttcacccattagattgtgagctccttgagggcagggacgatgtcttactcatgtctatatcttgactcctgtcacatttttggataaataattaatgctcaatccatattgctaaatgattaaaagtacatgtcaaatggtcaaaaaaggaacactgtctgctttatgtcatattatgaaaataaacaagttattttgtgaaaagtgatagcttctcagagggaaaaaaggtattgcatttcttttacttgtgtgttattagtcatatgaaaatacaatgtttttatgtatgaaatggctgatttgaaagagtatataaacatagacatactgtgtttgccttttttaaaaaaagggctgtttaaatgggtcctaagataactttttgataatgtaatattgacatgataaaattgtaaacttcataattctggcacaggaacaatttatgaaaacatactaaggtatttgtaaattgatgaaataatatatatcttaggaaagtcataattattacacttgtacatacccttaaaataaaagagcctgcttgaaatgttgcaaaaagaaacagaaatacctgctaatatgcccttctaattaaggatgatgccaattaatctctttatataaataataaactttgagttgtttta

SEQ ID NO: 5931 - DNA, 1982 bp, Homo sapiens
  source 1..1982: mol_type = unassigned DNA; mol_type = unassigned DNA
ccacatgttagagactgtataagaagttatacagaagactgggcaattgtcatcagaaaatatcataaattgggaacaggatttaatcccaatacattagataaacagaaagaaaggcaaaaaggtttgccaaaacaagtttttgaatctgatgaagctccagatggcaacagctaccaggatgatcaagatgaccttaaaagacgttcaatgtcaatagatgataccccaaggggtagctgggcctgtagtatctttgacttgaaaaattcacttcctgatgctttgcttcccaatttacttgatcgaactccaaatgaagaaatagaccgtcagaatgatgaccaaaggaaatcaaaccgtcacaaagaactttttgctttgcatccatcaccagatgaggaagaaccaatagaacggcttagtgttcctgatatacccaaagaacattttggtcaaagacttcttgtaaaatgcttatcactcaagtttgaaattgaaattgaacccatttttgcaagtttggctttatatgatgtcaaggaaaagaaaaagatttcagaaaacttttattttgaccttaattctgagcagatgaaagggttgttacgtccacatgtaccacctgctgccattactaccctggcaagatcagcaattttttctatcacttatccttcccaagatgtttttcttgtaataaagttctcaggcttgggcttccattactatgcctaatagctagaaaaagtcctacagcaaggagacattggagagtgtgcagaaccatatatgattttcaaagaagcagatgccaccaagaataaagaaaaactggagaaactgaagagtcaagcagatcagttttgccaaagacttgggaaatatcgcatgccttttgcttggactgcaatccatttaatgaatattgttagcagtgctgggagtttggaaagagattctacagaagtagaaatcagtactggagaacgaaaagggtcttggtcagagaggaggaattctagtattgttggcagacgatcacttgaaaggacaacaagtggagatgatgcttgtaacttgacgagctttcgaccagctactctcacagtgacaaatttttttaagcaggaaggagaccgcttaagtgatgaagatctctacaaattccttgctgatatgagaaggccatcttctgtcttacggcgactaagacctattacagctcagctcaagatagacatttctcccgcacctgaaaatccccattattgcctaactccggagctgcttcaagtgaagctttaccctgacagtagagttagacctaccagagaaatcttagagtttcccgcaagggatgtttatgttccaaacactacttacagaaatcttctctacatataccctcagagtcttaattttgccaatcgtcaaggttctgctagaaatataacagtgaaagtccagtttatgtatggagaggatccaagcaatgccatgccgagccccagctgcacccatcctataccgacagttagacctctccctctttggtgctaccatagcatcttctcacttctttcatgggactttatcacttgatgattctatatttcttaatttcacccattagattgtgagctccttgagggcagggacgatgtcttactcatgtctatatcttgactcctgtcacatttttggataaataattaatgctcaatccatattgctaaatgattaaaagtacatgtcaaatggtcaaaaaaggaacactgtctgctttatgtcatattatgaaaataaacaagttattttgtgaaaagtgatagcttctcagagggaaaaaaggtattgcatttcttttacttgtgtgttattagtcatatgaaaatacaatgtttttatgtatgaaatggctgatttgaaagagtatataaacatagacatactgtgtttgccttttttaaaaaaagggc

SEQ ID NO: 5932 - DNA, 100 bp, Homo sapiens
  source 1..100: mol_type = unassigned DNA; mol_type = unassigned DNA
ccctgacagtagagttagacctaccagagaaatcttagagtttcccgcaagggatgtttatgttccaaacactacttacagcaacgtggaactgttttct

SEQ ID NO: 5933 - DNA, 519 bp, Homo sapiens
  source 1..519: mol_type = unassigned DNA; mol_type = unassigned DNA
agagtgtgcagaaccatatatgattttcaaagaagcagatgccaccaagaataaagaaaaactggagaaactgaagagtcaagcagatcagttttgccaaagacttgggaaatatcgcatgccttttgcttggactgcaatccatttaatgaatattgttagcagtgctgggagtttggaaagagattctacagaagtagaaatcagtactggagaacgaaaagggtcttggtcagagaggaggaattctagtattgttggcagacgatcacttgaaaggacaacaagtggagatgatgcttgtaacttgacgagctttcgaccagctactctcacagtgacaaatttttttaagcaggtattgttctgtcatgtaggaattttggggagatgtttgtgcataaatttttttaatttcagaaaggtagtgattgtactatacatgtatgggagggtgattccaagaaacttaaaaactttaagaataaaaataataaaagcaactataagaatgagaaa

SEQ ID NO: 5934 - DNA, 3335 bp, Homo sapiens
  source 1..3335: mol_type = unassigned DNA; mol_type = unassigned DNA
gcagatctccggacaatatagtggttctccccaactgctcaaaaaccttaatattgttggcaatatatcccatcacaccacagtgccccttaccgaagcagtagatccagtggatttggaagattacctcattactcatcctttggctgtggattctgggcctttacgggatttgattgaatttcctccagatgatattgaagttgtttatagtcctcgggactgcagaactcttgtttcagctgtacctgaagaaagtgaaatggatccacatgttagagactgtataagaagttatacagaagactgggcaattgtcatcagaaaatatcataaattgggaacaggatttaatcccaatacattagataaacagaaagaaaggcaaaaaggtttgccaaaacaagtttttgaatctgatgaagctccagatggcaacagctaccaggatgatcaagatgaccttaaaagacgttcaatgtcaatagatgataccccaaggggtagctgggcctgtagtatctttgacttgaaaaattcacttcctgatgctttgcttcccaatttacttgatcgaactccaaatgaagaaatagaccgtcagaatgatgaccaaaggaaatcaaaccgtcacaaagaactttttgctttgcatccatcaccagatgaggaagaaccaatagaacggcttagtgttcctgatatacccaaagaacattttggtcaaagacttcttgtaaaatgcttatcactcaagtttgaaattgaaattgaacccatttttgcaagtttggctttatatgatgtcaaggaaaagaaaaagatttcagaaaacttttattttgaccttaattctgagcagatgaaagggttgttacgtccacatgtaccacctgctgccattactaccctggcaagatcagcaattttttctatcacttatccttcccaagatgtttttcttgtaataaagctagaaaaagtcctacagcaaggagacattggagagtgtgcagaaccatatatgattttcaaagaagcagatgccaccaagaataaagaaaaactggagaaactgaagagtcaagcagatcagttttgccaaagacttgggaaatatcgcatgccttttgcttggactgcaatccatttaatgaatattgttagcagtgctgggagtttggaaagagattctacagaagtagaaatcagtactggagggttctgcaaccactgctacagaatacttctgtatccatcttggaacacttttgtacccattagcagtggtcactcctcattcccccagagtcttgcaacctgtccctaaacaacctttaatatatattctgtctctatagatttgtctatgccagacatttcatacatattgacttgtataatatgtagtcttttgtggctagcttctttcacttgccataatgtttttcaggttcatccatgtcgtagcatgtattggtattatttatttttattgccaaatgatagtctgttgtattgatatactatatttatttatcagttgatttgggttttctacttttagtttattatgcataatgtttcatagtgttgaaacgtcatttacaagctttcgtgtggacattttttttccttagatatgtagatatatagctaggagtgaaattgctgggtcatatgataattctgtgcttaatcttttgaaggactgccacactgttttccaatttggctgcaccttcaaaaattccactagcattccactagtgtgtgaaggttccagtttcagcatatctttaccagtgtaacatattatctgctctttgattgtagtcattctagtgcaagtgaagtggtactcattgtaggttggatttaccttttcttaaaagctagcgatattaagcatcattttgtgtgtattggctatttgtgtatctttcttggagtaataggtatttttaacctttgctcattttttaatggctttggtctttttattatttattaatagttgatgcctattttttaaatggggttttaaccttcttggcattgagttgtaggagttctttatatgttcaagatgcaaattccttgcctaatatatgatagcaaattttctcctagtctgtgagttcacttttcttgatggtattgttcgtagcacagaagttttaaattttgaggaagttacatttttctatttttttcttttgtcactgtgcttttggtgttttatctaagaaaccattatgtaatatgaatcaaaatttacttgtatgtattcttgtaagagttttatagtttcagctgttacatttaggtttataataatccattttgagttaatatttgtatgttgtgaggtagtccaatttcattctttttatgtggatatccagttgtttcagcaccatttattaaaaaggctattcttttcccattgaattttcttagatcccttattgaaagtcaattgaccattcatgtgggatttatttctggactctccatcccattccactgatctgtatgccagtgctttactgcaggggttcctaatccccaggtggcggacaggtacctgtcctgcctgttaggatccgggccgtagagcagtaggtgagcagcagctgagctagcattatcgcctgagctctgcctcctctcagatcagtagtggcattagattctggtaggagcatgaaccctattgtgagctgcacatgcaggggatctaggttacgtgcaccttatgggactctaatgataaatgtaatgcgctttaatcatcctgaaacgatccccacaaccccatctgtggaaaaatttttttccatgaaaccagtccttggtgccagaaaggttggggaccgctgctataccaaattactttacctttgaaggctaagttttgaaattgagaagagtgggtcttccagcttttatcctgtttcaagatttgttttggcaattttgggtttcttttatttccatataaatttaggaccagctgtcagtttgtgcacaaaggcatctgggattttgatagggctgacattgaatctctaagtcaatttatagattgttgccattttaacaattttaaatctttgaatctatgaacatgaaatttttttcatttatttaaatctttttcatttttttcagtgttgtgtcattttcagtgtacaagtccttctcttgttaaatttataccgtagtattttatcgtttcttgataatattttaaatggaattgttttcttaattctgtctttagaaagtccatttctagtgtatagaaataaaattggcttttgtatatt

SEQ ID NO: 5935 - DNA, 1315 bp, Homo sapiens
  source 1..1315: mol_type = unassigned DNA; mol_type = unassigned DNA
atttctttaatggaattctgctctagcaacttttatttgctaactcgaaactgctgggatattattcataaatttttttaaaagtcactttggaatccatcatctcaatgataatttctttgtatactttattagaggttacttttttttttttttgagattgagtcttgctcttttgccaggctggagtgtagtggcgcgatctcggctcactgcagcctctacctcccaggttcaagcgattcccctggctcagcctcccgagtagctgggactataggcgcctgccaccatgcccggctaattttttgtattttagtagagatggggtttccccattttggccaggatgatctcaatctcctgaccttgatcccctcacctctaattaaaagaatttggaatatggttgtttagaatatgcttattatgttttccaaatagcttgtttactttttttactttgatttaggtatgtaaagattggtctcagtgaaatataaactttacatgagagtataatatcctactatctgtagataaataagtaatttttttgagaattatttaacatgaatgtttttaaaaagaaaatagaaatttaatttattaagattaaatgttttcttattataattactgtaattgaaaacagattattgtttcattgaaagagttctaaaagtaagtagcagaagcagctttcttttaagaaatagacactgtaaaatgtacatattttaaagtttaacatactaatattttttagatttcagaaaacttttattttgaccttaattctgagcagatgaaagggttgttacgtccacatgtaccacctgctgccattactaccctggcaagatcagcaattttttctatcacttatccttcccaagatgtttttcttgtaataaaggtgagaataatgttaaatatatttgtttattttgtagtgtctgtatacttgtctgtcagtattataaacttttcaagggcaaagatttgacctttacatatttttttcatcttgatattctttaacacaatattggacatacacagtaggtgctacctaatttttcttgaactctttattagaattctccagtgaaacagaactaataggaattatatatatatcttagatctgttttgattattgtagtttataaatacattttcatatcaggaagtatgagactttcaactttcttcttttttccctaaatttgttttgattattcagggtctcttgaatttccctatgaattctaggatgggtttttctatttctgcaaaaaaaaaaaaaaaa

SEQ ID NO: 5936 - DNA, 100 bp, Homo sapiens
  source 1..100: mol_type = unassigned DNA; mol_type = unassigned DNA
aaagacttcttgtaaaatgcttatcactcaaaaagaaaaatatttctttgacatgacacagaaagcactacccctagaagaaaacattgacacattttac

SEQ ID NO: 5937 - DNA, 122 bp, Homo sapiens
  source 1..122: mol_type = unassigned DNA; mol_type = unassigned DNA
gccgtcgccgcagcagccatggccgagcgccgcgccttcgcccagaagatcagcaggttcaaagtggacttgtgcgtccaggattgaaaacgtgtggacagaatgaaaagttgagagctgcg

SEQ ID NO: 5938 - DNA, 741 bp, Homo sapiens
  source 1..741: mol_type = unassigned DNA; mol_type = unassigned DNA
cagcgccgaccgacagacgaggtttgcgcttggctgggcatgttccgcggctactctgcggcgcgccaggcccccgctttccgcaccccgcgaccctagaagccaccgaaccgccggcgggccatggccactctgccgagcgcagagcgccgcgcgttcgcgctcaagatcaacaggtattcttcagcggaaataaggaaacagtttactctcccaccaaaccttggccagtaccatcgacagagcataagtacctctggcttcccctctcttcaactaagacggagtttctccatgttgtccaggctggtcttgaactcctgagcttcagtgatctgcctgccttggcctcccaaagtgctgggattacagagggacccttgtaaggactatagtcctctcttcagctgaccttcaggtccccagtcagaaccaagggaaccgactctgtcccttctcatagcacctgaaaaccccgggaaacgaggggaatgctttgctctcagctactgaggttgtcctgtcaccttctcttctgccctcctttgccatggcataggataatcctcagttttatgaccctgtggagccagtggactttgaaggacttctgatgacacacctgaacagcctggatgtgcagcttgcccaggagctcggggacttcactgatgacgacttggacgtggtgttcacgccaaaggaatgtaggactttgcagccctctttgccggaggaagg

SEQ ID NO: 5939 - DNA, 2206 bp, Homo sapiens
  source 1..2206: mol_type = unassigned DNA; mol_type = unassigned DNA
gacagacgaggtttgcgcttggctgggcatgttccgcggctactctgcggcgcgccaggcccccgctttccgcaccccgcgaccctagaagccaccgaaccgccggcgggccatggccactctgccgagcgcagagcgccgcgcgttcgcgctcaagatcaacagtcatgctctgtcgcccaggctggagtacagtggggccatctcggctcactgcaacctctgcctcccggattcaagcgattctcctgcctcagcctcctgagtagctgagattacaggtattcttcagcggaaataaggaaacagtttactctcccaccaaaccttggccagtaccatcgacagagcataagtacctctggcttcccctctcttcaactacctcagttttatgaccctgtggagccagtggactttgaaggacttctgatgacacacctgaacagcctggatgtgcagcttgcccaggagctcggggacttcactgatgacgacttggacgtggtgttcacgccaaaggaatgtaggactttgcagccctctttgccggaggaaggggttgaactggaccctcatgtcagggactgtgttcagacctacatccgtgagtggctaatcgtgaaccggaaaaaccaaggaagtccagaaatctgtggctttaaaaagactggatctcgaaaagattttcacaagacgcttccgaaacagacgtttgagtcggaaaccttggagtgcagtgaacccgctgctcaggcaggcccccgccacttaaacgtgctgtgcgacgtgtctgggaaaggccccgtcactgcctgtgactttgacctccgcagcctgcagcctgacaagcggctagaaaacctcctgcagcaagtgagtgccgaggactttgagaagcagaacgaggaggcccggaggaccaataggcaggccgagctctttgccctttacccatcagtggacgaggaggatgctgtggaaatacgtccagtaccagaatgtcccaaggaacacctgggcaacagaatattggtcaagttgctgaccttgaagttcgagattgaaattgagcccctgtttgccagcattgccctctacgatgttaaagaaaggaaaaagatctcagaaaattttcactgtgacctgaactctgaccagttcaaaggatttctgcgagctcacacgccttcagtggccgcatcaagtcaggcgagatctgcagtcttctcagtcacctacccgtcctcagacatctacctggtagtcaagattgaaaaagtcctgcagcagggagagattggagactgtgcagagccctacacggttatcaaagaaagtgatggtggaaagagtaaagaaaagattgaaaaactaaaactccaagctgaatccttctgccagcgtttggggaaataccggatgccctttgcctgggcacccataagcttatcaagcttcttcaatgtctccacccttgagagggaggtaactgatgtggactctgtggttgggagaagctcagtgggtgaacggaggacattggcccaatctagaaggctttctgaaagagccctctccttggaggaaaatggggttggatccaacttcaaaacctccactctgagcgttagcagctttttcaagcaggaaggagatcgccttagcgatgaagacttattcaagtttttagctgactacaaaagatcatcatccttacagagacgagtcaagtcaattccaggcttgctaagactggagatttctacagctccagagatcatcaattgctgtctgactcctgaaatgctgcccgtgaaaccctttcctgaaaaccggacacgcccgcacaaagagattttggaatttccaacacgagaagtatatgtccctcacactgtgtacaggtaagaaacacaggctcgggctgggcgtggtggcttacaccataatcccataactttgggaggccgaggcaggaggattgcttgagctcaggagtttgagaccagccttggcaacatggcaaaaccgtgtctctacaacatatacaaaatttagctgggcatggtggtgcatgcttgtaatcccagcaacttggcaggctgaggcaggagaatcgcttgaacccaggaggcagaggttgcagtgagccaagattgcactactgcactccagcctgggagacagaaccagactctgtctc

SEQ ID NO: 5940 - DNA, 7452 bp, Homo sapiens
  source 1..7452: mol_type = unassigned DNA; mol_type = unassigned DNA
gacagacgaggtttgcgcttggctgggcatgttccgcggctactctgcggcgcgccaggcccccgctttccgcaccccgcgaccctagaagccaccgaaccgccggcgggccatggccactctgccgagcgcagagcgccgcgcgttcgcgctcaagatcaacaggtattcttcagcggaaataaggaaacagtttactctcccaccaaaccttggccagtaccatcgacagagcataagtacctctggcttcccctctcttcaactacctcagttttatgaccctgtggagccagtggactttgaaggacttctgatgacacacctgaacagcctggatgtgcagcttgcccaggagctcggggacttcactgatgacgacttggacgtggtgttcacgccaaaggaatgtaggactttgcagccctctttgccggaggaaggggttgaactggaccctcatgtcagggactgtgttcagacctacatccgtgagtggctaatcgtgaaccggaaaaaccaaggaagtccagaaatctgtggctttaaaaagactggatctcgaaaagattttcacaagacgcttccgaaacagacgtttgagtcggaaaccttggagtgcagtgaacccgctgctcaggcaggcccccgccacttaaacgtgctgtgcgacgtgtctgggaaaggccccgtcactgcctgtgactttgacctccgcagcctgcagcctgacaagcggctagaaaacctcctgcagcaagtgagtgccgaggactttgagaagcagaacgaggaggcccggaggaccaataggcaggccgagctctttgccctttacccatcagtggacgaggaggatgctgtggaaatacgtccagtaccagaatgtcccaaggaacacctgggcaacagaatattggtcaagttgctgaccttgaagttcgagattgaaattgagcccctgtttgccagcattgccctctacgatgttaaagaaaggaaaaagatctcagaaaattttcactgtgacctgaactctgaccagttcaaaggatttctgcgagctcacacgccttcagtggccgcatcaagtcaggcgagatctgcagtcttctcagtcacctacccgtcctcagacatctacctggtagtcaagattgaaaaagtcctgcagcagggagagattggagactgtgcagagccctacacggttatcaaagaaagtgatggtggaaagagtaaagaaaagattgaaaaactaaaactccaagctgaatccttctgccagcgtttggggaaataccggatgccctttgcctgggcacccataagcttatcaagcttcttcaatgtctccacccttgagagggaggtaactgatgtggactctgtggttgggagaagctcagtgggtgaacggaggacattggcccaatctagaaggctttctgaaagagccctctccttggaggaaaatggggttggatccaacttcaaaacctccactctgagcgttagcagctttttcaagcaggaaggagatcgccttagcgatgaagacttattcaagtttttagctgactacaaaagatcatcatccttacagagacgagtcaagtcaattccaggcttgctaagactggagatttctacagctccagagatcatcaattgctgtctgactcctgaaatgctgcccgtgaaaccctttcctgaaaaccggacacgcccgcacaaagagattttggaatttccaacacgagaagtatatgtccctcacactgtgtacagaaaccttctctatgtctacccacagaggctgaactttgtaaacaaactagcatcagcccggaacattacaataaagatccagtttatgtgtggagaagatgctagcaatgcgatgccggtcatctttggaaaatccagcgggcctgaatttctgcaggaagtgtacacagctgttacataccataataagtctcctgacttttatgaagaagtgaaaattaagctccccgctaagctcacagtaaatcaccacctcctgttcaccttctaccatatcagctgtcagcagaagcaaggagcctccgtggaaactctcctgggatattcatggctgccaattctcttaaatgaacgtcttcaaactggatcctactgtctcccagttgccttggaaaaattgccacccaactactccatgcattctgctgagaaagtcccattacagaatcctcccattaagtgggctgaaggacataagggagtatttaatattgaagtgcaagctgtttcttctgtacacacccaggacaaccacctggagaagttcttcaccctctgccactccctggagagccaggtgaccttccccatccgcgtgctggatcagaaaatcagcgagatggcgctggagcatgagctgaagctcagcatcatctgcctgaactcctcccgcctggagccgctcgtgctcttcctgcacctggtgctggacaagctcttccagctgtccgtgcagcccatggtcatcgctggccagacagccaacttctcccagtttgccttcgagtccgtggtggccatcgccaacagtctgcacaacagcaaggacctgagcaaggaccagcatgggaggaactgcctgctggcttcctacgtgcactacgtcttccgcctgccagaggtgcaaagggatgtgcccaagtcaggcgctcccactgccctcctagaccctcggagctaccacacgtatggccgcacatcagctgctgctgtgagttcaaagctgctgcaggcccgggtgatgagcagcagtaacccagacctcgcggggacacactccgcagcagacgaggaagtgaagaacatcatgtcttcaaagatcgccgatcgcaactgcagccgaatgtcttactattgctctggcagtagtgatgctccaagttcacctgcagccccaaggccagccagcaaaaagcatttccatgaggagcttgcccttcagatggtggtcagcaccggaatggtgagagaaacagtcttcaagtatgcctggttcttctttgagcttctggtgaaaagcatggcccagcacgtacataacatggacaaacgggacagttttcggaggactcgtttttctgaccgtttcatggatgacataactactattgttaatgtggtcacctcggaaattgcagcccttttagtaaaaccacagaaggaaaatgaacaggcggaaaagatgaacatcagcctggctttcttcttgtatgaccttctctccctcatggatcggggctttgtgtttaacctcatcagacattattgcagccagctgtcagccaagctcagtaaccttccaacgctcatttccatgaggctagagttcctgagaatcctctgtagccatgagcattacctcaatctgaaccttttttttatgaatgctgatactgctccaacatctccttgtccttccatatcttcccagaactcaagctcctgctccagcttccaggaccagaagatcgccagcatgttcgatctgacttccgagtaccgccagcagcacttcctcaccgggctcctcttcacagaactggctgctgccctggatgccgaaggggaaggaatcagcaaagtacaaaggaaagctgtcagtgcaattcacagcctgctaagttctcacgacctggacccacgctgtgtcaaaccagaggtgaaggtcaaaatcgccgccctttacctacctttagttggcatcattttggatgctttgccacagctctgtgactttacagttgcagatactcgcagataccgcaccagtggctcggatgaagaacaagaaggagccggtgccattaaccagaatgtggctctggccatagcagggaataatttcaatttgaaaacaagtggaatagtgctgtcttccttgccctataagcagtacaacatgctgaacgcggacactactcgcaacctcatgatctgcttcctctggatcatgaaaaatgctgatcagagcctcattaggaagtggattgctgacctgccatcaacgcagctcaacaggattttagatctacttttcatctgtgtgttatgttttgagtataagggaaaacagagttctgacaaagtcagtacccaagtcctgcagaagtcaagggatgtcaaggcccggctggaagaggctttgctccgtggggaaggggccagaggggagatgatgcgccgccgggctccagggaacgaccgatttccaggcctaaatgaaaatttgagatggaagaaagagcagacacattggcggcaagctaatgagaagctagataaaacaaaggccgagttagatcaagaagccttgatcagtggcaatctggctacagaagcacatttaatcatcctggatatgcaggaaaacattatccaggcgagctcggctctggactgtaaagacagcctgctgggaggtgttctgagggtgctggtgaattctctgaactgtgatcagagtaccacctacctgactcactgctttgcaacactccgtgctctcatcgccaagtttggagacttactctttgaagaggaggtggaacagtgtttcgacctatgtcaccaagtcctgcaccactgcagcagcagcatggatgtcacccggagccaagcctgtgccaccctttacctcctcatgaggttcagttttggagccaccagtaattttgcaagagtaaagatgcaagtaaccatgtccctggcatctttggtgggaagagcaccagactttaatgaagagcacctgagaagatccttgaggacaattttggcctattcagaagaggacacagccatgcagatgactccttttcccacccaggtggaggaacttctctgtaatctgaatagcatcttatatgacacagtgaaaatgagggaatttcaggaagatcctgagatgcttatggatctcatgtacagaattgccaagagttaccaggcatctcctgatctgcggctgacctggctccagaacatggcagagaaacacaccaagaagaagtgctacacggaggctgccatgtgcctggtgcacgccgctgcgttagtggctgagtatctgagcatgctggaggaccacagctacctgcccgtgggcagtgtcagcttccagaatatttcttccaatgtgctggaggagtctgtggtctctgaggacaccctgtcacctgacgaggatggggtgtgcgcaggccagtacttcaccgagagtggcctggtaggcctcctggagcaggccgcggagctcttcagcacgggaggcttatatgagacagttaatgaggtctacaagctggtcatccccatcctagaagcgcatcgagaattccggaagctgacactcactcacagcaagctgcagagagccttcgacagcatcgttaacaaggatcataagagaatgtttggaacctacttccgagttggtttctttggatccaaatttggggatttggatgaacaggagtttgtctacaaagagcctgcaattaccaagcttcctgagatctcacatagactagaggcattttatggtcaatgttttggtgcagaatttgtggaagtgattaaagactccactcctgtggacaaaaccaagttggatcctaacaaggcctacatacagatcacttttgtggagccctactttgatgagtatgagatgaaagacagggtcacatactttgagaagaatttcaacctccggaggttcatgtacaccaccccgttcaccctggaggggcggcctcggggagagctgcatgagcagtacagaaggaacacagtcctgaccactatgcacgccttcccctacatcaagaccaggatcagcgtcatccagaaggaggagtttgttttgacaccgattgaagttgccattgaagacatgaagaagaagaccctgcagttagcagttgccattaaccaggagccgcctgatgcaaagatgcttcagatggtgctgcaaggctctgtgggagctactgtaaatcagggaccactggaagtagcccaagtgtttttggctgaaattcctgctgatccaaaactctatcgacatcacaacaagttgaggttatgctttaaggaattcatcatgagatgtggtgaagctgtagagaaaaacaagcgtctcatcacggcagaccagagggaatatcagcaggaactcaaaaagaactataacaagctaaaagagaacctcaggccaatgatcgagcggaaaattccagaactgtacaagccaatattcagagttgagagtcaaaagagggactccttccacagatctagtttcaggaaatgtgaaacccagttgtcacagggcagctaagaaaagccatcttcattcgtggagactgtggccctgcaaccctggagaaggacttgctggtacttaaaaaatgggacatttgccacccaggactgactgtacactccctgatcagccagcactctggaagctttgggatcccaggaaccatggaattattcccaaatggactctgaccagatttttgccatactggggggtggcgggatggaggatgggtactcaggcatgactgcgtatttattaaagtgtgtttttccacaatgtaccaaacaaggcataagcagcttctcctgctgactggccaatcactgcccatctgagagatgatttcctctggcccatatttgaatttattggagtaactcaaattgcctgaggaaaaatggaaaaattatccaccagtcgattcaaactgaatttcactctttataggaaggcagggcaaacttgtaggagtacgaaacattttcaataaatctacaaagggaagccttactacaattccaaaaatcatcatggttggaaatttgggaggagattatttgtgaacttgttacccttttggtaatggtggactaattgctgtatagttatttttgttttattattactgttacattaatttaacatgcatttatagaagaatacattcaaagcactgatgtaggagatacacggtacttggagcagtcagccagaaatcacagatactgctttcacttaaatggaaacaattctccgataatgctttgctttttttcttatgtcactcttgtgtactatctatttttctcctctctgggaccaagtttctttttataaagcaataatatctctgttttcatttcagaacattgtgctgtctgtcagcatatgtatatcagctacaaaatatattcaactttgacttcttttgacaaaggactttaggaaaaagaggaacaaagacattatttgagaattaaattatatatttttaatatgactgtgaccttgactgataataaagatgtaataagaattgcaagctaaatgtt

SEQ ID NO: 5941 - DNA, 2087 bp, Homo sapiens
  source 1..2087: mol_type = unassigned DNA; mol_type = unassigned DNA
agacgaggtttgcgcttggctgggcatgttccgcggctactctgcggcgcgccaggcccccgctttccgcaccccgcgaccctagaagccaccgaaccgccggcgggccatggccactctgccgagcgcagagcgccgcgcgttcgcgctcaagatcaacaggtattcttcagcggaaataaggaaacagtttactctcccaccaaaccttggccagtaccatcgacagagcataagtacctctggcttcccctctcttcaactacctcagttttatgaccctgtggagccagtggactttgaaggacttctgatgacacacctgaacagcctggatgtgcagcttgcccaggagctcggggacttcactgatgacgacttggacgtggtgttcacgccaaaggaatgtaggactttgcagccctctttgccggaggaaggggttgaactggaccctcatgtcagggactgtgttcagacctacatccgtgagtggctaatcgtgaaccggaaaaaccaaggaagtccagaaatctgtggctttaaaaagactggatctcgaaaagattttcacaagacgcttccgaaacagacgtttgagtcggaaaccttggagtgcagtgaacccgctgctcaggcaggcccccgccacttaaacgtgctgtgcgacgtgtctgggaaaggccccgtcactgcctgtgactttgacctccgcagcctgcagcctgacaagcggctagaaaacctcctgcagcaagtgagtgccgaggactttgagaagcagaacgaggaggcccggaggaccaataggcaggccgagctctttgccctttacccatcagtggacgaggaggatgctgtggaaatacgtccagtaccagaatgtcccaaggaacacctgggcaacagaatattggtcaagttgctgaccttgaagttcgagattgaaattgagcccctgtttgccagcattgccctctacgatgttaaagaaaggaaaaagatctcagaaaattttcactgtgacctgaactctgaccagttcaaaggatttctgcgagctcacacgccttcagtggccgcatcaagtcaggcgagatctgcagtcttctcagtcacctacccgtcctcagacatctacctggtagtcaagattgaaaaagtcctgcagcagggagagattggagactgtgcagagccctacacggttatcaaagaaagtgatggtggaaagagtaaagaaaagattgaaaaactaaaactccaagctgaatccttctgccagcgtttggggaaataccggatgccctttgcctgggcacccataagcttatcaagcttcttcaatgtctccacccttgagagggaggtaactgatgtggactctgtggttgggagaagctcagtgggtgaacggaggacattggcccaatctagaaggctttctgaaagagccctctccttggaggaaaatggggttggatccaacttcaaaacctccactctgagcgttagcagctttttcaagcaggaaggagatcgccttagcgatgaagacttattcaagtttttagctgactacaaaagatcatcatccttacagagacgagtcaagtcaattccaggcttgctaagactggagatttctacagctccagagatcatcaattgctgtctgactcctgaaatgctgcccgtgaaaccctttcctgaaaaccggacacgcccgcacaaagagattttggaatttccaacacgagaagtatatgtccctcacactgtgtacaggtaagaaacacaggctcgggctgggcgtggtggcttacaccataatcccataactttgggaggccgaggcaggaggattgcttgagctcaggagtttgagaccagccttggcaacatggcaaaaccgtgtctctacaacatatacaaaatttagctgggcatggtggtgcatgcttgtaatcccagcaacttggcaggctgaggcaggagaatcgcttgaacccaggaggcagaggttgcagtgagccaagattgcactactgcactccagcctgggagacagaaccagactctgtctc

SEQ ID NO: 5942 - DNA, 595 bp, Homo sapiens
  source 1..595: mol_type = unassigned DNA; mol_type = unassigned DNA
cccgaggctgcggcggtggagccgctggacgcgcggcggctcctgcgctgggcccggcgaggtcctccccaagaatctcggtgctcctggatgtcctcagccgccggggatcccttccccgaacaacctcgcccgctccgccctccaggttcttacaggtggccgggtcccagaagggtgataggcgcctgggtaaccgtgttgggcgcgccacggagtgtctcataaacggctccttcctttgaggtattcttcagcggaaataaggaaacagtttactctcccaccaaaccttggccagtaccatcgacagagcataagtacctctggcttcccctctcttcaactacctcagttttatgaccctgtggagccagtggactttgaaggacttctgatgacacacctgaacagcctggatgtgcagcttgcccaggagctcggggacttcactgatgacgacttggacgtggtgttcacgccaaaggaatgtaggactttgcagccctctttgccggaggaaggggttgaactggaccctcatgtcagggactgtgttcagacctacatccgtgagtggctaatcgtgaaccgg

SEQ ID NO: 5943 - DNA, 537 bp, Homo sapiens
  source 1..537: mol_type = unassigned DNA; mol_type = unassigned DNA
ttttgtctcctgtaacaatttacgcgccgtgtaactgtgaatctttcaaagctcttgcaggagaactctcttgtagctcaccctgtctgaaaacatactggaaaggaattcaaggaaatgtagttcagcctagccacgttgacacatcatgaagccgtcacaaaagcctcagttttatgaccctgtggagccagtggactttgaaggacttctgatgacacacctgaacagcctggatgtgcagcttgcccaggagctcggggacttcactgatgacgacttggacgtggtgttcacgccaaaggaatgtaggactttgcagccctctttgccggaggaaggggttgaactggaccctcatgtcagggactgtgttcagacctacatccgtgagtggctaatcgtgaaccggaaaaaccaaggaagtccagaaatctgtggctttaaaaagactggatctcgaaaagattttcacaagacgcttccgaaacagacgtttgagtcggaaaccttggagtgcagtgaacccgctgctca

SEQ ID NO: 5944 - DNA, 1873 bp, Homo sapiens
  source 1..1873: mol_type = unassigned DNA; mol_type = unassigned DNA
ttttgtctcctgtaacaatttacgcgccgtgtaactgtgaatctttcaaagcctcagttttatgaccctgtggagccagtggactttgaaggacttctgatgacacacctgaacagcctggatgtgcagcttgcccaggagctcggggacttcactgatgacgacttggacgtggtgttcacgccaaaggaatgtaggactttgcagccctctttgccggaggaaggggttgaactggaccctcatgtcagggactgtgttcagacctacatccgtgagtggctaatcgtgaaccggaaaaaccaaggaagtccagaaatctgtggctttaaaaagactggatctcgaaaagattttcacaagacgcttccgaaacagacgtttgagtcggaaaccttggagtgcagtgaacccgctgctcaggcaggcccccgccacttaaacgtgctgtgcgacgtgtctgggaaaggccccgtcactgcctgtgactttgacctccgcagcctgcagcctgacaagcggctagaaaacctcctgcagcaagtgagtgccgaggactttgagaagcagaacgaggaggcccggaggaccaataggcaggccgagctctttgccctttacccatcagtggacgaggaggatgctgtggaaatacgtccagtaccagaatgtcccaaggaacacctgggcaacagaatattggtcaagttgctgaccttgaagttcgagattgaaattgagcccctgtttgccagcattgccctctacgatgttaaagaaaggaaaaagatctcagaaaattttcactgtgacctgaactctgaccagttcaaaggatttctgcgagctcacacgccttcagtggccgcatcaagtcaggcgagatctgcagtcttctcagtcacctacccgtcctcagacatctacctggtagtcaagattgaaaaagtcctgcagcagggagagattggagactgtgcagagccctacacggttatcaaagaaagtgatggtggaaagagtaaagaaaagattgaaaaactaaaactccaagctgaatccttctgccagcgtttggggaaataccggatgccctttgcctgggcacccataagcttatcaagcttcttcaatgtctccacccttgagagggaggtaactgatgtggactctgtggttgggagaagctcagtgggtgaacggaggacattggcccaatctagaaggctttctgaaagagccctctccttggaggaaaatggggttggatccaacttcaaaacctccactctgagcgttagcagctttttcaagcaggaaggagatcgccttagcgatgaagacttattcaagtttttagctgactacaaaagatcatcatccttacagagacgagtcaagtcaattccaggcttgctaagactggagatttctacagctccagagatcatcaattgctgtctgactcctgaaatgctgcccgtgaaaccctttcctgaaaaccggacacgcccgcacaaagagattttggaatttccaacacgagaagtatatgtccctcacactgtgtacaggtaagaaacacaggctcgggctgggcgtggtggcttacaccataatcccataactttgggaggccgaggcaggaggattgcttgagctcaggagtttgagaccagccttggcaacatggcaaaaccgtgtctctacaacatatacaaaatttagctgggcatggtggtgcatgcttgtaatcccagcaacttggcaggctgaggcaggagaatcgcttgaacccaggaggcagaggttgcagtgagccaagattgcactactgcactccagcctgggagacagaaccagactctgtctc

SEQ ID NO: 5945 - DNA, 4788 bp, Homo sapiens
  source 1..4788: mol_type = unassigned DNA; mol_type = unassigned DNA
ctgtaacaatttacgcgccgtgtaactgtgaatctttcaaagcctcagttttatgaccctgtggagccagtggactttgaaggacttctgatgacacacctgaacagcctggatgtgcagcttgcccaggagctcggggacttcactgatgacgacttggacgtggtgttcacgccaaaggaatgtaggactttgcagccctctttgccggaggaaggggttgaactggaccctcatgtcagggactgtgttcagacctacatccgtgagtggctaatcgtgaaccggaaaaaccaaggaagtccagaaatctgtggctttaaaaagactggatctcgaaaagattttcacaagacgcttccgaaacagacgtttgagtcggaaaccttggagtgcagtgaacccgctgctcaggcaggcccccgccacttaaacgtgctgtgcgacgtgtctgggaaaggccccgtcactgcctgtgactttgacctccgcagcctgcagcctgacaagcggctagaaaacctcctgcagcaagtgagtgccgaggactttgagaagcagaacgaggaggcccggaggaccaataggcaggccgagctctttgccctttacccatcagtggacgaggaggatgctgtggaaatacgtccagtaccagaatgtcccaaggaacacctgggcaacagaatattggtcaagttgctgaccttgaagttcgagattgaaattgagcccctgtttgccagcattgccctctacgatgttaaagaaaggaaaaagatctcagaaaattttcactgtgacctgaactctgaccagttcaaaggatttctgcgagctcacacgccttcagtggccgcatcaagtcaggcgagatctgcagtcttctcagtcacctacccgtcctcagacatctacctggtagtcaagattgaaaaagtcctgcagcagggagagattggagactgtgcagagccctacacggttatcaaagaaagtgatggtggaaagagtaaagaaaagattgaaaaactaaaactccaagctgaatccttctgccagcgtttggggaaataccggatgccctttgcctgggcacccataagcttatcaagcttcttcaatgtctccacccttgagagggaggtaactgatgtggactctgtggttgggagaagctcagtgggtgaacggaggacattggcccaatctagaaggctttctgaaagagccctctccttggaggaaaatggggttggatccaacttcaaaacctccactctgagcgttagcagctttttcaagcaggaaggagatcgccttagcgatgaagacttattcaagtttttagctgactacaaaagatcatcatccttacagagacgagtcaagtcaattccaggcttgctaagactggagatttctacagctccagagatcatcaattgctgtctgactcctgaaatgctgcccgtgaaaccctttcctgaaaaccggacacgcccgcacaaagagattttggaatttccaacacgagaagtatatgtccctcacactgtgtacagagaagtcttccaggtttcagctgttgctcattaatgctcaccacagccctttgaggtcgatgcaattatgctttggaaaagctaagtaacttgccaaaggccatgcagctaaaagaagcaaaagctggattcaaatctcagctctctgcctccagagagaacaccctcaatcccgcttaacagacattagctctgcttatttgattggtggcagtggagatgaacagaagtgaacagtgagcagagaggggtctgtaccccacacacatccctgcaccccaactgtcaactgtcttccatcatcatttactatatccacgtccactcctgacagcatcagtggctcagtcttaccgacctgcatcagggttttgggctctgcctctgtttagacagagcacgatttgggaagtgctgctaagtcagccagtggctgagtagaaacagccctgcagtgggcctctgcctgctctgtggctcgtttatcatgtgtctcatctttaaaagttggggctcagtctaggtgcctcctggcctgagcaccccagaattctatgctgatcccttcattgtgacatggcctgtcatctactcttctgggaagaccatctgcacctcactgatacttgaagctcattgagtattgtcacatatcagcccagaaagtcacagggtacagcaactcatacttgctcccagcaccaggccagccccattctgcctccagggagtcacccaaaatagagagatgagggtaaaataagacctaggaatactatttatttgcctccatggcctttgaacttgcacatccaacgtaacggctcctgtgtgttcttgattgttccaattatcatttttcctctcgaatacctgagagcattcattattttgcaagagatttgagaatccctgtgccctaacttttctttccttgatgtgggatgttcttctgtgactagaaaccttctctatgtctacccacagaggctgaactttgtaaacaaactagcatcagcccggaacattacaataaagatccagtttatgtgtggagaagatgctagcaatgcgatgccggtgtcttaagacagcggtggggtcctcttagtcctctctgctcaggcccctggcatgccactgccaggagtgccagatatgcttgtgcagatcctgtggcaaccaagatgcccagccaagagtgactgtgggctaaagtccagtctgttcttcattcactgagccatgggttctggtgttgggattactgcatctagaggaaagagctttttttctctgcacaaaggtcatctttggaaaatccagcgggcctgaatttctgcaggaagtgtacacagctgttacataccataataagtctcctgacttttatgaagaagtgaaaattaagctccccgctaagctcacagtaaatcaccacctcctgttcaccttctaccatatcagctgtcagcagaagcaaggagcctccgtggaaactctcctgggatattcatggctgccaattctcttaaatgaacgtcttcaaactggatcctactgtctcccagttgccttggaaaaattgccacccaactactccatgcattctgctgagaaagtcccattacagaatcctcccattaagtgggctgaaggacataagggagtatttaatattgaagtgcaagctgtttcttctgtacacacccaggacaaccacctggagaagttcttcaccctctgccactccctggagagccaggtgaccttccccatccgcgtgctggatcagaaaatcagcgagatggcgctggagcatgagctgaagctcagcatcatctgcctgaactcctcccgcctggagccgctcgtgctcttcctgcacctggtgctggacaagctcttccagctgtccgtgcagcccatggtcatcgctggccagacagccaacttctcccagtttgccttcgagtccgtggtggccatcgccaacagtctgcacaacagcaaggacctgagcaaggaccagcatgggaggaactgcctgctggcttcctacgtgcactacgtcttccgcctgccagaggtgcaaagggatgtgcccaagtcagtggctcacatctgcaaccccagcactctaggaggctgagatggcaggatcgcttggagcagtggctcacatctgcaaccccagcactctaggaggctgagatggcaggatcgcttggagcagtggctcacatctgcaaccccagcactctaggaggctgagatggcaggatcgcttggagcagtggctcacatctgcaaccccagcactctaggaggctgagatggcaggatcacttggagcagtggctcacatctgcaaccccagcactctaggaggctgagatggcaggatcgcttggagcagtggctcacatctgcaaccccagcactctaggaggctgagatggcaggatcgcttggagcagtggctcacatctgcaaccccagcactctaggaggctgagatggcaggatcgcttggagcagtggctcacatctgcaaccccagcactctaggaggctgagatggcaggatcgcttggagcagtggctcacatctgcaaccccagcactctaggaggctgagatggcaggatcgcttggagcagtggctcacatctgcaaccccagcactctaggaggctgagatggcaggatcgcttggagccagaagttggagaccagcccagggaacataatgagactctgtctctacaaaaaatataaaaattagcagagcatggtggcacatacctttagtcccagctactcaggaagaagctgaggcaggaggatcatttaagcccaggagttggaggctgcagtgagctatgattgcaccactgcactccagcctgggaaacagagcgagatcccatctcttaaaacaaacaaacaaacaaacaaacaccctaaaattccattttcgttttcaggacaatacaaaacttacatgaatgctgaaattatgtgtttctttatagatctttcttcctccctccttgcctctttttatgctctaaacacttattttgtctgcccatttgataatccctcactggtctttacccacttgctaatttatgattcagctgagaatctcttttttaagatggagaagtggtgactgatgcctacgattctagtataataaaggaaataatatata

SEQ ID NO: 5946 - DNA, 1395 bp, Homo sapiens
  source 1..1395: mol_type = unassigned DNA; mol_type = unassigned DNA
aatttacgcgccgtgtaactgtgaatctttcaaagcctcagttttatgaccctgtggagccagtggactttgaaggacttctgatgacacacctgaacagcctggatgtgcagcttgcccaggagctcggggacttcactgatgacgacttggacgtggtgttcacgccaaaggaatgtaggactttgcagccctctttgccggaggaaggggttgaactggaccctcatgtcagggactgtgttcagacctacatccgtgagtggctaatcgtgaaccggaaaaaccaaggaagtccagaaatctgtggctttaaaaagactggatctcgaaaagattttcacaagacgcttccgaaacagacgtttgagtcggaaaccttggagtgcagtgaacccgctgctcaggcaggcccccgccacttaaacgtgctgtgcgacgtgtctgggaaaggccccgtcactgcctgtgactttgacctccgcagcctgcagcctgacaagcggctagaaaacctcctgcagcaagtgagtgccgaggactttgagaagcagaacgaggaggcccggaggaccaataggcaggccgagctctttgccctttacccatcagtggacgaggtgggtgccactgtttccatactggagaatctcagtgaagactctgagagtcatgtggacaattgtgttgttcattattactatatagcagcccatggtgtcagggctcacttgtatgatttctggggcctcgtttttcactcaggcaagcctgtgtgtcatagcagagccattattgattatcacacagatgggattctgataataataacaactggaattttcatagcactttacaaaatatgttcactaagagcatctcatttaatccccaaatgtttcaagggtctacatgtagtaatcacacccagcaagtcaaaccatcctattatttgaggggatgtgtggtcactaatccattgagacatacattacttaaactttgatgttctttagtgctttgttactttctttttaatggtctctatgagcaaccagagagacctgctttgaaaacatttcaggctaggataatcacagcccatgctcccaatgtatagaactttgggatcttgattgtttacttcttcatttattggagctgactgacaacaataggataatgtagactttgcctgtggtcactgcctgaggcactttggatgaaatgagaggtgacgattattcaagccttttgtctgtttgaactccttatactgtataggaggctctcagttttcccctctgcgtgaggttatctacacttctgggtcttgccagaacagattactgctatatctctgctgtccaaatggtattgaaagttcagttggaa

SEQ ID NO: 5947 - DNA, 6386 bp, Homo sapiens
  source 1..6386: mol_type = unassigned DNA; mol_type = unassigned DNA
tacgcgccgtgtaactgtgaatctttcaaagcctcagttttatgaccctgtggagccagtggactttgaaggacttctgatgacacacctgaacagcctggatgtgcagcttgcccaggagctcggggacttcactgatgacgacttggacgtggtgttcacgccaaaggaatgtaggactttgcagccctctttgccggaggaaggggttgaactggaccctcatgtcagggactgtgttcagacctacatccgtgagtggctaatcgtgaaccggaaaaaccaaggaagtccagaaatctgtggctttaaaaagactggatctcgaaaagattttcacaagacgcttccgaaacagacgtttgagtcggaaaccttggagtgcagtgaacccgctgctcaggcaggcccccgccacttaaacgtgctgtgcgacgtgtctgggaaaggccccgtcactgcctgtgactttgacctccgcagcctgcagcctgacaagcggctagaaaacctcctgcagcaagtgagtgccgaggactttgagaagcagaacgaggaggcccggaggaccaataggcaggccgagctctttgccctttacccatcagtggacgaggaggatgctgtggaaatacgtccagtaccagaatgtcccaaggaacacctgggcaacagaatattggtcaagttgctgaccttgaagttcgagattgaaattgagcccctgtttgccagcattgccctctacgatgttaaagaaaggaaaaagatctcagaaaattttcactgtgacctgaactctgaccagttcaaaggatttctgcgagctcacacgccttcagtggccgcatcaagtcaggcgagatctgcagtcttctcagtcacctacccgtcctcagacatctacctggtagtcaagattgaaaaagtcctgcagcagggagagattggagactgtgcagagccctacacggttatcaaagaaagtgatggtggaaagagtaaagaaaagattgaaaaactaaaactccaagctgaatccttctgccagcgtttggggaaataccggatgccctttgcctgggcacccataagcttatcaagcttcttcaatgtctccacccttgagagggaggtaactgatgtggactctgtggttgggagaagctcagtgggtgaacggaggacattggcccaatctagaaggctttctgaaagagccctctccttggaggaaaatggggttggatccaacttcaaaacctccactctgagcgttagcagctttttcaagcaggaaggagatcgccttagcgatgaagacttattcaagtttttagctgactacaaaagatcatcatccttacagagacgagtcaagtcaattccaggcttgctaagactggagatttctacagctccagagatcatcaattgctgtctgactcctgaaatgctgcccgtgaaaccctttcctgaaaaccggacacgcccgcacaaagagattttggaatttccaacacgagaagtatatgtccctcacactgtgtacagaaaccttctctatgtctacccacagaggctgaactttgtaaacaaactagcatcagcccggaacattacaataaagatccagtttatgtgtggagaagatgctagcaatgcgatgccggtcatctttggaaaatccagcgggcctgaatttctgcaggaagtgtacacagctgttacataccataataagtctcctgacttttatgaagaagtgaaaattaagctccccgctaagctcacagtaaatcaccacctcctgttcaccttctaccatatcagctgtcagcagaagcaaggagcctccgtggaaactctcctgggatattcatggctgccaattctcttaaatgaacgtcttcaaactggatcctactgtctcccagttgccttggaaaaattgccacccaactactccatgcattctgctgagaaagtcccattacagaatcctcccattaagtgggctgaaggacataagggagtatttaatattgaagtgcaagctgtttcttctgtacacacccaggacaaccacctggagaagttcttcaccctctgccactccctggagagccaggtgaccttccccatccgcgtgctggatcagaaaatcagcgagatggcgctggagcatgagctgaagctcagcatcatctgcctgaactcctcccgcctggagccgctcgtgctcttcctgcacctggtgctggacaagctcttccagctgtccgtgcagcccatggtcatcgctggccagacagccaacttctcccagtttgccttcgagtccgtggtggccatcgccaacagtctgcacaacagcaaggacctgagcaaggaccagcatgggaggaactgcctgctggcttcctacgtgcactacgtcttccgcctgccagaggtgcaaagggatgtgcccaagtcaggcgctcccactgccctcctagaccctcggagctaccacacgtatggccgcacatcagctgctgctgtgagttcaaagctgctgcaggcccgggtgatgagcagcagtaacccagacctcgcggggacacactccgcagcagacgaggaagtgaagaacatcatgtcttcaaagcatttccatgaggagcttgcccttcagatggtggtcagcaccggaatggtgagagaaacagtcttcaagtatgcctggttcttctttgagcttctggtgaaaagcatggcccagcacgtacataacatggacaaacgggacagttttcggaggactcgtttttctgaccgtttcatggatgacataactactattgttaatgtggtcacctcggaaattgcagcccttttagtaaaaccacagaaggaaaatgaacaggcggaaaagatgaacatcagcctggctttcttcttgtatgaccttctctccctcatggatcggggctttgtgtttaacctcatcagacattattgcagccagctgtcagccaagctcagtaaccttccaacgctcatttccatgaggctagagttcctgagaatcctctgtagccatgagcattacctcaatctgaaccttttttttatgaatgctgatactgctccaacatctccttgtccttccatatcttcccagaactcaagctcctgctccagcttccaggaccagaagatcgccagcatgttcgatctgacttccgagtaccgccagcagcacttcctcaccgggctcctcttcacagaactggctgctgccctggatgccgaaggggaaggaatcagcaaagtacaaaggaaagctgtcagtgcaattcacagcctgctaagttctcacgacctggacccacgctgtgtcaaaccagaggtgaaggtcaaaatcgccgccctttacctacctttagttggcatcattttggatgctttgccacagctctgtgactttacagttgcagatactcgcagataccgcaccagtggctcggatgaagaacaagaaggagccggtgccattaaccagaatgtggctctggccatagcagggaataatttcaatttgaaaacaagtggaatagtgctgtcttccttgccctataagcagtacaacatgctgaacgcggacactactcgcaacctcatgatctgcttcctctggatcatgaaaaatgctgatcagagcctcattaggaagtggattgctgacctgccatcaacgcagctcaacaggattttagatctacttttcatctgtgtgttatgttttgagtataagggaaaacagagttctgacaaagtcagtacccaagtcctgcagaagtcaagggatgtcaaggcccggctggaagaggctttgctccgtggggaaggggccagaggggagatgatgcgccgccgggctccagggaacgaccgatttccaggcctaaatgaaaatttgagatggaagaaagagcagacacattggcggcaagctaatgagaagctagataaaacaaaggccgagttagatcaagaagccttgatcagtggcaatctggctacagaagcacatttaatcatcctggatatgcaggaaaacattatccaggcgagctcggctctggactgtaaagacagcctgctgggaggtgttctgagggtgctggtgaattctctgaactgtgatcagagtaccacctacctgactcactgctttgcaacactccgtgctctcatcgccaagtttggagacttactctttgaagaggaggtggaacagtgtttcgacctatgtcaccaagtcctgcaccactgcagcagcagcatggatgtcacccggagccaagcctgtgccaccctttacctcctcatgaggttcagttttggagccaccagtaattttgcaagagtaaagatgcaagtaaccatgtccctggcatctttggtgggaagagcaccagactttaatgaagagcacctgagaagatccttgaggacaattttggcctattcagaagaggacacagccatgcagatgactccttttcccacccaggtggaggaacttctctgtaatctgaatagcatcttatatgacacagtgaaaatgagggaatttcaggaagatcctgagatgcttatggatctcatgtacagaattgccaagagttaccaggcatctcctgatctgcggctgacctggctccagaacatggcagagaaacacaccaagaagaagtgctacacggaggctgccatgtgcctggtgcacgccgctgcgttagtggctgagtatctgagcatgctggaggaccacagctacctgcccgtgggcagtgtcagcttccagaatatttcttccaatgtgctggaggagtctgtggtctctgaggacaccctgtcacctgacgaggatggggtgtgcgcaggccagtacttcaccgagagtggcctggtaggcctcctggagcaggccgcggagctcttcagcacgggaggcttatatgagacagttaatgaggtctacaagctggtcatccccatcctagaagcgcatcgagaattccggaagctgacactcactcacagcaagctgcagagagccttcgacagcatcgttaacaaggatcataagagaatgtttggaacctacttccgagttggtttctttggatccaaatttggggatttggatgaacaggagtttgtctacaaagagcctgcaattaccaagcttcctgagatctcacatagactagaggcattttatggtcaatgttttggtgcagaatttgtggaagtgattaaagactccactcctgtggacaaaaccaagttggatcctaacaaggcctacatacagatcacttttgtggagccctactttgatgagtatgagatgaaagacagggtcacatactttgagaagaatttcaacctccggaggttcatgtacaccaccccgttcaccctggaggggcggcctcggggagagctgcatgagcagtacagaaggaacacagtcctgaccactatgcacgccttcccctacatcaagaccaggatcagcgtcatccagaaggaggagtttgttttgacaccgattgaagttgccattgaagacatgaagaagaagaccctgcagttagcagttgccattaaccaggagccgcctgatgcaaagatgcttcagatggtgctgcaaggctctgtgggagctactgtaaatcagggaccactggaagtagcccaagtgtttttggctgaaattcctgctgatccaaaactctatcgacatcacaacaagttgaggttatgctttaaggaattcatcatgagatgtggtgaagctgtagagaaaaacaagcgtctcatcacggcagaccagagggaatatcagcaggaactcaaaaagaactataacaagctaaaagagaacctcaggccaatgatcgagcggaaaattccagaactgtacaagccaatattcagagttgagagtcaaaagagggactccttccacagatctagtttcaggaaatgtgaaacccagttgtcacagggcagctaagaaaagccatcttcattcgtggagactgtggccctgcaaccctggagaaggacttgctggtacttaaaaaatgggacatttgccacccaggactgactgtacactccctgatcagccagcactctggaagctttgggatcccaggaaccatggaattattcccaaatggactctgaccagatttttgccatactggggggtggcgggatggaggatgggtactcaggcatgactgcgtatttattaaagtgtgtttttccacaatgtaccaaacaaggcataagcagcttctcctgctgactggcca

SEQ ID NO: 5948 - DNA, 9277 bp, Homo sapiens
  source 1..9277: mol_type = unassigned DNA; mol_type = unassigned DNA
ctgtgaatctttcaaagcctcagttttatgaccctgtggagccagtggactttgaaggacttctgatgacacacctgaacagcctggatgtgcagcttgcccaggagctcggggacttcactgatgacgacttggacgtggtgttcacgccaaaggaatgtaggactttgcagccctctttgccggaggaaggggttgaactggaccctcatgtcagggactgtgttcagacctacatccgtgagtggctaatcgtgaaccggaaaaaccaaggaagtccagaaatctgtggctttaaaaagactggatctcgaaaagattttcacaagacgcttccgaaacagacgtttgagtcggaaaccttggagtgcagtgaacccgctgctcaggcaggcccccgccacttaaacgtgctgtgcgacgtgtctgggaaaggccccgtcactgcctgtgactttgacctccgcagcctgcagcctgacaagcggctagaaaacctcctgcagcaagtgagtgccgaggactttgagaagcagaacgaggaggcccggaggaccaataggcaggccgagctctttgccctttacccatcagtggacgaggaggatgctgtggaaatacgtccagtaccagaatgtcccaaggaacacctgggcaacagaatattggtcaagttgctgaccttgaagttcgagattgaaattgagcccctgtttgccagcattgccctctacgatgttaaagaaaggaaaaagatctcagaaaattttcactgtgacctgaactctgaccagttcaaaggatttctgcgagctcacacgccttcagtggccgcatcaagtcaggcgagatctgcagtcttctcagtcacctacccgtcctcagacatctacctggtagtcaagattgaaaaagtcctgcagcagggagagattggagactgtgcagagccctacacggttatcaaagaaagtgatggtggaaagagtaaagaaaagattgaaaaactaaaactccaagctgaatccttctgccagcgtttggggaaataccggatgccctttgcctgggcacccataagcttatcaagcttcttcaatgtctccacccttgagagggaggtaactgatgtggactctgtggttgggagaagctcagtgggtgaacggaggacattggcccaatctagaaggctttctgaaagagccctctccttggaggaaaatggggttggatccaacttcaaaacctccactctgagcgttagcagctttttcaagcaggaaggagatcgccttagcgatgaagacttattcaagtttttagctgactacaaaagatcatcatccttacagagacgagtcaagtcaattccaggcttgctaagactggagatttctacagctccagagatcatcaattgctgtctgactcctgaaatgctgcccgtgaaaccctttcctgaaaaccggacacgcccgcacaaagagattttggaatttccaacacgagaagtatatgtccctcacactgtgtacagaaaccttctctatgtctacccacagaggctgaactttgtaaacaaactagcatcagcccggaacattacaataaagatccagtttatgtgtggagaagatgctagcaatgcgatgccggtaaggagggaaacgaacatttgcctcaaatcagggtgggctgctcacccctgtcacttcacacaagtccgggactcatcagtgtacaaagtccgtctattccaggccaatactgctcagcatgtgcaagggcttctgtgcccaggatatcagtggggaaacagggtcagtcttacttgacgatctctttctcggcttattctgtagtgagcttggaacatacagatcattttagaggattaaaaaaagtcataaagtctttccatactgcccataggaccaccccactctaaaggcatacaaagtaaagagatggctcaacacgtgcgccatgtttgctgagtgtcttccatgcacaaactgtacacactgtgttatacacacacagtgttacacacttactcaagcctcggaccacagtgctgatgaatacaaagtaccgcctagtaattataaacacacaccacctccacaccttctaggagtggatctttgttctgaggcaaaatataaatcaaattattcatatatatatatatatataaaatgcagtgtgctccaaggaactcaaaatgccagaatttatactttttaaaccatctcctactaaatgagatggtggttagctattactatttcccataagtcatagaattcagttaatataactttctttctttttttcttttttttttttttttttgagacagagtttcactctttttgcccaggctggagtacaatggccgcaacctccacctcccaagttcaagtgattctcctgcctcagccttccaagtagctgggattacaggcgcgtgccaccacgcccagctaattttgtatttttagtagagatggggtttcaccatgttggccagggtggtctcaaactcctgacctcagctgatccacccgccttggcctcctaaagtgctgggactaaaggcgtgagccactgcacgcagttaatatacctttctaaaaagaaaaagaaaaaaatcctttctcttaatgtcccacccaaagaaaaaaagaaaaaaaaaaacctttctcctaacgtcccacctgtcttcccaatgcaaggtgtcttaagacagcggtggggtcctcttagtcctctctgctcaggcccctggcatgccactgccaggagtgccagatatgcttgtgcagatcctgtggcaaccaagatgcccagccaagagtgactgtgggctaaagtccagtctgttcttcattcactgagccatgggttctggtgttgggattactgcatctagaggaaagagctttttttctctgcacaaaggtgagtgcacttgttcataatgcatcctaaatgctgcttcaggcccaaggaggtatctttttctaaatggcacaaatgtggataaggcagtggagattcaaatcacctaagtgagtaggtctgtatgtttgagagagaagaacctggaactggggatttctcactcaagacaaaagtatgtaactttggcctgttggatagacctctaggcagtgaggcagagtggagagagtactggttttctaatctcacaaacatgtggcctttggtcactaatatagccccttggaacctcatttcacccttcatagccagttcctttgcactggtgtgcttgggccagttgtagtcccagcacttttttttttctttttgagacaggatctcactcttgcccaggctggggtgcaatggtgcaatctcgactcactgcaacctctgcttcctaggctcaagcgatcctcttgcctccgccccctgagtagcagggactatacgcatgtgccaccacgcctggctaatttttgtatttttttgtagagatgaggtttcgccatgttgcccaggctggtctccaactcctgggctcaagccattctcccacgccgacctcccagagtgctgagattacaggtgtgagccactgctcctggccaacccagcactcttaattgtacaaaatgcagctctatgagaccagaacatcctgttggcctgatgatagtcaatttgatgtacccaaatgttactgataatttgatcctttctctactggtgaacaggtcatctttggaaaatccagcgggcctgaatttctgcaggaagtgtacacagctgttacataccataataagtctcctgacttttatgaagaagtgaaaattaagctccccgctaagctcacagtaaatcaccacctcctgttcaccttctaccatatcagctgtcagcagaagcaaggagcctccgtggaaactctcctgggatattcatggctgccaattctcttaaatgaacgtcttcaaactggatcctactgtctcccagttgccttggaaaaattgccacccaactactccatgcattctgctgagaaagtcccattacagaatcctcccattaagtgggctgaaggacataagggagtatttaatattgaagtgcaagctgtttcttctgtacacacccaggacaaccacctggagaagttcttcaccctctgccactccctggagagccaggtgaccttccccatccgcgtgctggatcagaaaatcagcgagatggcgctggagcatgagctgaagctcagcatcatctgcctgaactcctcccgcctggagccgctcgtgctcttcctgcacctggtgctggacaagctcttccagctgtccgtgcagcccatggtcatcgctggccagacagccaacttctcccagtttgccttcgagtccgtggtggccatcgccaacagtctgcacaacagcaaggacctgagcaaggaccagcatgggaggaactgcctgctggcttcctacgtgcactacgtcttccgcctgccagaggtgcaaagggatgtgcccaagtcaggcgctcccactgccctcctagaccctcggagctaccacacgtatggccgcacatcagctgctgctgtgagttcaaagctgctgcaggcccgggtgatgagcagcagtaacccagacctcgcggggacacactccgcagcagacgaggaagtgaagaacatcatgtcttcaaagatcgccgatcgcaactgcagccgaatgtcttactattgctctggcagtagtgatgctccaagttcacctgcagccccaaggccagccagcaaaaagcatttccatgaggagcttgcccttcagatggtggtcagcaccggaatggtgagagaaacagtcttcaagtatgcctggttcttctttgagcttctggtgaaaagcatggcccagcacgtacataacatggacaaacgggacagttttcggaggactcgtttttctgaccgtttcatggatgacataactactattgttaatgtggtcacctcggaaattgcagcccttttagtaaaaccacagaaggaaaatgaacaggcggaaaagatgaacatcagcctggctttcttcttgtatgaccttctctccctcatggatcggggctttgtgtttaacctcatcagacattattgcagccagctgtcagccaagctcagtaaccttccaacgctcatttccatgaggctagagttcctgagaatcctctgtagccatgagcattacctcaatctgaaccttttttttatgaatgctgatactgctccaacatctccttgtccttccatatcttcccagaactcaagctcctgctccagcttccaggaccagaagatcgccagcatgttcgatctgacttccgagtaccgccagcagcacttcctcaccgggctcctcttcacagaactggctgctgccctggatgccgaaggggaaggaatcagcaaagtacaaaggaaagctgtcagtgcaattcacagcctgctaagttctcacgacctggacccacgctgtgtcaaaccagaggtgaaggtcaaaatcgccgccctttacctacctttagttggcatcattttggatgctttgccacagctctgtgactttacagttgcagatactcgcagataccgcaccagtggctcggatgaagaacaagaaggagccggtgccattaaccagaatgtggctctggccatagcagggaataatttcaatttgaaaacaagtggaatagtgctgtcttccttgccctataagcagtacaacatgctgaacgcggacactactcgcaacctcatgatctgcttcctctggatcatgaaaaatgctgatcagagcctcattaggaagtggattgctgacctgccatcaacgcagctcaacaggattttagatctacttttcatctgtgtgttatgttttgagtataagggaaaacagagttctgacaaagtcagtacccaagtcctgcagaagtcaagggatgtcaaggcccggctggaagaggctttgctccgtggggaaggggccagaggggagatgatgcgccgccgggctccagggaacgaccgatttccaggcctaaatgaaaatttgagatggaagaaagagcagacacattggcggcaagctaatgagaagctagataaaacaaaggccgagttagatcaagaagccttgatcagtggcaatctggctacagaagcacatttaatcatcctggatatgcaggaaaacattatccaggcgagctcggctctggactgtaaagacagcctgctgggaggtgttctgagggtgctggtgaattctctgaactgtgatcagagtaccacctacctgactcactgctttgcaacactccgtgctctcatcgccaagtttggagacttactctttgaagaggaggtggaacagtgtttcgacctatgtcaccaagtcctgcaccactgcagcagcagcatggatgtcacccggagccaagcctgtgccaccctttacctcctcatgaggttcagttttggagccaccagtaattttgcaagagtaaagatgcaagtaaccatgtccctggcatctttggtgggaagagcaccagactttaatgaagagcacctgagaagatccttgaggacaattttggcctattcagaagaggacacagccatgcagatgactccttttcccacccaggtggaggaacttctctgtaatctgaatagcatcttatatgacacagtgaaaatgagggaatttcaggaagatcctgagatgcttatggatctcatgtacagaattgccaagagttaccaggcatctcctgatctgcggctgacctggctccagaacatggcagagaaacacaccaagaagaagtgctacacggaggctgccatgtgcctggtgcacgccgctgcgttagtggctgagtatctgagcatgctggaggaccacagctacctgcccgtgggcagtgtcagcttccagaatatttcttccaatgtgctggaggagtctgtggtctctgaggacaccctgtcacctgacgaggatggggtgtgcgcaggccagtacttcaccgagagtggcctggtaggcctcctggagcaggccgcggagctcttcagcacgggaggcttatatgagacagttaatgaggtctacaagctggtcatccccatcctagaagcgcatcgagaattccggaagctgacactcactcacagcaagctgcagagagccttcgacagcatcgttaacaaggatcataagagaatgtttggaacctacttccgagttggtttctttggatccaaatttggggatttggatgaacaggagtttgtctacaaagagcctgcaattaccaagcttcctgagatctcacatagactagaggcattttatggtcaatgttttggtgcagaatttgtggaagtgattaaagactccactcctgtggacaaaaccaagttggatcctaacaaggcctacatacagatcacttttgtggagccctactttgatgagtatgagatgaaagacagggtcacatactttgagaagaatttcaacctccggaggttcatgtacaccaccccgttcaccctggaggggcggcctcggggagagctgcatgagcagtacagaaggaacacagtcctgaccactatgcacgccttcccctacatcaagaccaggatcagcgtcatccagaaggaggagtttgttttgacaccgattgaagttgccattgaagacatgaagaagaagaccctgcagttagcagttgccattaaccaggagccgcctgatgcaaagatgcttcagatggtgctgcaaggctctgtgggagctactgtaaatcagggaccactggaagtagcccaagtgtttttggctgaaattcctgctgatccaaaactctatcgacatcacaacaagttgaggttatgctttaaggaattcatcatgagatgtggtgaagctgtagagaaaaacaagcgtctcatcacggcagaccagagggaatatcagcaggaactcaaaaagaactataacaagctaaaagagaacctcaggccaatgatcgagcggaaaattccagaactgtacaagccaatattcagagttgagagtcaaaagagggactccttccacagatctagtttcaggaaatgtgaaacccagttgtcacagggcagctaagaaaagccatcttcattcgtggagactgtggccctgcaaccctggagaaggacttgctggtacttaaaaaatgggacatttgccacccaggactgactgtacactccctgatcagccagcactctggaagctttgggatcccaggaaccatggaattattcccaaatggactctgaccagatttttgccatactggggggtggcgggatggaggatgggtactcaggcatgactgcgtatttattaaagtgtgtttttccacaatgtaccaaacaaggcataagcagcttctcctgctgactggccaatcactgcccatctgagagatgatttcctctggcccatatttgaatttattggagtaactcaaattgcctgaggaaaaatggaaaaattatccaccagtcgattcaaactgaatttcactctttataggaaggcagggcaaacttgtaggagtacgaaacattttcaataaatctacaaagggaagccttactacaattccaaaaatcatcatggttggaaatttgggaggagattatttgtgaacttgttacccttttggtaatggtggactaattgctgtatagttatttttgttttattattactgttacattaatttaacatgcatttatagaagaatacattcaaagcactgatgtaggagatacacggtacttggagcagtcagccagaaatcacagatactgctttcacttaaatggaaacaattctccgataatgctttgctttttttcttatgtcactcttgtgtactatctatttttctcctctctgggaccaagtttctttttataaagcaataatatctctgttttcatttcagaacattgtgctgtctgtcagcatatgtatatcagctacaaaatatattcaactttgacttcttttgacaaaggactttaggaaaaagaggaacaaagacattatttgagaattaaattatatatttttaatatgactgtgaccttgactgataataaagatgtaataag

SEQ ID NO: 5949 - DNA, 384 bp, Homo sapiens
  source 1..384: mol_type = unassigned DNA; mol_type = unassigned DNA
gcccccgccacttaaacgtgctgtgcgacgtgtctgggaaaggccccgtcactgcctgtgactttgacctccgcagcctgcagcctgacaagcggctagaaaacctcctgcagcaagtgagtgccgaggactttgagaagcagaacgaggaggcccggaggaccaataggcaggccgagctctttgccctttacccatcagtggacgagttctgtgatggagatgccaacatgtaatagagggacccaaagtggatgccagaagagagagaacaattaaaggatgcagagaatatgtccagtgagacgtttgcttgtcagtgtctccctggtggtattagaggggagaatgttccatctgaacagattaaaataatgaaacgta

SEQ ID NO: 5950 - DNA, 1922 bp, Homo sapiens
  source 1..1922: mol_type = unassigned DNA; mol_type = unassigned DNA
gagtattgtcacatatcagcccagaaagtcacagggtacagcaactcatacttgctcccagcaccaggccagccccattctgcctccagggagtcacccaaaatagagagatgagggtaaaataagacctaggaatactatttatttgcctccatggcctttgaacttgcacatccaacgtaacggctcctgtgtgttcttgattgttccaattatcatttttcctctcgaatacctgagagcattcattattttgcaagagatttgagaatccctgtgccctaacttttctttccttgatgtgggatgttcttctgtgactagaaaccttctctatgtctacccacagaggctgaactttgtaaacaaactagcatcagcccggaacattacaataaagatccagtttatgtgtggagaagatgctagcaatgcgatgccggtcatctttggaaaatccagcgggcctgaatttctgcaggaagtgtacacagctgttacataccataataatggctgccaattctcttaaatgaacgtcttcaaactggatcctactgtctcccagttgccttggaaaaattgccacccaactactccatgcattctgctgagaaagtcccattacagaatcctcccattaagtgggctgaaggacataagggagtatttaatattgaagtgcaagctgtttcttctgtacacacccaggacaaccacctggagaagttcttcaccctctgccactccctggagagccaggtgaccttccccatccgcgtgctggatcagaaaatcagcgagatggcgctggagcatgagctgaagctcagcatcatctgcctgaactcctcccgcctggagccgctcgtgctcttcctgcacctggtgctggacaagctcttccagctgtccgtgcagcccatggtcatcgctggccagacagccaacttctcccagtttgccttcgagtccgtggtggccatcgccaacagtctgcacaacagcaaggacctgagcaaggaccagcatgggaggaactgcctgctggcttcctacgtgcactacgtcttccgcctgccagaggtgcaaagggatgtgcccaagtcaggcgctcccactgccctcctagaccctcggagctaccacacgtatggccgcacatcagctgctgctgtgagttcaaagctgctgcaggcccgggtgatgagcagcagtaacccagacctcgcggggacacactccgcagcagacgaggaagtgaagaacatcatgtcttcaaagatcgccgatcgcaactgcagccgaatgtcttactattgctctggcagtagtgatgctccaagttcacctgcagccccaaggccagccagcaaaaagcatttccatgaggagcttgcccttcagatggtggtcagcaccggaatggtgagagaaacagtcttcaagtatgcctggttcttctttgagcttctggtgaaaagcatggcccagcacgtacataacatggacaaacgggacagttttcggaggactcgtttttctgaccgtttcatggatgacataactactattgttaatgtggtcacctcggaaattgcagcccttttagtaaaaccacagaaggaaaatgaacaggcggaaaagatgaacatcagcctggctttcttcttgtatgaccttctctccctcatggatcggggctttgtgtttaacctcatcagacattattgcagccagctgtcagccaagctcagtaaccttccaacgctcatttccatgaggctagagttcctgagaatcctctgtagccatgagcattacctcaatctgaaccttttttttatgaatgctgatactgctccaacatctccttgtccttccatatcttcccaggtaataaaagaattatttaactaaaa

SEQ ID NO: 5951 - DNA, 6124 bp, Homo sapiens
  source 1..6124: mol_type = unassigned DNA; mol_type = unassigned DNA
agaaagtcacagggtacagcaactcatacttgctcccagcaccaggccagccccattctgcctccagggagtcacccaaaatagagagatgagggtaaaataagacctaggaatactatttatttgcctccatggcctttgaacttgcacatccaacgtaacggctcctgtgtgttcttgattgttccaattatcatttttcctctcgaatacctgagagcattcattattttgcaagagatttgagaatccctgtgccctaacttttctttccttgatgtgggatgttcttctgtgactagaaaccttctctatgtctacccacagaggctgaactttgtaaacaaactagcatcagcccggaacattacaataaagatccagtttatgtgtggagaagatgctagcaatgcgatgccggtaaggagggaaacgaacatttgcctcaaatcagggtgggctgctcacccctgtcacttcacacaagtccgggactcatcagtgtacaaagtccgtctattccaggccaatactgctcagcatgtgcaagggcttctgtgcccaggatatcagtggggaaacagggtcatctttggaaaatccagcgggcctgaatttctgcaggaagtgtacacagctgttacataccataataagtctcctgacttttatgaagaagtgaaaattaagctccccgctaagctcacagtaaatcaccacctcctgttcaccttctaccatatcagctgtcagcagaagcaaggagcctccgtggaaactctcctgggatattcatggctgccaattctcttaaatgaacgtcttcaaactggatcctactgtctcccagttgccttggaaaaattgccacccaactactccatgcattctgctgagaaagtcccattacagaatcctcccattaagtgggctgaaggacataagggagtatttaatattgaagtgcaagctgtttcttctgtacacacccaggacaaccacctggagaagttcttcaccctctgccactccctggagagccaggtgaccttccccatccgcgtgctggatcagaaaatcagcgagatggcgctggagcatgagctgaagctcagcatcatctgcctgaactcctcccgcctggagccgctcgtgctcttcctgcacctggtgctggacaagctcttccagctgtccgtgcagcccatggtcatcgctggccagacagccaacttctcccagtttgccttcgagtccgtggtggccatcgccaacagtctgcacaacagcaaggacctgagcaaggaccagcatgggaggaactgcctgctggcttcctacgtgcactacgtcttccgcctgccagaggtgcaaagggatgtgcccaagtcaggcgctcccactgccctcctagaccctcggagctaccacacgtatggccgcacatcagctgctgctgtgagttcaaagctgctgcaggcccgggtgatgagcagcagtaacccagacctcgcggggacacactccgcagcagacgaggaagtgaagaacatcatgtcttcaaagatcgccgatcgcaactgcagccgaatgtcttactattgctctggcagtagtgatgctccaagttcacctgcagccccaaggccagccagcaaaaagcatttccatgaggagcttgcccttcagatggtggtcagcaccggaatggtgagagaaacagtcttcaagtatgcctggttcttctttgagcttctggtgaaaagcatggcccagcacgtacataacatggacaaacgggacagttttcggaggactcgtttttctgaccgtttcatggatgacataactactattgttaatgtggtcacctcggaaattgcagcccttttagtaaaaccacagaaggaaaatgaacaggcggaaaagatgaacatcagcctggctttcttcttgtatgaccttctctccctcatggatcggggctttgtgtttaacctcatcagacattattgcagccagctgtcagccaagctcagtaaccttccaacgctcatttccatgaggctagagttcctgagaatcctctgtagccatgagcattacctcaatctgaaccttttttttatgaatgctgatactgctccaacatctccttgtccttccatatcttcccagaactcaagctcctgctccagcttccaggaccagaagatcgccagcatgttcgatctgacttccgagtaccgccagcagcacttcctcaccgggctcctcttcacagaactggctgctgccctggatgccgaaggggaaggaatcagcaaagtacaaaggaaagctgtcagtgcaattcacagcctgctaagttctcacgacctggacccacgctgtgtcaaaccagaggtgaaggtcaaaatcgccgccctttacctacctttagttggcatcattttggatgctttgccacagctctgtgactttacagttgcagatactcgcagataccgcaccagtggctcggatgaagaacaagaaggagccggtgccattaaccagaatgtggctctggccatagcagggaataatttcaatttgaaaacaagtggaatagtgctgtcttccttgccctataagcagtacaacatgctgaacgcggacactactcgcaacctcatgatctgcttcctctggatcatgaaaaatgctgatcagagcctcattaggaagtggattgctgacctgccatcaacgcagctcaacaggattttagatctacttttcatctgtgtgttatgttttgagtataagggaaaacagagttctgacaaagtcagtacccaagtcctgcagaagtcaagggatgtcaaggcccggctggaagaggctttgctccgtggggaaggggccagaggggagatgatgcgccgccgggctccagggaacgaccgatttccaggcctaaatgaaaatttgagatggaagaaagagcagacacattggcggcaagctaatgagaagctagataaaacaaaggccgagttagatcaagaagccttgatcagtggcaatctggctacagaagcacatttaatcatcctggatatgcaggaaaacattatccaggcgagctcggctctggactgtaaagacagcctgctgggaggtgttctgagggtgctggtgaattctctgaactgtgatcagagtaccacctacctgactcactgctttgcaacactccgtgctctcatcgccaagtttggagacttactctttgaagaggaggtggaacagtgtttcgacctatgtcaccaagtcctgcaccactgcagcagcagcatggatgtcacccggagccaagcctgtgccaccctttacctcctcatgaggttcagttttggagccaccagtaattttgcaagagtaaagatgcaagtaaccatgtccctggcatctttggtgggaagagcaccagactttaatgaagagcacctgagaagatccttgaggacaattttggcctattcagaagaggacacagccatgcagatgactccttttcccacccaggtggaggaacttctctgtaatctgaatagcatcttatatgacacagtgaaaatgagggaatttcaggaagatcctgagatgcttatggatctcatgtacagaattgccaagagttaccaggcatctcctgatctgcggctgacctggctccagaacatggcagagaaacacaccaagaagaagtgctacacggaggctgccatgtgcctggtgcacgccgctgcgttagtggctgagtatctgagcatgctggaggaccacagctacctgcccgtgggcagtgtcagcttccagaatatttcttccaatgtgctggaggagtctgtggtctctgaggacaccctgtcacctgacgaggatggggtgtgcgcaggccagtacttcaccgagagtggcctggtaggcctcctggagcaggccgcggagctcttcagcacgggaggcttatatgagacagttaatgaggtctacaagctggtcatccccatcctagaagcgcatcgagaattccggaagctgacactcactcacagcaagctgcagagagccttcgacagcatcgttaacaaggatcataagagaatgtttggaacctacttccgagttggtttctttggatccaaatttggggatttggatgaacaggagtttgtctacaaagagcctgcaattaccaagcttcctgagatctcacatagactagaggcattttatggtcaatgttttggtgcagaatttgtggaagtgattaaagactccactcctgtggacaaaaccaagttggatcctaacaaggcctacatacagatcacttttgtggagccctactttgatgagtatgagatgaaagacagggtcacatactttgagaagaatttcaacctccggaggttcatgtacaccaccccgttcaccctggaggggcggcctcggggagagctgcatgagcagtacagaaggaacacagtcctgaccactatgcacgccttcccctacatcaagaccaggatcagcgtcatccagaaggaggagtttgttttgacaccgattgaagttgccattgaagacatgaagaagaagaccctgcagttagcagttgccattaaccaggagccgcctgatgcaaagatgcttcagatggtgctgcaaggctctgtgggagctactgtaaatcagggaccactggaagtagcccaagtgtttttggctgaaattcctgctgatccaaaactctatcgacatcacaacaagttgaggttatgctttaaggaattcatcatgagatgtggtgaagctgtagagaaaaacaagcgtctcatcacggcagaccagagggaatatcagcaggaactcaaaaagaactataacaagctaaaagagaacctcaggccaatgatcgagcggaaaattccagaactgtacaagccaatattcagagttgagagtcaaaagagggactccttccacagatctagtttcaggaaatgtgaaacccagttgtcacagggcagctaagaaaagccatcttcattcgtggagactgtggccctgcaaccctggagaaggacttgctggtacttaaaaaatgggacatttgccacccaggactgactgtacactccctgatcagccagcactctggaagctttgggatcccaggaaccatggaattattcccaaatggactctgaccagatttttgccatactggggggtggcgggatggaggatgggtactcaggcatgactgcgtatttattaaagtgtgtttttccacaatgtaccaaacaaggcataagcagcttctcctgctgactggccaatcactgcccatctgagagatgatttcctctggcccatatttgaatttattggagtaactcaaattgcctgaggaaaaatggaaaaattatccaccagtcgattcaaactgaatttcactctttataggaaggcagggcaaacttgtaggagtacgaaacattttcaataaatctacaaagggaagccttactacaattccaaaaatcatcatggttggaaatttgggaggagattatttgtgaacttgttacccttttggtaatggtggactaattgctgtatagttatttttgttttattattactgttacattaatttaacatgcatttatagaagaatacattcaaagcactgatgtaggagatacacggtacttggagcagtcagccagaaatcacagatactgctttcacttaaatggaaacaattctccgataatgctttgctttttttcttatgtcactcttgtgtactatctatttttctcctctctgggaccaagtttctttttataaagcaataatatctctgttttcatttcagaacattgtgctgtctgtcagcatatgtatatcagctacaaaatatattcaactttgacttcttttgacaaaggactttaggaaaaagaggaacaaagacattatttgagaattaaattatatatttttaatatgactgtgaccttgactgataataaagatgtaataagaattgcaagctaaa

SEQ ID NO: 5952 - DNA, 535 bp, Homo sapiens
  source 1..535: mol_type = unassigned DNA; mol_type = unassigned DNA
acactgctcctaagacagaggtactcagatacgtggctgaaagcctagctcaaatactgccccagccctataagcagtacaacatgctgaacgcggacactactcgcaacctcatgatctgcttcctctggatcatgaaaaatgctgatcagagcctcattaggaagtggattgctgacctgccatcaacgcagctcaacaggattttagatctacttttcatctgtgtgttatgttttgagtataagggaaaacagagttctgacaaagtcagtacccaagtcctgcagaagtcaagggatgtcaaggcccggctggaagaggctttgctccgtggggaaggggccagaggggagatgatgcgccgccgggctccagggaacgaccgatttccaggcctaaatgaaaatttgagatggaagaaagagcagacacattggcggcaagctaatgagaagctagataaaacaaaggccgagttagatcaagaagccttgatcagtggcaatctggctacagaagcacatttaatcat

SEQ ID NO: 5953 - DNA, 428 bp, Homo sapiens
  source 1..428: mol_type = unassigned DNA; mol_type = unassigned DNA
cggcagaccagagggaatatcagcaggaactcaaaaagaactataacaagctaaaagagaacctcaggccaatgatcgagcggaaaattccagaactgtacaagccaatattcagagttgagagtcaaaagagggactccttccacagatctagtttcaggaaatgtgaaacccagttgtcacagggcagctaagaaaagccatcttcattcgtggagactgtggccctgcaaccctggagaaggacttgctgaacattgtgctgtctgtcagcatatgtatatcagctacaaaatatattcaactttgacttcttttgacaaaggactttaggaaaaagaggaacaaagacattatttgagaattaaattatatatttttaatatgactgtgaccttgactgataataaagatgtaataagaattgc

SEQ ID NO: 5954 - DNA, 7237 bp, Homo sapiens
  source 1..7237: mol_type = unassigned DNA; mol_type = unassigned DNA
cattttgtctcctgtaacaatttacgcgccgtgtaactgtgaatctttcaaagcctcagttttatgaccctgtggagccagtggactttgaaggacttctgatgacacacctgaacagcctggatgtgcagcttgcccaggagctcggggacttcactgatgacgacttggacgtggtgttcacgccaaaggaatgtaggactttgcagccctctttgccggaggaaggggttgaactggaccctcatgtcagggactgtgttcagacctacatccgtgagtggctaatcgtgaaccggaaaaaccaaggaagtccagaaatctgtggctttaaaaagactggatctcgaaaagattttcacaagacgcttccgaaacagacgtttgagtcggaaaccttggagtgcagtgaacccgctgctcaggcaggcccccgccacttaaacgtgctgtgcgacgtgtctgggaaaggccccgtcactgcctgtgactttgacctccgcagcctgcagcctgacaagcggctagaaaacctcctgcagcaagtgagtgccgaggactttgagaagcagaacgaggaggcccggaggaccaataggcaggccgagctctttgccctttacccatcagtggacgaggaggatgctgtggaaatacgtccagtaccagaatgtcccaaggaacacctgggcaacagaatattggtcaagttgctgaccttgaagttcgagattgaaattgagcccctgtttgccagcattgccctctacgatgttaaagaaaggaaaaagatctcagaaaattttcactgtgacctgaactctgaccagttcaaaggatttctgcgagctcacacgccttcagtggccgcatcaagtcaggcgagatctgcagtcttctcagtcacctacccgtcctcagacatctacctggtagtcaagattgaaaaagtcctgcagcagggagagattggagactgtgcagagccctacacggttatcaaagaaagtgatggtggaaagagtaaagaaaagattgaaaaactaaaactccaagctgaatccttctgccagcgtttggggaaataccggatgccctttgcctgggcacccataagcttatcaagcttcttcaatgtctccacccttgagagggaggtaactgatgtggactctgtggttgggagaagctcagtgggtgaacggaggacattggcccaatctagaaggctttctgaaagagccctctccttggaggaaaatggggttggatccaacttcaaaacctccactctgagcgttagcagctttttcaagcaggaaggagatcgccttagcgatgaagacttattcaagtttttagctgactacaaaagatcatcatccttacagagacgagtcaagtcaattccaggcttgctaagactggagatttctacagctccagagatcatcaattgctgtctgactcctgaaatgctgcccgtgaaaccctttcctgaaaaccggacacgcccgcacaaagagattttggaatttccaacacgagaagtatatgtccctcacactgtgtacagaaaccttctctatgtctacccacagaggctgaactttgtaaacaaactagcatcagcccggaacattacaataaagatccagtttatgtgtggagaagatgctagcaatgcgatgccggtcatctttggaaaatccagcgggcctgaatttctgcaggaagtgtacacagctgttacataccataataagtctcctgacttttatgaagaagtgaaaattaagctccccgctaagctcacagtaaatcaccacctcctgttcaccttctaccatatcagctgtcagcagaagcaaggagcctccgtggaaactctcctgggatattcatggctgccaattctcttaaatgaacgtcttcaaactggatcctactgtctcccagttgccttggaaaaattgccacccaactactccatgcattctgctgagaaagtcccattacagaatcctcccattaagtgggctgaaggacataagggagtatttaatattgaagtgcaagctgtttcttctgtacacacccaggacaaccacctggagaagttcttcaccctctgccactccctggagagccaggtgaccttccccatccgcgtgctggatcagaaaatcagcgagatggcgctggagcatgagctgaagctcagcatcatctgcctgaactcctcccgcctggagccgctcgtgctcttcctgcacctggtgctggacaagctcttccagctgtccgtgcagcccatggtcatcgctggccagacagccaacttctcccagtttgccttcgagtccgtggtggccatcgccaacagtctgcacaacagcaaggacctgagcaaggaccagcatgggaggaactgcctgctggcttcctacgtgcactacgtcttccgcctgccagaggtgcaaagggatgtgcccaagtcaggcgctcccactgccctcctagaccctcggagctaccacacgtatggccgcacatcagctgctgctgtgagttcaaagctgctgcaggcccgggtgatgagcagcagtaacccagacctcgcggggacacactccgcagcagacgaggaagtgaagaacatcatgtcttcaaagatcgccgatcgcaactgcagccgaatgtcttactattgctctggcagtagtgatgctccaagttcacctgcagccccaaggccagccagcaaaaagcatttccatgaggagcttgcccttcagatggtggtcagcaccggaatggtgagagaaacagtcttcaagtatgcctggttcttctttgagcttctggtgaaaagcatggcccagcacgtacataacatggacaaacgggacagttttcggaggactcgtttttctgaccgtttcatggatgacataactactattgttaatgtggtcacctcggaaattgcagcccttttagtaaaaccacagaaggaaaatgaacaggcggaaaagatgaacatcagcctggctttcttcttgtatgaccttctctccctcatggatcggggctttgtgtttaacctcatcagacattattgcagccagctgtcagccaagctcagtaaccttccaacgctcatttccatgaggctagagttcctgagaatcctctgtagccatgagcattacctcaatctgaaccttttttttatgaatgctgatactgctccaacatctccttgtccttccatatcttcccagaactcaagctcctgctccagcttccaggaccagaagatcgccagcatgttcgatctgacttccgagtaccgccagcagcacttcctcaccgggctcctcttcacagaactggctgctgccctggatgccgaaggggaaggaatcagcaaagtacaaaggaaagctgtcagtgcaattcacagcctgctaagttctcacgacctggacccacgctgtgtcaaaccagaggtgaaggtcaaaatcgccgccctttacctacctttagttggcatcattttggatgctttgccacagctctgtgactttacagttgcagatactcgcagataccgcaccagtggctcggatgaagaacaagaaggagccggtgccattaaccagaatgtggctctggccatagcagggaataatttcaatttgaaaacaagtggaatagtgctgtcttccttgccctataagcagtacaacatgctgaacgcggacactactcgcaacctcatgatctgcttcctctggatcatgaaaaatgctgatcagagcctcattaggaagtggattgctgacctgccatcaacgcagctcaacaggattttagatctacttttcatctgtgtgttatgttttgagtataagggaaaacagagttctgacaaagtcagtacccaagtcctgcagaagtcaagggatgtcaaggcccggctggaagaggctttgctccgtggggaaggggccagaggggagatgatgcgccgccgggctccagggaacgaccgatttccaggcctaaatgaaaatttgagatggaagaaagagcagacacattggcggcaagctaatgagaagctagataaaacaaaggccgagttagatcaagaagccttgatcagtggcaatctggctacagaagcacatttaatcatcctggatatgcaggaaaacattatccaggcgagctcggctctggactgtaaagacagcctgctgggaggtgttctgagggtgctggtgaattctctgaactgtgatcagagtaccacctacctgactcactgctttgcaacactccgtgctctcatcgccaagtttggagacttactctttgaagaggaggtggaacagtgtttcgacctatgtcaccaagtcctgcaccactgcagcagcagcatggatgtcacccggagccaagcctgtgccaccctttacctcctcatgaggttcagttttggagccaccagtaattttgcaagagtaaagatgcaagtaaccatgtccctggcatctttggtgggaagagcaccagactttaatgaagagcacctgagaagatccttgaggacaattttggcctattcagaagaggacacagccatgcagatgactccttttcccacccaggtggaggaacttctctgtaatctgaatagcatcttatatgacacagtgaaaatgagggaatttcaggaagatcctgagatgcttatggatctcatgtacagaattgccaagagttaccaggcatctcctgatctgcggctgacctggctccagaacatggcagagaaacacaccaagaagaagtgctacacggaggctgccatgtgcctggtgcacgccgctgcgttagtggctgagtatctgagcatgctggaggaccacagctacctgcccgtgggcagtgtcagcttccagaatatttcttccaatgtgctggaggagtctgtggtctctgaggacaccctgtcacctgacgaggatggggtgtgcgcaggccagtacttcaccgagagtggcctggtaggcctcctggagcaggccgcggagctcttcagcacgggaggcttatatgagacagttaatgaggtctacaagctggtcatccccatcctagaagcgcatcgagaattccggaagctgacactcactcacagcaagctgcagagagccttcgacagcatcgttaacaaggatcataagagaatgtttggaacctacttccgagttggtttctttggatccaaatttggggatttggatgaacaggagtttgtctacaaagagcctgcaattaccaagcttcctgagatctcacatagactagaggcattttatggtcaatgttttggtgcagaatttgtggaagtgattaaagactccactcctgtggacaaaaccaagttggatcctaacaaggcctacatacagatcacttttgtggagccctactttgatgagtatgagatgaaagacagggtcacatactttgagaagaatttcaacctccggaggttcatgtacaccaccccgttcaccctggaggggcggcctcggggagagctgcatgagcagtacagaaggaacacagtcctgaccactatgcacgccttcccctacatcaagaccaggatcagcgtcatccagaaggaggagtttgttttgacaccgattgaagttgccattgaagacatgaagaagaagaccctgcagttagcagttgccattaaccaggagccgcctgatgcaaagatgcttcagatggtgctgcaaggctctgtgggagctactgtaaatcagggaccactggaagtagcccaagtgtttttggctgaaattcctgctgatccaaaactctatcgacatcacaacaagttgaggttatgctttaaggaattcatcatgagatgtggtgaagctgtagagaaaaacaagcgtctcatcacggcagaccagagggaatatcagcaggaactcaaaaagaactataacaagctaaaagagaacctcaggccaatgatcgagcggaaaattccagaactgtacaagccaatattcagagttgagagtcaaaagagggactccttccacagatctagtttcaggaaatgtgaaacccagttgtcacagggcagctaagaaaagccatcttcattcgtggagactgtggccctgcaaccctggagaaggacttgctggtacttaaaaaatgggacatttgccacccaggactgactgtacactccctgatcagccagcactctggaagctttgggatcccaggaaccatggaattattcccaaatggactctgaccagatttttgccatactggggggtggcgggatggaggatgggtactcaggcatgactgcgtatttattaaagtgtgtttttccacaatgtaccaaacaaggcataagcagcttctcctgctgactggccaatcactgcccatctgagagatgatttcctctggcccatatttgaatttattggagtaactcaaattgcctgaggaaaaatggaaaaattatccaccagtcgattcaaactgaatttcactctttataggaaggcagggcaaacttgtaggagtacgaaacattttcaataaatctacaaagggaagccttactacaattccaaaaatcatcatggttggaaatttgggaggagattatttgtgaacttgttacccttttggtaatggtggactaattgctgtatagttatttttgttttattattactgttacattaatttaacatgcatttatagaagaatacattcaaagcactgatgtaggagatacacggtacttggagcagtcagccagaaatcacagatactgctttcacttaaatggaaacaattctccgataatgctttgctttttttcttatgtcactcttgtgtactatctatttttctcctctctgggaccaagtttctttttataaagcaataatatctctgttttcatttcagaacattgtgctgtctgtcagcatatgtatatcagctacaaaatatattcaactttgacttcttttgacaaaggactttaggaaaaagaggaacaaagacattatttgagaattaaattatatatttttaatatgactgtgaccttgactgataataaagatgtaataagaattgcaagctaaatgtt

SEQ ID NO: 5955 - DNA, 8890 bp, Homo sapiens
  source 1..8890: mol_type = unassigned DNA; mol_type = unassigned DNA
gttccccgtccgcggcggccctgcaggcgaccccgcgtccccaccggcgggagctcggggaagagcgggcggcggcgctgctgctggcggcggccggctggatgcgagacccgcgcagacccggcggcggacggcggctctcgactccggagagcggatcgcggggcgcaggagcccgatcgcgctggccatggcctccaactttaacgacatagtcaagcagggctacgtgaaaatccgcagcaggaagcttgggattttcagacgatgctggttggttttcaagaaggcttctagcaaaggacccagaaggttagaaaaatttccagatgaaaaggcagcttatttcagaaactttcataaggtaactgaactgcacaatatcaaaaatataaccagactgccccgagagacaaagaagcatgcggtggcaatcatctttcacgatgaaacatcgaagacatttgcctgtgagtcagagctggaggccgaggagtggtgcaagcacctctgcatggagtgtctggggaccaggctcaatgatatcagccttggggagcccgaccttctggccgcaggagtgcagcgggaacagaatgagagattcaacgtgtatcttatgcctacaccaaacctggatatttatggtgaatgcacaatgcagatcactcatgaaaatatctatctctgggatatccacaatgccaaggtcaaactggtgatgtggcctctcagctcactgaggagatacggtcgggactcaacgtggttcacgtttgagtcaggaagaatgtgtgacacaggagaaggactattcacttttcaaacaagggaaggagaaatgatctatcagaaggttcattctgcgacactggccatagctgagcaacatgaaagattaatgctagaaatggaacagaaggcccggcttcagacaagcttgactgaaccaatgacattatccaaatcaatatctcttcctcgcagcgcgtactggcatcacatcactcgtcagaacagcgttggtgaaatctacagtttgcaaggtcatgggtttggttcgtcaaagatgtctcgtgcacagacatttcccagctacgccccagaacagagtgaagaggcccagcagccgttgtcgcggtccagcagctatggattcagctacagctccagcctcatccaatgacacacagagagccgctgttgactagagagacagtctgtcctggacccgtctgtggggtcattaccctctgcctcctggaagaccaattgcagtacaaattgaaatgggtcggctctagccccagtcccattggaaggttaaaaactggagttctgcttccttgattcagtggctaagtcctttatttattgaatttctttgggggaatctatgttttacataaatagaatccaaatcgtatgaacagttatttaaataaacaaaattctttgggtctgacagtaacagaaacctcagcactgggaaaagttgcccacactggggtatgcctgggtgatgggcacctctcactgacctcacagcgcagtccgcccatctgagcacagggtctgtccttagacataatggtgaccctccacaagctctgtggcttttaaagttctgacagggataaatacagtaagctctgcaaatgacatcgtagctgcatataaataaacccagtgacaattaaaggaacatgaaattcagaacacactattaagcagggccctgtagctctactcgtgtgtgtgtgtgcgtgtgtgtgtgtgtgtgtagacaaatggatattgctatatccatctatatataacaagtatatatcaaacatgtgctgagggtgacaggatatgctcacttaaattgttgaaaaccataatttggtgcattaaagttaagattgttatgttgaatagctatttttaaaatagtgctgtaaaaaaaaaaaaaaaaaaggcttcttattagcaaaagtatatgtaatccagtctgttcctaacaagtgtaagcaaaaatgtgagaaggggaacattcagaagcaaaagaaccagtctagctgtcctacacatcatgtcataccctgtctttctggtgagcgtttccttgttgctgacaatgttgctccctgtggccatccatctgagctacgtgaggaggattccatgtgaacgccgatcagcttccatttaaccttgagagaaaagagaggttctaaatgaagaactctttaagaaagaaagaatacacccataaagaactcagctattttgcagtaaagagaagaacaaaatgggtacaggattgtggatatcatagatgctgttctcacacaaccactgggggcttgtaatttactgtgtaaccagaacttgcagggctttattttttcttttactggacacaggttgtctgagattataagaaataaaatagatcaataattttcatcatccctgacactgattacaaacctacagtgtttaaagggaggtagtgaattccacggaaactgagtttggctaattcaggtcaacaaagatatatttgcccttaattctggagttaagtaaaaataaaaattatcctgcctgaatcatctgatgctttgtgcctaagatggttatctctcaaatactctagggtgggtttaaagaacagtgagctcaggtcacgcaagatgaaaacccaggttttttttttcttaataggaaaattttttaaactatccaaattagtctgttgaaagggtaccttttttgctgatctctgatgagttgtcttttcatccctatctgtagcttgagtgcagattgacaattcatttcagtgaattactaccgaataaaagtggttccggatccctcctagataaatgtgcacttacagcaactacctaggctctccaaatcactccactcggtatgaaaaccccatcaagatactaatcgtaagagttaatgtggctgcaaaaaataattatcctaagctttcagggataaaaagaaaattacccaggttctctgcactgtgaattttgctgacacagcggaggagcagatgactggttcctacaactgtacagccttccttgaaatcatagcttttggggttaaacacttgtgaatttcttttgcacatggcatttgcttttgaaatgcctttagtcaaatacaccagagcaactcccagctgagaccatttgagcacagttcctagtggggccacattcagagcaagcctctcgccggctcactcagttgagctgttgcttagacaccacaagtttctacaagggacttatggggaacggccctcaggggtcctggttcacatctcagctttattcatgtgctggaagcacaaacagcgagtccagggagggattctgctaatcagatgagtctgctcttgtgtctctttcttaggagacaaatacctgtatgtaattgcttcaagaactccatttggttctgatcattaccaatgaatataactgaaggagcaccaaagatcaggcataacctcgggccagttcattctgaaaatgatgtcgtaaaaagagtatgtgtgagagaaatctccttcccaagtttttaaccagatctcgtcacaatgaggagaatgctataatctatctcatggtacatttttggagcttaattctagcatactcctccaagtacactcacaattgtagctgagtcaagactgctaaatgaacagataggagaacttatattagactaatatccttgacacgaagcagggttcattgtaataaaaacggcaaacagataaatcttctaccaaaaccaaagatggaaagtcactgcaccagtctcctggaacttcataaaatcaatttcactggagcaaccagaagggtcatggagatgtataccactcgcttgggctcgtaggtttttgactggggatgcctctacactttgtaagtcatttctcccttcaaaaattgtattatatctttaatatatgtgtatttttcaatgcgagggaggaattactatgaaccaaagatatcttttggctccttctgaaagtgactcagtttgaattccattcagatttgtacagataaatagatggtcaccatttctgcatcaggttggaagagaccaatgataaaggaacccaacgtaaggaatagcagttctgaaaatagacaaagcctagaggaggtatctatttcactgagagattacacgaggggacttattttttatgttcccaattttttcttctgataatattaatcaatgtacacatgattgatgcatgatattacacttaaaatgcaggagagtacaaaacaaccttgatccaatagtttcctattctggggggtgggggcagaggcggaaaagaaaacacatctttcacttacttattgaacaaacaataagcactcagaactaatttatttatgcaggttgcaaatatgtatgaagcaataggttctggccactgccacaatttgaaatcaataaaataagaaatatatatttatatatgagggaagatgctgtttgatagagcatgtgaaatcaatggaaacatatttattaaaagtaaacctcacctttttcaccaaatagtaactagagaactagtcctagtatcttgcgtaattcttctctgtcttcattgggaaattatgtttgaaaatctttcatcacctataaaatggtgagcctcttgtactttctattcagtgtagaaagagtggactgataaataactttacattgttggtagtagtttctacagatccagtttattgcatgtcgtatctttattgtagatattaaaaacacatgataaaaattgatgtgtgcccctccttgtttggccagtatcacagaaaactttgtaaaaaagcatggggaccctactccctagattatttgagccatttactaaaattggccattagtgatacagtgaaaacaagctaaggaaatgatattctcctaaaaagttatattccagttttgattattataacacagcacaataaatgggcagtatacgtctaatggaactgagatttaaggctttaacaattcgtgttttaaaatattatattgaagactgcacaaagagaaaattatacatgtttctccaatcctgtgatcatgtctgtaaataccttgcaatttcaaattacttcatccgtcattaactatatgatctcccaaacacagccttctcaaaatcgataaaaatttgccactgaatatgcattaatagctataacaatgggtgacatgccacacaaatttagcttatgcaatttatggggtgtgtgtttgcagactatgaaatgtatgaagtgcagtctcccatggagagaatagagaggcaggatggcaactagtcatgaacgcaacaatttaggttaaatgataaagaatacaatgaaatgtccagagtaacacttggtctctacctttctaacattctaacccaaggccagtgtcatgggcttggctttcttccctgtcgcctcatactgagtatgcaatttacagaggacatctgttgctttatgtcttaaggccactagaggaagtcactacattcccaacaaagatgtgtctttcggcttagtgaaaaacatttaacaagaaacaatgtgtaaccaagtccccacagtaaaatgtgtcttcagaaacatgagaatcacttttatatagccaacctcatttgaattttatcatgaacataaattatcggtgagactggtgtgcggggctggatctgtgagacaagctcacactctcatgtgtgcattctctattaacatatttggaagattgcccacattttctctgcagacctgccacaaatccttaccttcttactgaagaatgtgactattgtagcattcgtgcaattatgccagcagaggaggcactagacagtttatagactcttatggaagttgggcacatttcccaggcaggtggaatgctagctagatctagaagcacccttaaaggtcatgtagaatcaaggtcccactttatgtttcccttgggagaaaactgaaacccatggatgctgtaatttgtttaacggcaaagaaagagccaagaattgtttctcgtagttccagggtcctgatctaggaatgtttccttggctccatggcatctcccagtttgacatagtgggagctgagaaatgccatatggcctcaaaataaataaacccttgtacatttaagtgttttcccagattttcagatgcctctactcttgctgaactcatcaccagctgtatcagtagagaggtgttatggggcaattcattagatttctggtaggtcatgaatggttggtataagctttatttactcatatattgtcatccagttctttgaaattcaatcttatcctaaagtggtagtcaaagtaaaacacattaagtaggtgtttgtgtttagcagtcctactaattcatcacaatcacatagtaattgtgattataatttttggaatctttatcactttctagcactttacggtgtcattatttatggcatttttaacaactttgttgcataattgataacatcagggctacatttttttcatgtgagcctcaagaagcttccattatcaacaagaattggggaaatgacttttttacattataataccttatatattaggtttttcctgataatcttcagtagacaatgatttaaattaactgaagtttaaataagaaatatgttaaaattactaaataatatgaaaaccacattatacttgtaattttcagacacttttctcctaccttaagattttaacatcttgtaaatattaatatttgaaggggagaggaaaaatacatttgtagtagaaatattccctctaacaattctgtttaactagtaagttttttttaagttatcttccatgcctgcttccctagtctgaactccacattccagttgtcagaagaatgaatggatttaaattttctaatcattattttgggcccatgttagcagttgaaacaattaagttcctcactctttcctgcttttaggatgattttagactgtgagcataaaatcaaccctttctgtcagcacagaattgaacatcgaatggagcaaggtctacactctcagcctgtagctgtgctaatgttaggattgaattgttctattaattccctcaagagacccacagcctcaaaagagttgcttattatcagatgtccgaaattcagaaacccaaagtcaggcaaagaaggaaactgagataatgatttaatttttttaagtcactgcaggatttctctcaaagaaaacatctgaaaatggttgagaaagtagttccagatcattaactattttacagagggactgaaagccagggaaaataaagaacagaatgatagtagtatcttgatattaaatttgcatcagaaatgagcaaaatatgtcaatatgaaataatttgaaatcaaattcagattcacatgtatagtgcatagttcaagaaataatgcttactcttgtaaaaaaaaaaaatatatatatatgtatcagcaggtagagtgtgggagctccaactttgttgtgaaagctgataacagagtatgattctttccagttacaaaatactgtattactttagttatagcaagcagtacataaatgacatcaacaactcaggctgctccctgacataaaagccagttccatctttactgcagatgacaggagactttccaagacctgcagaggccccctccaccccaaccttagtgcatgctcacacacacacacacacacacacacacacacacacacacacacatttttggcttttgacccactctgtgtgttccactgaagttatcttttccttaatagattcacacagaattaccccatcctgcaaaatccttatccctatgaatctctaaaatatattaaataatgtgttatatatttgctttttgtaaatctttatttaattaatttatatatactttgtgaagtcttatactgtacatcataaagcgatgtcatctgtagttggttcaatataatgtttatgatcattttgataagaaataactttggacattaggcccttgttaagaaataaaacacccattataaatttgcttctgttggaaaatacatgatttggcatacttcatttttagtaacaatctattctagataaatgataatttggggacatctgtacttaaaaactagctgaactacgttttgggatgagatgcaaagcaacagctgtccctggaactgaaatgtgaatttctagcagaacagaaaatattataataatgaggcaataataaaattaggaaattaaattatttttaaatctgtctgtgtgatttttccccttggtaaaaatacatgaaatacataattgaaaaattaccttcttctgaagtcgtagtttttaatcttaaccatcaataaataaacctattgttaacaatgtcttattcataattctaaaaaatttacaaatgatattgctatgaggttgtgcactattaaagtttgctccatcacttaaaggtaaagcagttcaaaaatactactttacatcacaactttgcatggctgagattttgaacaactaaattgatggttttacccacaagttatttcataaagctaacactgtaatattacttggttttcttatacttttgttatcatgtgatgaaatgtaactatgtaattaaacaaaattctgacaatcatattctgctaatgtttaaaatgttacttattccttcacttattagcttgctattttgaaaataaagtgaaagaaggccctttattaaatgaaa

SEQ ID NO: 5956 - DNA, 502 bp, Homo sapiens
  source 1..502: mol_type = unassigned DNA; mol_type = unassigned DNA
ccatttgggagcctttagaaataaaactgctatagatattcatgtgcaggatttatgtggacatgttttcatttatccaagataaatgctcaaggggctaattgctgattcttaaggaccctggaagtcccacagcttgcaaattctaaactgctagttgaaagcacgtcacttccagtaggtgaccccttaagtccatgaagatgcaaacaaacagccaagagatctgaaagtaaatggatttcatcaggctaaacaagagctggaggccgaggagtggtgcaagcacctctgcatggagtgtctggggaccaggctcaatgatatcagccttggggagcccgaccttctggccgcaggagtgcagcgggaacagaatgagagattcaacgtgtatcttatgcctacaccaaacctggatatttatggtgaatgcacaatgcagatcactcatgaaaatatctatctctgggatatccacaatgccaaggtcaaactggtg

SEQ ID NO: 5957 - DNA, 529 bp, Homo sapiens
  source 1..529: mol_type = unassigned DNA; mol_type = unassigned DNA
tttagaaataaaactgctatagatattcatgtgcaggatttatgtggacatgttttcatttatccaagataaatgctcaaggggctaattgctgattcttaagagctggaggccgaggagtggtgcaagcacctctgcatggagtgtctggggaccaggctcaatgatatcagccttggggagcccgaccttctggccgcaggagtgcagcgggaacagaatgagagattcaacgtgtatcttatgcctacaccaaacctggatatttatggtgaatgcacaatgcagatcactcatgaaaatatctatctctgggatatccacaatgccaaggtcaaactggtgatgtggcctctcagctcactgaggagatacggtcgggactcaacgtggttcacgtttgagtcaggaagaatgtgtgacacaggagaaggactattcacttttcaaacaagggaaggagaaatgatctatcagaaggttcattctgcgacactggccatagctgagcaacatgaaagattaatgc

SEQ ID NO: 5958 - DNA, 506 bp, Homo sapiens
  source 1..506: mol_type = unassigned DNA; mol_type = unassigned DNA
agctggaggccgaggagtggtgcaagcacctctgcatggagtgtctggggaccaggctcaatgatatcagccttggggagcccgaccttctggccgcaggagtgcagcgggaacagaatgagagattcaacgtgtatcttatgcctacaccaaacctggatatttatggtgaatgcacaatgcagatcactcatgaaaatatctatctctgggatatccacaatgccaaggtcaaactggtgatgtggcctctcagctcactgaggagatacggtcgggactcaacgtggttcacgtttgagtcaggaagaatgtgtgacacaggagaaggactattcacttttcaaacaagggaaggagaaatgatctatcagaaggttcattctgcgacactggccatagctgagcaacatgaaagattaatgctagaaatggaacagaaggcccgggtaaggccccttccttggtaacctatcagcttggaaatgaatgtcactgggatctga

SEQ ID NO: 5959 - DNA, 417 bp, Homo sapiens
  source 1..417: mol_type = unassigned DNA; mol_type = unassigned DNA
gactattcacttttcaaacaagggaaggagaaatgatctatcagaaggttcattctgcgacactggccatagctgagcaacatgaaagattaatgctagaaatggaacagaaggcccggcttcagacaagcttgactgaaccaatgacattatccaaatcaatatctcttcctcgcagcgcgtactggcatcacatcactcgtcagaacagcgttggtgaaatctacagtttgcaaggaaatcatgaaaatcggcactccgatttaacaggaaagagttgcaagaaatccgagaacagatttcttgaagaaaatgcacccttggttatgtatggcatcactcaccatctgttcatggatacttctacatgcaaagttgtacatgacttggaataaaccagctctagttttatcatca

SEQ ID NO: 5960 - DNA, 623 bp, Homo sapiens
  source 1..623: mol_type = unassigned DNA
gacccgcgcggtggggaagagccgctgccgctggttctccggctcttcctcggcggttctggctcccggccgcgccgcagccctgcccagtctctctcccccagcccggagggctcctccgcgccgcacgtgagcgcgcccgccaacagggccactgccgcgatacttttctgctgtgagaatgtaagatggatccagaagagcaggagctcttaaatgattacagatacagaagctactcttcagtgattgaaaaggctttgagaaattttgagtcctcgagtgaatgggcggatctcatatcttcacttggcaaactcaacaaggctcttcagagtaacctgaggtactccttgttgccaagacggctcctcatcagcaaaagattagctcagtgtttgcaccctgccctgcccagtggtgtccacttaaaagctctggaaacctacgagattatctttaaaatcgtggggaccaaatggctggccaaggacttgtttctgtacagctgcgggttatttcctctcctggcacacgcggcggtgtcggtgaggccggtgctgctcaccctgtacgagaagtacttcctcccactgcagaagctgctcctgcccagtctgcag

SEQ ID NO: 5961 - DNA, 7685 bp, Homo sapiens
  source 1..7685: mol_type = unassigned DNA; mol_type = unassigned DNA
ttcatctcccacagtgcctggcccagaagccttgctaaatatttgaacaggattgcccaatacttttctgctgtgagaatgtaagatggatccagaagagcaggagctcttaaatgattacagatacagaagctactcttcagtgattgaaaaggctttgagaaattttgagtcctcgagtgaatgggcggatctcatatcttcacttggcaaactcaacaaggctcttcagagtaacctgaggtactccttgttgccaagacggctcctcatcagcaaaagattagctcagtgtttgcaccctgccctgcccagtggtgtccacttaaaagctctggaaacctacgagattatctttaaaatcgtggggaccaaatggctggccaaggacttgtttctgtacagctgcgggttatttcctctcctggcacacgcggcggtgtcggtgaggccggtgctgctcaccctgtacgagaagtacttcctcccactgcagaagctgctcctgcccagtctgcaggccttcatcgtgggcctgctgcccggccttgaagagggctccgagatctccgacagaacggatgctctgctcctgagactgtcgctggtggttggcaaagaggtgttttacaccgccctctgggggagcgtcctggccagcccgtccatccgcctccctgcctcagtcttcgtggtgggccacatcaacagggatgcccccggccgggagcagaagtacatgctggggaccaatcaccaactcacggtgaagtctttgcgtgcctccctgttggactcaaatgttcttgtgcaaagaaataatctggaaatcgttctgtttttcttcccattttatacctgtctggattccaatgagagagccatccccctcctcagatctgacatcgtgcgcattctctcagccgccacccagaccctactgagaagggacatgtccctgaacagaagactgtatgcatggttactaggctcagacataaaaggaaataccgttgtgccagaatctgaaatctcaaattcttatgaagaccagtcgtcttatttttttgaaaaatactccaaggatcttttagttgagggtttggctgagatattgcatcagaagttcatagatgctgacgtggaggaacgccatcatgcatacctgaagccttttcgcgtcctcatcagtctgcttgacaagccagaaatagggcctcaagtggttgggaatttgtttctcgaagtcatcagggccttttattcttactgcagagatgcccttggctctgatcttaaacttagctacacccagagtggaaattcgctgataagtgcaatcaaggaaaacagaaatgcctctgagattgtcaaaacggtaaatttgctgataacttctctaagcacagactttctctgggattatatgacaaggtgttttgaggaatgctttagaccagtgaagcagcgttacagcgtgaggaacagcgtcagccctccccccacggtctcggagctctgcgccctcctggtcttcctgctggatgtcattcctttggaactttactctgaggtgcaaacccagtatctccctcaggtgctcggctgcctggtgcagcctcttgctgaggacatggaggccttaagtttacctgaactcacgcatgccttgaagacgtgtttcaaggtgctcagcaaagtccagatgcctccttcctacctcgacacggagtccaccagcggaacctcgagtccagtaaaaggtgaaaacggcaaaataattttggaaacaaaggcagtgattcccggtgacgaagatgcttcgtttccccctctgaagtctgaggacagtgggatcgggctcagtgcctcgtcaccggagctctctgagcacttgagggttcctcgagtttctctggaaagggacgacgtttggaagaagggcgggagcatgcagaggacgtttctttgcatccaagagctaatcgccaactttgccagcaagaacatttttggagtacagctgacagcgtcaggagaagaaagcaagtccgaggagcctgcagggaagagggacagggatgggacgcagagcctggcagccaatgattccagcaggaagaactcttgggagcccaagcccatcactgtgcctcagttcaagcagatgctgtcagacttgttcacagcacgagggtctccattcaagacaaaaagttcagagtcaccatcgtcttcgcccagcagccctgccaggaaaaacgggggagaatgggatgttgagaaggtggtcattgacctggggggttccagggaggaacgcagggaggcctttgccgccgcctgccacctgctgctggattgtgccactttccctgtctacctgtccgaggaagagaccgagcagctctgtgcaacgctcttccagctgccaggagccggtgattccagttttccatcttggctgaagtccctcatgactatttgctgctgtgtgactgactgctacctccagaacgtggccatttccactctgctggaagtgataaaccattcccagtccctggcgcttgtcattgaagacaagatgaaacgctataagagctctggacacaaccctttttttggcaagctgcagatggtgacggttcctcccattgctccagggatattgaaagtcattgcagagaaaacagatttctatcagagggtggctcgtgtgctttggaatcagctgaacaaagagacccgggagcatcacgtcacctgcgtagaattgttctaccggctgcactgcctggcccctacggccaacatctgcgaggacatcatctgccatgccctcctggaccctgacaagggaacaaggctggaagctctgtttagattttccgtgatctggcatctgacaagagagatccaaggcagtcgagtaacatctcacaatcgctcctttgataggtccttgtttgtcgtgctggacagcctggcctgcacggatggtgccatcggtgcggcagcccagggctggctggtgcgtgcgctctccctcggggacgtggctcgcatcctcgaacccgtgctcctgctgctgctgcagccaaaaacccagagaacctccatccactgcctcaagcaggagaactcggccgatgacttgcaccgttggtttaacaggaagaaaacctctttcagagaggcatgcgcagtgcccgagcctcaggagagcggctctgaagagcacctgcctctgagccagttcaccacagtggaccgtgaagccatttgggccgaagtggagaaggagcccgagaagtacccgctgcgaggcgagctgagcgaggaagagctgccctactacgtggagcttccagacaggacggcccacggcgccccggacagcagcgagcacaccgagtctgcagatacaagctcctgccacacggacagcgagaacacgtcctccttctcctccccttcccacgacctgcaggagctgagcaacgaagagaactgctgtgcacccatccccatggggggcagggcgtaccccaagcgctcggccctgctggcggccttccagtcagaaagcttcaaggctggggccaagttaagcctggtgcgggtggactcggacaagacgcaggcttctgagtcgttctccagcgacgaggaggcggacttggagctccaggccctcaccacatccaggctgctaaagcagcagcgggaaaggcaggaggccgtcgaggccttgttcaagcacatcctgctctacctgcagccctacgactctcggcgggtcctctatgccttctcggtgctggaggctgtgctcaaaaccaaccctaaggaattcatcgaggctgtgtccaggactagcatggataccagctccaccgcgcacctcaacctcatctccaacctcctcgctcgccaccaggaggccctcattggccagagtttctacggaaagctccagacccaggtccccaacgtgtgcccccactctctgctcctggagctgctcacctacctctgcctgagcttcctgcgctcctactacccttgctatttgaaggtctcgcaccgagacattctcggcaaccgggacgtgcaggtcaaaagtgtcgaggttttgatcaggataatgatgcagctggtctcagtggccaagtcttcggaagggaagaacgtggagttcatccacagcttgctgcagaggtgcaaagttcaggagtttgtcctgctctccctgtcggcgtccatgtacacgagccagaagcgctacgggctggccaccgcccaccacggcagggccctgccagaggacagcctctttgaggagagtctcattaacttgggtcaggaccagatctggagtgagcacccgctgcagattgagctgctgaagctgctgcaggtgctgattgtcttggaacaccacctgggtcgggcccatgaggaggcggaaaaccagcccgacctgtcccgggagtggcagagagccctgaacttccagcaggccatcagcgccctgcagtacgtgcagccccaccccctcacctcccagggtcttctggtctctgcggtggtgaggggtctgcagcccgcctacggttacggcatgcatccggcctgggtgagcttggtcacgcattccttgccctacttcggaaagtccctgggctggacggtgacaccctttgttgtccagatttgcaaaaacttggatgacttggtcaagcagtatgaaagcgaatctgtgaagctctctgtcagcacaacctccaagagggaaaacatttctccagattatccactcacccttctagaaggtctaacgaccattagtcatttttgtcttttggaacaagccaaccaaaacaaaaagaccatggctgcaggtgatcctgccaacttgaggaatgccagaaatgccattttggaagagctgcctcgaactgttaacaccatggcccttctctggaatgttctcagaaaggaggagactcaaaagagacctgtcgatctcctaggggccacgaagggatcctcttccgtttactttaaaaccaccaaaaccataagacaaaaaattttagacttcttaaaccccttgacggcccatcttggggttcagttgacagcggctgttgcggcagtgtggagcagaaagaaagcccagcgtcacagtaagatgaagattatcccaacggcaagtgcatcccagctaacccttgtcgacttggtgtgtgcactcagcaccctgcagactgacacgctgctgcacctggtgaaggaggtggtgaagaggccaccccaagtcaaagggggtgatgagaaatcgcccctagtggacattcctgtgttgcagttttgctatgcttttctccaaaggctcccagtaccagccttgcaagagaacttttcttcactgttgggagtattgaaagagtctgtacagttgaatctagccccacctgggtattttctgcttctcagcatgctgaatgactttgtaacaagaactcccaacctggaaaacaagaaggaccaaaaagacctgcaggaaatcactcagaaaatcctagaagctgtggggaacattgccggctcttccttggagcaaaccagctggctaagcagaaacctggaagtgaaggcccaacctcaggcctctctagaagaatctgatgctgaggaggacctgtatgatgctgctgcagcttcagcaatggtgtcttcatccgccccgtcggtgtacagcgtgcaagccctctctctcctggcagaggtactggcttccctcctggacatggtttatcgaagtgatgagaaggagaaagctgtgccgttaatctcccgtctgctttactatgtttttccatacttacgcaaccacagtgcctacaatgctcccagcttccgggctggcgctcagctgctgagctccctgagtggctatgcctacacaaagcgagcctggaggaaggaggtcctggagctgtttctcgaccccgctttctttcagatggatacttcctgtgttcattggaagtccattattgaccatcttttgactcatgagaaaacaatgtttaaggatttaatgaacatgcagagcagttctttgaaactattctcaagttttgaacagaaagccatgctgttaaagcgccaggcttttgctgtcttcagtggagaacttgatcaataccacctttaccttccactgatacaagaacgcctgacagacaatctcagagttggacagacatccatagttgctgctcagatgtttctttttttcagagttttgctgctaagaatatctcctcaacatttgacttcattgtggccaataatggtctctgaattgattcagacattcacacagcttgaagaagatctaaaagatgaagatgagtcattgagaagcaccaacaaagtaaacagaacgaaagtttcagtcccggatgcaaatggaccctcagtgggggagataccccagagtgaactcatcttgtatttatcagcttgcaaattcttggacacagcgctttcttttccacctgacaagatgccattatttcaaatttataggtgggcatttattccagaagtggacacagagggccctgccttcctgtcggatgtagaggagaatcaccaagaatgcaaaccccacactgtcaggattctagaacttctaaaattaaagtttggggaaatcagtagctctgatgagatcaccatgaagagtgaattcccgcttctgcgccaacattctgtttccagcatcaggcagttgatgccattcttcatgactctaaatggtgcatttaagacccagagacagctgcctgctgatagcccaggaactccattcttggactttcctgtcacagatagcccaaggatcttaaaacaactggaagaatgcatcgaatatgattttctggaacatccagaatgttaaccatgtgagagagaatatgtttaatccatgtattggtactttactgaaaaccaggttatattctaaagaagaaagaaggcaggatagtgcttttgaacaagcctatttccattttgaaagtagatttcaggctaggtgcggtggctcacacctgtaatctcagcactttgggaggccaaggcaggcagatcacttgaggtcaggagttcgagaccagcctgaccaacatggtgagaccctgtctctactaaaaatacaaaaattagctgggtgtggtggcggcgcctgtaatcccagctacttgggaggctaaggcatgagaattgcttgaacccaggaggtggaggctgcagtgagccgagatcacgacactgcactccagctgtgtgacagaatgagaccatctccaaaaaaaaaaaaaagtagatttcagataatttactgttcagcaacaggacacacctccctaaatgccttgtaatatatttgaatctgattctgcatttcttcctcaatttatgtaatgaaaataaaattaatatatcatctaacagtagcacaaaatttgtaatatgaagtaaagtatgaagataatgaagaagttgttttctttgttgaagcagttatatgggtctttctcagtatatttctcttttctctaaaagtttaaacttattaaaagaatgttatttttaacctttca

SEQ ID NO: 5962 - DNA, 400 bp, Homo sapiens
  source 1..400: mol_type = unassigned DNA; mol_type = unassigned DNA
gcggatctcatatcttcacttggcaaactcaacaagaacggatgctctgctcctgagactgtcgctggtggttggcaaagaggtgttttacaccgccctctgggggagcgtcctggccagcccgtccatccgcctccctgcctcagtcttcgtggtgggccacatcaacagggatgcccccggccgggagcagaagtacatgctggggaccaatcaccaactcacggtgaagtctttgcgtgcctccctgttggactcaaatgttcttgtgcaaagaaataatctggaaatcgttctgtttttcttcccattttatacctgtctggattccaatgagagagccatccccctcctcagatctgacatcgtgcgcattctctcagccgccacccagacccta

SEQ ID NO: 5963 - DNA, 2178 bp, Homo sapiens
  source 1..2178: mol_type = unassigned DNA; mol_type = unassigned DNA
ctgctgaagctgctgcaggtgctgattgtcttggaacaccacctgggtcgggcccatgaggaggcggaaaaccagcccgacctgtcccgggagtggcagagagccctgaacttccagcaggccatcagcgccctgcagtacgtgcagccccaccccctcacctcccagggtcttctggtctctgcggtggtgaggggtctgcagcccgcctacggttacggcatgcatccggcctgggtgagcttggtcacgcattccttgccctacttcggaaagtccctgggctggacggtgacaccctttgttgtccagatttgcaaaaacttggatgacttggtcaagcagtatgaaagcgaatctgtgaagctctctgtcagcacaacctccaagagggaaaacatttctccagattatccactcacccttctagaaggtctaacgaccattagtcatttttgtcttttggaacaagccaaccaaaacaaaaagaccatggctgcaggtgatcctgccaacttgaggaatgccagaaatgccattttggaagagctgcctcgaactgttaacaccatggcccttctctggaatgttctcagaaaggaggagactcaaaagagacctgtcgatctcctaggggccacgaagggatcctcttccgtttactttaaaaccaccaaaaccataagacaaaaaattttagacttcttaaaccccttgacggcccatcttggggttcagttgacagcggctgttgcggcagtgtggagcagaaagaaagcccagcgtcacagtaagatgaagattatcccaacggcaagtgcatcccagctaacccttgtcgacttggtgtgtgcactcagcaccctgcagactgacacgctgctgcacctggtgaaggaggtggtgaagaggccaccccaagtcaaagggggtgatgagaaatcgcccctagtggacattcctgtgttgcagttttgctatgcttttctccaaaggtaatacagtcccccgtcctccaaaaacttccttaaatacagatgctattgcagtgagcatgcataataaatatctggttttatttctagactactagagagccattgttcagaaaatatcttaaagttgtcataatttcttcccaaggtattgatctatgcttttccttctccagagagttaacatcttaaaatctgtgcagcgtactttgaacactttatatgagcgaagctttatgtgaggcctgttaaactttaaaaggcttggatttgcattaaattgatacagaaaaagaaaaaaaccacatatagggaagtgttaaagacctcttttagaaaaaggagaaatgggccaggcgcggtggctcacacctgcaatcccagcactttgggaggtggaggcaggcggatcacttgaggccaggagtttgagaccagcctagtcaacatggtgaaaccctatctctactaaaaatacaaaaattagtccggcatggtggcgtgcgcctgtaatcccagctactcgggaggctgaggcaggagaattgcatgaacccaggaggcggaggttgcagcgagccaagacctcaccactgctctccagcctgggtgacagagcaaggctctgtctcaaaaaaaaaaaaaaaaaaaaggcaaaatgattgtttctggtggcgttctcagtgtgccttcccatgttttatgtggagaggtatctgctttgatttgctaagttaatatatgtattaggtgtctcagctaagagagcattaaaggggattccgcaggtttttccccatggatgaaaaagaagctttactggacctcattcagatcttacaatggctgcatcccaggtgcagctctgtgttgcagaaaatgagggtgaggtggctgggtgcggtggctcaacgcctgtaatcccagcactttgggaggctagagtgggtgagtcacttgaggccaggagtttgagaccagcctggccaacgtggtaaaaccctatgtctactaaaactacaaaaaattagccagggcttggtggcagcatgcctgtagtcccagctactcgggaagctgaggcaggtgaatcacttgaacccaggaggcagaggttgcagtgagctgagatcacaccactgcactccaggctgggggacagaatgagactctatctcaaaaa

SEQ ID NO: 5964 - DNA, 1138 bp, Homo sapiens
  source 1..1138: mol_type = unassigned DNA; mol_type = unassigned DNA
atggcgactgtcattcacaaccccctgaaagcgctcggggaccagttctacaaggaagccattgagcactgccggagttacaactcacggctgtgtgcagagcgcagcgtgcgtcttcccttcctggactcacagactggggtggcccagaacaactgctacatctggatggagaagaggcaccgaggcccaggccttgccccgggccagctgtatacataccctgcccgctgctggcgcaagaagagacgattgcacccacctgaagatccaaaactgcggctgctggagataaaacctgaagtggagcttcccctgaagaaggatgggttcacctcagagagcaccacgctggaagccttgctccgtggcgagggggttgagaagaaggtggatgccagggaggaggaaagcatccaggaaatacagagggttttggaaaatgatgaaaatgtagaagaagggaatgaagaagaggatttggaagaggatattcccaagcgaaagaacaggactagaggacgggctcgcggctctgcagggggcaggaggaggcacgacgccgcctctcaggaagaccacgacaaaccttacgtctgtgacatctgtggcaagcgctacaagaaccgaccggggctcagctaccactatgctcacactcacctggccagcgaggagggggatgaagctcaagaccaggagactcggtccccacccaaccacagaaatgagaaccacaggccccagaaaggaccggatggaacagtcattcccaataactactgtgacttctgcttggggggctccaacatgaacaagaagagtgggcggcctgaagagctggtgtcctgcgcagactgtggacgctctggtcacccaacctgcctgcagtttaccctgaacatgaccgaggctgtcaagacctacaagtggcagtgcatagagtgcaaatcctgtatcctctgtgggacctcagagaatgatgaccagctactcttctgcgatgactgtgaccgaggctatcacatgtactgtttaaatcccccggtggctgagcccccagaaggaagctggagctgccacttatgctgggaactgctcaaagagaaagcctcagcctttggctgccaggcctagg

SEQ ID NO: 5965 - DNA, 3755 bp, Homo sapiens
  source 1..3755: mol_type = unassigned DNA; mol_type = unassigned DNA
atatttctgaggtggccctttgggagcaaaaagaaacattacatttacaaaagtaaacattttggccccacatagaaaagggcccctaccagcatagtctcttgttagaaaactcttcttgggcaaaaagaatggaaaaagagggttttggaaaatgatgaaaatgtagaagaagggaatgaagaagaggatttggaagaggatattcccaagcgaaagaacaggactagaggacgggctcgcggctctgcagggggcaggaggaggcacgacgccgcctctcaggaagaccacgacaaaccttacgtctgtgacatctgtggcaagcgctacaagaaccgaccggggctcagctaccactatgctcacactcacctggccagcgaggagggggatgaagctcaagaccaggagactcggtccccacccaaccacagaaatgagaaccacaggccccagaaaggaccggatggaacagtcattcccaataactactgtgacttctgcttggggggctccaacatgaacaagaagagtgggcggcctgaagagctggtgtcctgcgcagactgtggacgctctgctcatttgggaggagaaggcaggaaggagaaggaggcagcggccgcagcacgtaccacggaggacttattcggttccacgtcagaaagtgacacgtcaactttccacggctttgatgaggacgatttggaagagcctcgctcctgtcgaggacgccgcagtggccggggttcgcccacagcagataaaaagggcagttgctaaacccacggaacagactctctgggcaattagccatccccctctgactttggtcattgtgctggttctgatatatattttttttaatgaaaggcaactttagattttccctctatccttgctttttttcccttcacctcccacgtgtccctccatccctccccccacccctctgttttgggtatgtacaacagaagcacaaactactgaaacaaaacaaaacagcagaatgagcgttcttccgagagatggcatcgtgatgcgctatttattttccatagaaataggaagttagacggattgtctcttttctgaggggagggggtctttttgacaggagcagagttgatgtcctcaattttcatatttattggcaaaaggaagagaagaggaactttgggttggaaacaaagaaccaataacattaaaacattattatttatatattctagctgttattagaatcagactttttttgcgagagagagagagagagagagagaagggaaatcaaagaaatcgaagcaatatcctgtttagaggcaagccgcccggtggggagaatttcctcaatgggagacggttgcactattctgtgccccacggagtttgcggctccccgcggcagacccctccctcattctcctccctgacctttccatcttcctctctgcttgcgagaaaatgtcagtagttccagagaagtcggggtgcctatgcctggcctccctccacacctgggccctgaccagccgcctcctgggctcctcctcctccgtcagtagagctgctgttttgttattgctggtttttcctcactttcctcctggcaaagaacgacttccaaatgcagggatggaatataagcagaacgtcatgggctcagcagtgactccaccacccgaggccgaggccgtgcttctggaagatagaaggagacatcatcgtgtgtttcccctccccttgcccctgttaagaaacgtatcaatacccattggatgatcaaggctaccgtatttcttctatttttttttatagtgcctgccaggcactttgttttatgtttccaatagcacttcctgaaataaaccaaagcaacactgctcaaggcccctggggcgatggagaaggccacccacctcactgacagtcccaagaatgaccggctgcgaggtcctagtcaaaagtcaacattatgacctggggactccagcatccttcaagcaagccatttccgaagaaggtgaaaagaagccaggatgattggcacctcctcctcctcctcctcttcttcctcttcccttgcccagccccctcctgtgcgtgtgtttcagacaacacaggagccagcacaggagtggaaaatcctgcagcgcaactcagctcagcccacagaagccttgggaatggcctcagtttgtgcaataagaagattttttttttctttttaaatcttcattatattttctttgattgtctgtgagaaagtacccaggtccgcctggaattactctacagtagaaataactgaacacaaacaaactgatggaaaaaaagagttaactattttatttatttcaatatttaaaaggaaaaaagtgctgacatggcacagtatttttgtttaaagtacctcctacttcaaaagttaagcgcaattttgtgaagacatgaaatcataagagtacttaatgtaaaataaaagactgcatattaactctaaagaaaaatgccccacattttaaataagaaaataaagatcaactctgctctctcaggctttttaaaaagccattcatgtatgtgctttaggtatttttatttctgcgagttggatgtggtaagtgaggagtgctcagtttttttttcctccttcaaaagtctattgaaagtgttggtgatgttaaatgattgtgtgttaagatttgactgaaataacttagccacaaatcagcagtttcccccaccctcattgccccctcaccccaggcaagccccttttatctgaatgtcagaagcagcctgcctcctagttatcatgtctgatgaggtctagctcaggaaggaattccatctattgatggaatatatcccctcaagttcaatagattcgaacacagagagctttgtttaaaataatgcagcaaaaaaaaaaaaaaaaaaaaagcaaaaataaaagcatcagctgaggtgatattagttcagtcacctaacaactcctagaagagatgaggaaagggaaccttctgctgagctggcttctggggcctgagcttccagagctgtccccaagggctaggaaggccgacctgaaggatgagaacctcaaattcagttgctggtgggagccaaggaagacggcgggtgttctaacatggccctttctggctgagctggcggaagtgggcgttttggccgatgggatgtatctcggcgctgtgtctgtggcccagcaaaggtgcagggctgactggctgagccactgggttctacccgcaggctccccactgcactgggctttcacacagccatgctcttgggtttccctcccttgtaagcagagtcataataacacacgaatagtctaaggctgggtattctggtcagcagaggtccttgagtcacagtgttactgaaatggttctgagcctgagaatctctttggcctctgaaagggcagggcaggtgggcaccgacttcctgccagtcctttcaggtttcctgttcaaagccagtcctgttggtggaggggatcaccgagagtgtctgtatcattttgtagcccttttctctgacgttttctggtagaaaatgtcccttgtcaaaatgctaataattatcataataatctgctttccaaccaactcccacaagtgacaacctgtgtagaactgtgataaaggtttgcataatgtagggtttgtaccaagtgtgtgtaagtttctgttaaataaaaagtctgtttccaatgc

SEQ ID NO: 5966 - DNA, 3687 bp, Homo sapiens
  source 1..3687: mol_type = unassigned DNA; mol_type = unassigned DNA
attctcgtcttcacccctggccactcctggagttgaaaaccaggttcgctcccggggacggtagggggttcctaacgcaaaggaatgcacagggagaatcggacgtgtttgcgccagctcgtcgcccatcagaaatagggaaaggggtaggaaggccccaggtttcaaatatatttatatgaaagctgccgttaagaggacgttggaagctgaggctgatcagataggagctcctggcttcagttctggctcggaagctcggatacactgcgcttgaacgccacagcgtttcacccaagaaagaaaatgttttatggcagaataaatgggcgtaacttcgccgcatcctcgctgccggttgctttcgctgcaacaccgctgatgctgtttctaccgaacccacaactgattttcagtttccccatttccagccgaaatcacataaccgggctgatgccacctggtaaactcaagttagagaacctatttcacatgtgcaccaggctcggggaccagttctacaaggaagccattgagcactgccggagttacaactcacggctgtgtgcagagcgcagcgtgcgtcttcccttcctggactcacagactggggtggcccagaacaactgctacatctggatggagaagaggcaccgaggcccaggccttgccccgggccagctgtatacataccctgcccgctgctggcgcaagaagagacgattgcacccacctgaagatccaaaactgcggctgctggagataaaacctgaagtggagcttcccctgaagaaggatgggttcacctcagagagcaccacgctggaagccttgctccgtggcgagggggttgagaagaaggtggatgccagggaggaggaaagcatccaggaaatacagagggttttggaaaatgatgaaaatgtagaagaagggaatgaagaagaggatttggaagaggatattcccaagcgaaagaacaggactagaggacgggctcgcggctctgcagggggcaggaggaggcacgacgccgcctctcaggaagaccacgacaaaccttacgtctgtgacatctgtggcaagcgctacaagaaccgaccggggctcagctaccactatgctcacactcacctggccagcgaggagggggatgaagctcaagaccaggagactcggtccccacccaaccacagaaatgagaaccacaggccccagaaaggaccggatggaacagtcattcccaataactactgtgacttctgcttggggggctccaacatgaacaagaagagtgggcggcctgaagagctggtgtcctgcgcagactgtggacgctctgctcatttgggaggagaaggcaggaaggagaaggaggcagcggccgcagcacgtaccacggaggacttattcggttccacgtcagaaagtgacacgtcaactttccacggctttgatgaggacgatttggaagagcctcgctcctgtcgaggacgccgcagtggccggggttcgcccacagcagataaaaagggcagttgctaaacccacggaacagactctctgggcaattagccatccccctctgactttggtcattgtgctggttctgatatatattttttttaatgaaaggcaactttagattttccctctatccttgctttttttcccttcacctcccacgtgtccctccatccctccccccacccctctgttttgggtatgtacaacagaagcacaaactactgaaacaaaacaaaacagcagaatgagcgttcttccgagagatggcatcgtgatgcgctatttattttccatagaaataggaagttagacggattgtctcttttctgaggggagggggtctttttgacaggagcagagttgatgtcctcaattttcatatttattggcaaaaggaagagaagaggaactttgggttggaaacaaagaaccaataacattaaaacattattatttatatattctagctgttattagaatcagactttttttgcgagagagagagagagagagagagaagggaaatcaaagaaatcgaagcaatatcctgtttagaggcaagccgcccggtggggagaatttcctcaatgggagacggttgcactattctgtgccccacggagtttgcggctccccgcggcagacccctccctcattctcctccctgacctttccatcttcctctctgcttgcgagaaaatgtcagtagttccagagaagtcggggtgcctatgcctggcctccctccacacctgggccctgaccagccgcctcctgggctcctcctcctccgtcagtagagctgctgttttgttattgctggtttttcctcactttcctcctggcaaagaacgacttccaaatgcagggatggaatataagcagaacgtcatgggctcagcagtgactccaccacccgaggccgaggccgtgcttctggaagatagaaggagacatcatcgtgtgtttcccctccccttgcccctgttaagaaacgtatcaatacccattggatgatcaaggctaccgtatttcttctatttttttttatagtgcctgccaggcactttgttttatgtttccaatagcacttcctgaaataaaccaaagcaacactgctcaaggcccctggggcgatggagaaggccacccacctcactgacagtcccaagaatgaccggctgcgaggtcctagtcaaaagtcaacattatgacctggggactccagcatccttcaagcaagccatttccgaagaaggtgaaaagaagccaggatgattggcacctcctcctcctcctcctcttcttcctcttcccttgcccagccccctcctgtgcgtgtgtttcagacaacacaggagccagcacaggagtggaaaatcctgcagcgcaactcagctcagcccacagaagccttgggaatggcctcagtttgtgcaataagaagattttttttttctttttaaatcttcattatattttctttgattgtctgtgagaaagtacccaggtccgcctggaattactctacagtagaaataactgaacacaaacaaactgatggaaaaaaagagttaactattttatttatttcaatatttaaaaggaaaaaagtgctgacatggcacagtatttttgtttaaagtacctcctacttcaaaagttaagcgcaattttgtgaagacatgaaatcataagagtacttaatgtaaaataaaagactgcatattaactctaaagaaaaatgccccacattttaaataagaaaataaagatcaactctgctctctcaggctttttaaaaagccattcatgtatgtgctttaggtatttttatttctgcgagttggatgtggtaagtgaggagtgctcagtttttttttcctccttcaaaagtctattgaaagtgttggtgatgttaaatgattgtgtgttaagatttgactgaaataacttagccacaaatcagcagtttcccccaccctcattgccccctcaccccaggcaagccccttttatctgaatgtcagaagcagcctgcctcctagttatcatgtctgatgaggtctagctcaggaaggaattccatctattgatggaatatatcccctcaagttcaatagattcgaacacagagagctttgtttaaaataatgcagc

SEQ ID NO: 5967 - DNA, 3229 bp, Homo sapiens
  source 1..3229: mol_type = unassigned DNA; mol_type = unassigned DNA
acattgtagcaaaatggcgactgtcattcacaaccccctgaaagcgctcggggaccagttctacaaggaagccattgagcactgccggagttacaactcacggctgtgtgcagagcgcagcgtgcgtcttcccttcctggactcacagactggggtggcccagaacaactgctacatctggatggagaagaggcaccgaggcccaggccttgccccgggccagctgtatacataccctgcccgctgctggcgcaagaagagacgattgcacccacctgaagatccaaaactgcggctgctggagataaaacctgaagtggagcttcccctgaagaaggatgggttcacctcagagagcaccacgctggaagccttgctccgtggcgagggggttgagaagaaggtggatgccagggaggaggaaagcatccaggaaatacagagggttttggaaaatgatgaaaatgtagaagaagggaatgaagaagaggatttggaagaggatattcccaagcgaaagaacaggactagaggacgggctcgcggctctgcagggggcaggaggaggcacgacgccgcctctcaggaagaccacgacaaaccttacgtctgtgacatctgtggcaagcgctacaagaaccgaccggggctcagctaccactatgctcacactcacctggccagcgaggagggggatgaagctcaagaccaggagactcggtccccacccaaccacagaaatgagaaccacaggccccagaaaggaccggatggaacagtcattcccaataactactgtgacttctgcttggggggctccaacatgaacaagaagagtgggcggcctgaagagctggtgtcctgcgcagactgtggacgctctgctcatttgggaggagaaggcaggaaggagaaggaggcagcggccgcagcacgtaccacggaggacttattcggttccacgtcagaaagtgacacgtcaactttccacggctttgatgaggacgatttggaagagcctcgctcctgtcgaggacgccgcagtggccggggttcgcccacagcagataaaaagggcagttgctaaacccacggaacagactctctgggcaattagccatccccctctgactttggtcattgtgctggttctgatatatattttttttaatgaaaggcaactttagattttccctctatccttgctttttttcccttcacctcccacgtgtccctccatccctccccccacccctctgttttgggtatgtacaacagaagcacaaactactgaaacaaaacaaaacagcagaatgagcgttcttccgagagatggcatcgtgatgcgctatttattttccatagaaataggaagttagacggattgtctcttttctgaggggagggggtctttttgacaggagcagagttgatgtcctcaattttcatatttattggcaaaaggaagagaagaggaactttgggttggaaacaaagaaccaataacattaaaacattattatttatatattctagctgttattagaatcagactttttttgcgagagagagagagagagagagagaagggaaatcaaagaaatcgaagcaatatcctgtttagaggcaagccgcccggtggggagaatttcctcaatgggagacggttgcactattctgtgccccacggagtttgcggctccccgcggcagacccctccctcattctcctccctgacctttccatcttcctctctgcttgcgagaaaatgtcagtagttccagagaagtcggggtgcctatgcctggcctccctccacacctgggccctgaccagccgcctcctgggctcctcctcctccgtcagtagagctgctgttttgttattgctggtttttcctcactttcctcctggcaaagaacgacttccaaatgcagggatggaatataagcagaacgtcatgggctcagcagtgactccaccacccgaggccgaggccgtgcttctggaagatagaaggagacatcatcgtgtgtttcccctccccttgcccctgttaagaaacgtatcaatacccattggatgatcaaggctaccgtatttcttctatttttttttatagtgcctgccaggcactttgttttatgtttccaatagcacttcctgaaataaaccaaagcaacactgctcaaggcccctggggcgatggagaaggccacccacctcactgacagtcccaagaatgaccggctgcgaggtcctagtcaaaagtcaacattatgacctggggactccagcatccttcaagcaagccatttccgaagaaggtgaaaagaagccaggatgattggcacctcctcctcctcctcctcttcttcctcttcccttgcccagccccctcctgtgcgtgtgtttcagacaacacaggagccagcacaggagtggaaaatcctgcagcgcaactcagctcagcccacagaagccttgggaatggcctcagtttgtgcaataagaagattttttttttctttttaaatcttcattatattttctttgattgtctgtgagaaagtacccaggtccgcctggaattactctacagtagaaataactgaacacaaacaaactgatggaaaaaaagagttaactattttatttatttcaatatttaaaaggaaaaaagtgctgacatggcacagtatttttgtttaaagtacctcctacttcaaaagttaagcgcaattttgtgaagacatgaaatcataagagtacttaatgtaaaataaaagactgcatattaactctaaagaaaaatgccccacattttaaataagaaaataaagatcaactctgctctctcaggctttttaaaaagccattcatgtatgtgctttaggtatttttatttctgcgagttggatgtggtaagtgaggagtgctcagtttttttttcctccttcaaaagtctattgaaagtgttggtgatgttaaatgattgtgtgttaagatttgactgaaataacttagccacaaatcagcagtttcccccaccctcattgccccctcaccccaggcaagccccttttatctgaatgtcagaagcagcctgcctcctagttatcatgtctgatgaggtctagctcaggaaggaattccatctattgatggaatatatcccctcaagttcaatagattcgaacacagagagctttgtttaaaataatgcagc

SEQ ID NO: 5968 - DNA, 1514 bp, Homo sapiens
  source 1..1514: mol_type = unassigned DNA; mol_type = unassigned DNA
acattgtagcaaaatggcgactgtcattcacaaccccctgaaagcgccctttcaagaatcctatgaaagttgtggatcatctccccggaaaacacgcatatagatgtgaacatctgcctatggttttatggggttcacagacctggaagagcccatctctggatgccctggaggcccatgggctctagggctcggggaccagttctacaaggaagccattgagcactgccggagttacaactcacggctgtgtgcagagcgcagcgtgcgtcttcccttcctggactcacagactggggtggcccagaacaactgctacatctggatggagaagaggcaccgaggcccaggccttgccccgggccagctgtatacataccctgcccgctgctggcgcaagaagagacgattgcacccacctgaagatccaaaactgcggctgctggagataaaacctgaagtggagcttcccctgaagaaggatgggttcacctcagagagcaccacgctggaagccttgctccgtggcgagggggttgagaagaaggtggatgccagggaggaggaaagcatccaggaaatacagagggttttggaaaatgatgaaaatgtagaagaagggaatgaagaagaggatttggaagaggatattcccaagcgaaagaacaggactagaggacgggctcgcggctctgcagggggcaggaggaggcacgacgccgcctctcaggaagaccacgacaaaccttacgtctgtgacatctgtggcaagcgctacaagaaccgaccggggctcagctaccactatgctcacactcacctggccagcgaggagggggatgaagctcaagaccaggagactcggtccccacccaaccacagaaatgagaaccacaggccccagaaaggaccggatggaacagtcattcccaataactactgtgacttctgcttggggggctccaacatgaacaagaagagtgggcggcctgaagagctggtgtcctgcgcagactgtggacgctctgctcatttgggaggagaaggcaggaaggagaaggaggcagcggccgcagcacgtaccacggaggacttattcggttccacgtcagaaagtgacacgtcaactttccacggctttgatgaggacgatttggaagagcctcgctcctgtcgaggacgccgcagtggccggggttcgcccacagcagataaaaagggcagttgctaaacccacggaacagactctctgggcaattagccatccccctctgactttggtcattgtgctggttctgatatatattttttttaatgaaaggcaactttagattttccctctatccttgctttttttcccttcacctcccacgtgtccctccatccctccccccacccctctgttttgggtatgtacaacagaagcacaaactactgaaacaaaacaaaacagcagaatgagcgttcttccgagagatggcatcgtgatgcgctatttattttccatagaaata

SEQ ID NO: 5969 - DNA, 569 bp, Homo sapiens
  source 1..569: mol_type = unassigned DNA; mol_type = unassigned DNA
aggatgcttgggacgcagctctggtctcagcagaacccagacgagtggctgttgccgacggctggtttgtccctgccagtcattctttctgtgagtggcagcccagaaaggaccggatggaacagtcattcccaataactactgtgacttctgcttggggggctccaacatgaacaagaagagtgggcggcctgaagagctggtgtcctgcgcagactgtggacgctctgctcatttgggaggagaaggcaggaaggagaaggaggcagcggccgcagcacgtaccacggaggacttattcggttccacgtcagaaagtgacacgtcaactttccacggctttgatgaggacgatttggaagagcctcgctcctgtcgaggacgccgcagtggccggggttcgcccacagcagataaaaagggcagttgctaaacccacggaacagactctctgggcaattagccatccccctctgactttggtcattgtgctggttctgatatatattttttttaatgaaaggcaactttagattttccctctatccttgctttttttcccttcacct

SEQ ID NO: 5970 - DNA, 482 bp, Homo sapiens
  source 1..482: mol_type = unassigned DNA; mol_type = unassigned DNA
tgaagatggaaatcaatgacttagaaaccaattaaacaatccaaatagcaactgataaatggattaaccctctataatgaaattcctctagcttttgtcttccgccttccccaggtaggttttctattcctggaggcaaagcagaggcatggaggaagtggaggccagagggaatcacattaaagtgggtgaatccgtttatcacttactgtctggatggtatttctgctcacatctctgcttcctttttcagatttgtaccgtatgggaccctgattaacgttagccagtgaataatgaaaggcagcagcagacactgggtctgcccagaaaggaccggatggaacagtcattcccaataactactgtgacttctgcttggggggctccaacatgaacaagaagagtgggcggcctgaagagctggtgtcctgcgcagactgtggacgctctgctcatttgggaggagaaggcaggaagga

SEQ ID NO: 5971 - DNA, 513 bp, Homo sapiens
  source 1..513: mol_type = unassigned DNA; mol_type = unassigned DNA
gcatttcgtttctcaccttttctatttttttttttcatttcagagggttttggaaaatgatgaaaatgtagaagaagggaatgaagaagaggatttggaagaggatattcccaagcgaaagaacaggactagaggacgggctcgcggctctgcagggggcaggaggaggcacgacgccgcctctcaggaagaccacgacaaaccttacgtctgtgacatctgtggcaagcgctacaagaaccgaccggggctcagctaccactatgctcacactcacctggccagcgaggagggggatgaagctcaagaccaggagactcggtccccacccaaccacagaaatgagaaccacaggccccagaaaggaccggatggaacagtcattcccaataactactgtgacttctgcttggggggctccaacatgaacaagaagagtgggcggcctgaagagctggtgtcctgcgcagactgtggacgctctgctcatttgggaggagaaggcaggaagga

SEQ ID NO: 5972 - DNA, 562 bp, Homo sapiens
  source 1..562: mol_type = unassigned DNA; mol_type = unassigned DNA
caggctcgcggctctgcagggggcaggaggaggcacgacgccgcctctcaggaagaccacgacaaaccttacgtctgtgacatctgtggcaagcgctacaagaaccgaccggggctcagctaccactatgctcacactcacctggccagcgaggagggggatgaagctcaagaccaggagactcggtccccacccaaccacagaaatgagaaccacaggcaaaggaccggatggaacagtcattcccaataactactgtgacttctgcttggggggctccaacatgaacaagaagagtgggcggcctgaagagctggtgtcctgcgcagactgtggacgctctggtgagtgtggccccttcccacaccgggtgcccgtagaccaggaatgctcctcttgcattcctcttccatcttgtggtgctggagactggagagggaagcgatggtggcaatgctttcgagtggagaggagttttcagctcattctgatatttttcttctttgggtctcaagaaccaaaagttatgccctaggatccgggggaaagggcaaagagaagt

SEQ ID NO: 5973 - DNA, 347 bp, Homo sapiens
  source 1..347: mol_type = unassigned DNA; mol_type = unassigned DNA
aggaagctcccaaattcttttctgacttaacctatcttccgaaggagtcattattgccttcacctcggttcccttccctctcttctgtctgtctatgcaaagtgaatttgttgagcctagtgaacacagggactgtgcagggtcccagggacacagagtggacaaaacagtctgaatccttgtccccatggaaccaagagtccattgtctaggcttgaaacgtgggagcgtctgctccagctacggccacagggttttggaaaatgatgaaaatgtagaagaagggaatgaagaagaggatttggaagaggatattcccaagcgaaagaacaggactagaggacggg

SEQ ID NO: 5974 - DNA, 495 bp, Homo sapiens
  source 1..495: mol_type = unassigned DNA; mol_type = unassigned DNA
aggcttctccaccatttgctctctgatgttcggtgcgatttctcttctcctcaagacagtgcccctggctcctgcgacaccctcccaatccgggaacaacttaaggaacgccgaggtgccaagcatgtaacctgagattgatgagcctgtcagcggctccttctgcccccagccttccccctctgccgtgtgctcttcagatggatgagccaggcgggggtgggcaagaacggggagatggaggaagggacccgcggagcctcgagccagaagtggagcttcccctgaagaaggatgggttcacctcagagagcaccacgctggaagccttgctccgtggcgagggggttgagaagaaggtggatgccagggaggaggaaagcatccaggaaatacagagggttttggaaaatgatgaaaatgtagaagaagggaatgaagaagaggatttggaagaggatattcccaagcgaaagaacaggactagaggacggg

SEQ ID NO: 5975 - DNA, 550 bp, Homo sapiens
  source 1..550: mol_type = unassigned DNA; mol_type = unassigned DNA
ttcattgcgctccttctcccttcagggcaggcaggagcagggaggcatggaggagggtgcgcttatccagtggctggagtaggccaggggtttgccccctgctctgacagtttctctggagtgctggtgtgccacctggaagcattcacattcggtcactttattatccagggttgccctgggagtttggcaggagagagggagcaaaatgggagagtgagggaagcatatcactggagagggaagtagagatgtgatatgatctgcagaacaccgtgctctgtcctcagtgccccctccccagaggctccaaccccttctgagaacacaatgatcagcctcctgttcctcactggcttcttctttggacctggatttccacagcagacctggaggccatgctcggggaccagttctacaaggaagccattgagcactgccggagttacaactcacggctgtgtgcagagcgcagcgtgcgtcttcccttcctggactcacagactggggtggcccagaacaactgctacatctggatggagaagaggca

SEQ ID NO: 5976 - DNA, 546 bp, Homo sapiens
  source 1..546: mol_type = unassigned DNA; mol_type = unassigned DNA
ttcattgcgctccttctcccttcagggcaggcaggagcagggaggcatggaggagggtgcgcttatccagtggctggagtaggccaggggtttgccccctgctctgacagtttctctggagtgctggtgtgccacctggaagcattcacattcggtcactttattatccagggttgccctgggagtttggcaggagagagggagcaaaatgggagagtgagggaagcatatcactggagagggaagtagagatgtgatatgatctgcagaacaccgtgctctgtcctcagtgccccctccccagaggctccaaccccttctgagaacacaatgatcagcctcctgttcctcactggcttcttctttggacctggatttccacagcagacctggaggccatcaccgagtaatatggagtctacaaagagatcagtccgttggaagccctccaggagcccaccacttagaagagaccgacaaaatgaactctgctgtaaggaaggtgaagggaaaggaggccaaggagtttcaaggctgaaggtgcct

SEQ ID NO: 5977 - DNA, 4077 bp, Homo sapiens
  source 1..4077: mol_type = unassigned DNA; mol_type = unassigned DNA
agacaatattctgttacattgtagcaaaatggcgactgtcattcacaaccccctgaaagcgctcggggaccagttctacaaggaagccattgagcactgccggagttacaactcacggctgtgtgcagagcgcagcgtgcgtcttcccttcctggactcacagactggggtggcccagaacaactgctacatctggatggagaagaggcaccgaggcccaggccttgccccgggccagctgtatacataccctgcccgctgctggcgcaagaagagacgattgcacccacctgaagatccaaaactgcggctgctggagataaaacctgaagtggagcttcccctgaagaaggatgggttcacctcagagagcaccacgctggaagccttgctccgtggcgagggggttgagaagaaggtggatgccagggaggaggaaagcatccaggaaatacagagggttttggaaaatgatgaaaatgtagaagaagggaatgaagaagaggatttggaagaggatattcccaagcgaaagaacaggactagaggacgggctcgcggctctgcagggggcaggaggaggcacgacgccgcctctcaggaagaccacgacaaaccttacgtctgtgacatctgtggcaagcgctacaagaaccgaccggggctcagctaccactatgctcacactcacctggccagcgaggagggggatgaagctcaagaccaggagactcggtccccacccaaccacagaaatgagaaccacaggccccagaaaggaccggatggaacagtcattcccaataactactgtgacttctgcttggggggctccaacatgaacaagaagagtgggcggcctgaagagctggtgtcctgcgcagactgtggacgctctgctcatttgggaggagaaggcaggaaggagaaggaggcagcggccgcagcacgtaccacggaggacttattcggttccacgtcagaaagtgacacgtcaactttccacggctttgatgaggacgatttggaagagcctcgctcctgtcgaggacgccgcagtggccggggttcgcccacagcagataaaaagggcagttgctaaacccacggaacagactctctgggcaattagccatccccctctgactttggtcattgtgctggttctgatatatattttttttaatgaaaggcaactttagattttccctctatccttgctttttttcccttcacctcccacgtgtccctccatccctccccccacccctctgttttgggtatgtacaacagaagcacaaactactgaaacaaaacaaaacagcagaatgagcgttcttccgagagatggcatcgtgatgcgctatttattttccatagaaataggaagttagacggattgtctcttttctgaggggagggggtctttttgacaggagcagagttgatgtcctcaattttcatatttattggcaaaaggaagagaagaggaactttgggttggaaacaaagaaccaataacattaaaacattattatttatatattctagctgttattagaatcagactttttttgcgagagagagagagagagagagagaagggaaatcaaagaaatcgaagcaatatcctgtttagaggcaagccgcccggtggggagaatttcctcaatgggagacggttgcactattctgtgccccacggagtttgcggctccccgcggcagacccctccctcattctcctccctgacctttccatcttcctctctgcttgcgagaaaatgtcagtagttccagagaagtcggggtgcctatgcctggcctccctccacacctgggccctgaccagccgcctcctgggctcctcctcctccgtcagtagagctgctgttttgttattgctggtttttcctcactttcctcctggcaaagaacgacttccaaatgcagggatggaatataagcagaacgtcatgggctcagcagtgactccaccacccgaggccgaggccgtgcttctggaagatagaaggagacatcatcgtgtgtttcccctccccttgcccctgttaagaaacgtatcaatacccattggatgatcaaggctaccgtatttcttctatttttttttatagtgcctgccaggcactttgttttatgtttccaatagcacttcctgaaataaaccaaagcaacactgctcaaggcccctggggcgatggagaaggccacccacctcactgacagtcccaagaatgaccggctgcgaggtcctagtcaaaagtcaacattatgacctggggactccagcatccttcaagcaagccatttccgaagaaggtgaaaagaagccaggatgattggcacctcctcctcctcctcctcttcttcctcttcccttgcccagccccctcctgtgcgtgtgtttcagacaacacaggagccagcacaggagtggaaaatcctgcagcgcaactcagctcagcccacagaagccttgggaatggcctcagtttgtgcaataagaagattttttttttctttttaaatcttcattatattttctttgattgtctgtgagaaagtacccaggtccgcctggaattactctacagtagaaataactgaacacaaacaaactgatggaaaaaaagagttaactattttatttatttcaatatttaaaaggaaaaaagtgctgacatggcacagtatttttgtttaaagtacctcctacttcaaaagttaagcgcaattttgtgaagacatgaaatcataagagtacttaatgtaaaataaaagactgcatattaactctaaagaaaaatgccccacattttaaataagaaaataaagatcaactctgctctctcaggctttttaaaaagccattcatgtatgtgctttaggtatttttatttctgcgagttggatgtggtaagtgaggagtgctcagtttttttttcctccttcaaaagtctattgaaagtgttggtgatgttaaatgattgtgtgttaagatttgactgaaataacttagccacaaatcagcagtttcccccaccctcattgccccctcaccccaggcaagccccttttatctgaatgtcagaagcagcctgcctcctagttatcatgtctgatgaggtctagctcaggaaggaattccatctattgatggaatatatcccctcaagttcaatagattcgaacacagagagctttgtttaaaataatgcagcaaaaaaaaaaaaaaaaaaaaagcaaaaataaaagcatcagctgaggtgatattagttcagtcacctaacaactcctagaagagatgaggaaagggaaccttctgctgagctggcttctggggcctgagcttccagagctgtccccaagggctaggaaggccgacctgaaggatgagaacctcaaattcagttgctggtgggagccaaggaagacggcgggtgttctaacatggccctttctggctgagctggcggaagtgggcgttttggccgatgggatgtatctcggcgctgtgtctgtggcccagcaaaggtgcagggctgactggctgagccactgggttctacccgcaggctccccactgcactgggctttcacacagccatgctcttgggtttccctcccttgtaagcagagtcataataacacacgaatagtctaaggctgggtattctggtcagcagaggtccttgagtcacagtgttactgaaatggttctgagcctgagaatctctttggcctctgaaagggcagggcaggtgggcaccgacttcctgccagtcctttcaggtttcctgttcaaagccagtcctgttggtggaggggatcaccgagagtgtctgtatcattttgtagcccttttctctgacgttttctggtagaaaatgtcccttgtcaaaatgctaataattatcataataatctgctttccaaccaactcccacaagtgacaacctgtgtagaactgtgataaaggtttgcataatgtagggtttgtaccaagtgtgtgtaagtttctgttaaataaaaagtctgtttccaatgctcctat

SEQ ID NO: 5978 - DNA, 4520 bp, Homo sapiens
  source 1..4520: mol_type = unassigned DNA; mol_type = unassigned DNA
attctcgtcttcacccctggccactcctggagttgaaaaccaggttcgctcccggggacggtagggggttcctaacgcaaaggaatgcacagggagaatcggacgtgtttgcgccagctcgtcgcccatcagaaatagggaaaggggtaggaaggccccaggtttcaaatatatttatatgaaagctgccgttaagaggacgttggaagctgaggctgatcagataggagctcctggcttcagttctggctcggaagctcggatacactgcgcttgaacgccacagcgtttcacccaagaaagaaaatgttttatggcagaataaatgggcgtaacttcgccgcatcctcgctgccggttgctttcgctgcaacaccgctgatgctgtttctaccgaacccacaactgattttcagtttccccatttccagccgaaatcacataaccgggctgatgccacctggtaaactcaagttagagaacctatttcacatgtgcaccaggctcggggaccagttctacaaggaagccattgagcactgccggagttacaactcacggctgtgtgcagagcgcagcgtgcgtcttcccttcctggactcacagactggggtggcccagaacaactgctacatctggatggagaagaggcaccgaggcccaggccttgccccgggccagctgtatacataccctgcccgctgctggcgcaagaagagacgattgcacccacctgaagatccaaaactgcggctgctggagataaaacctgaagtggagcttcccctgaagaaggatgggttcacctcagagagcaccacgctggaagccttgctccgtggcgagggggttgagaagaaggtggatgccagggaggaggaaagcatccaggaaatacagagggttttggaaaatgatgaaaatgtagaagaagggaatgaagaagaggatttggaagaggatattcccaagcgaaagaacaggactagaggacgggctcgcggctctgcagggggcaggaggaggcacgacgccgcctctcaggaagaccacgacaaaccttacgtctgtgacatctgtggcaagcgctacaagaaccgaccggggctcagctaccactatgctcacactcacctggccagcgaggagggggatgaagctcaagaccaggagactcggtccccacccaaccacagaaatgagaaccacaggccccagaaaggaccggatggaacagtcattcccaataactactgtgacttctgcttggggggctccaacatgaacaagaagagtgggcggcctgaagagctggtgtcctgcgcagactgtggacgctctgctcatttgggaggagaaggcaggaaggagaaggaggcagcggccgcagcacgtaccacggaggacttattcggttccacgtcagaaagtgacacgtcaactttccacggctttgatgaggacgatttggaagagcctcgctcctgtcgaggacgccgcagtggccggggttcgcccacagcagataaaaagggcagttgctaaacccacggaacagactctctgggcaattagccatccccctctgactttggtcattgtgctggttctgatatatattttttttaatgaaaggcaactttagattttccctctatccttgctttttttcccttcacctcccacgtgtccctccatccctccccccacccctctgttttgggtatgtacaacagaagcacaaactactgaaacaaaacaaaacagcagaatgagcgttcttccgagagatggcatcgtgatgcgctatttattttccatagaaataggaagttagacggattgtctcttttctgaggggagggggtctttttgacaggagcagagttgatgtcctcaattttcatatttattggcaaaaggaagagaagaggaactttgggttggaaacaaagaaccaataacattaaaacattattatttatatattctagctgttattagaatcagactttttttgcgagagagagagagagagagagagaagggaaatcaaagaaatcgaagcaatatcctgtttagaggcaagccgcccggtggggagaatttcctcaatgggagacggttgcactattctgtgccccacggagtttgcggctccccgcggcagacccctccctcattctcctccctgacctttccatcttcctctctgcttgcgagaaaatgtcagtagttccagagaagtcggggtgcctatgcctggcctccctccacacctgggccctgaccagccgcctcctgggctcctcctcctccgtcagtagagctgctgttttgttattgctggtttttcctcactttcctcctggcaaagaacgacttccaaatgcagggatggaatataagcagaacgtcatgggctcagcagtgactccaccacccgaggccgaggccgtgcttctggaagatagaaggagacatcatcgtgtgtttcccctccccttgcccctgttaagaaacgtatcaatacccattggatgatcaaggctaccgtatttcttctatttttttttatagtgcctgccaggcactttgttttatgtttccaatagcacttcctgaaataaaccaaagcaacactgctcaaggcccctggggcgatggagaaggccacccacctcactgacagtcccaagaatgaccggctgcgaggtcctagtcaaaagtcaacattatgacctggggactccagcatccttcaagcaagccatttccgaagaaggtgaaaagaagccaggatgattggcacctcctcctcctcctcctcttcttcctcttcccttgcccagccccctcctgtgcgtgtgtttcagacaacacaggagccagcacaggagtggaaaatcctgcagcgcaactcagctcagcccacagaagccttgggaatggcctcagtttgtgcaataagaagattttttttttctttttaaatcttcattatattttctttgattgtctgtgagaaagtacccaggtccgcctggaattactctacagtagaaataactgaacacaaacaaactgatggaaaaaaagagttaactattttatttatttcaatatttaaaaggaaaaaagtgctgacatggcacagtatttttgtttaaagtacctcctacttcaaaagttaagcgcaattttgtgaagacatgaaatcataagagtacttaatgtaaaataaaagactgcatattaactctaaagaaaaatgccccacattttaaataagaaaataaagatcaactctgctctctcaggctttttaaaaagccattcatgtatgtgctttaggtatttttatttctgcgagttggatgtggtaagtgaggagtgctcagtttttttttcctccttcaaaagtctattgaaagtgttggtgatgttaaatgattgtgtgttaagatttgactgaaataacttagccacaaatcagcagtttcccccaccctcattgccccctcaccccaggcaagccccttttatctgaatgtcagaagcagcctgcctcctagttatcatgtctgatgaggtctagctcaggaaggaattccatctattgatggaatatatcccctcaagttcaatagattcgaacacagagagctttgtttaaaataatgcagcaaaaaaaaaaaaaaaaaaaaagcaaaaataaaagcatcagctgaggtgatattagttcagtcacctaacaactcctagaagagatgaggaaagggaaccttctgctgagctggcttctggggcctgagcttccagagctgtccccaagggctaggaaggccgacctgaaggatgagaacctcaaattcagttgctggtgggagccaaggaagacggcgggtgttctaacatggccctttctggctgagctggcggaagtgggcgttttggccgatgggatgtatctcggcgctgtgtctgtggcccagcaaaggtgcagggctgactggctgagccactgggttctacccgcaggctccccactgcactgggctttcacacagccatgctcttgggtttccctcccttgtaagcagagtcataataacacacgaatagtctaaggctgggtattctggtcagcagaggtccttgagtcacagtgttactgaaatggttctgagcctgagaatctctttggcctctgaaagggcagggcaggtgggcaccgacttcctgccagtcctttcaggtttcctgttcaaagccagtcctgttggtggaggggatcaccgagagtgtctgtatcattttgtagcccttttctctgacgttttctggtagaaaatgtcccttgtcaaaatgctaataattatcataataatctgctttccaaccaactcccacaagtgacaacctgtgtagaactgtgataaaggtttgcataatgtagggtttgtaccaagtgtgtgtaagtttctgttaaataaaaagtctgtttccaatgctcctat

SEQ ID NO: 5979 - DNA, 4221 bp, Homo sapiens
  source 1..4221: mol_type = unassigned DNA; mol_type = unassigned DNA
agacaatattctgttacattgtagcaaaatggcgactgtcattcacaaccccctgaaagcgccctttcaagaatcctatgaaagttgtggatcatctccccggaaaacacgcatatagatgtgaacatctgcctatggttttatggggttcacagacctggaagagcccatctctggatgccctggaggcccatgggctctagggctcggggaccagttctacaaggaagccattgagcactgccggagttacaactcacggctgtgtgcagagcgcagcgtgcgtcttcccttcctggactcacagactggggtggcccagaacaactgctacatctggatggagaagaggcaccgaggcccaggccttgccccgggccagctgtatacataccctgcccgctgctggcgcaagaagagacgattgcacccacctgaagatccaaaactgcggctgctggagataaaacctgaagtggagcttcccctgaagaaggatgggttcacctcagagagcaccacgctggaagccttgctccgtggcgagggggttgagaagaaggtggatgccagggaggaggaaagcatccaggaaatacagagggttttggaaaatgatgaaaatgtagaagaagggaatgaagaagaggatttggaagaggatattcccaagcgaaagaacaggactagaggacgggctcgcggctctgcagggggcaggaggaggcacgacgccgcctctcaggaagaccacgacaaaccttacgtctgtgacatctgtggcaagcgctacaagaaccgaccggggctcagctaccactatgctcacactcacctggccagcgaggagggggatgaagctcaagaccaggagactcggtccccacccaaccacagaaatgagaaccacaggccccagaaaggaccggatggaacagtcattcccaataactactgtgacttctgcttggggggctccaacatgaacaagaagagtgggcggcctgaagagctggtgtcctgcgcagactgtggacgctctgctcatttgggaggagaaggcaggaaggagaaggaggcagcggccgcagcacgtaccacggaggacttattcggttccacgtcagaaagtgacacgtcaactttccacggctttgatgaggacgatttggaagagcctcgctcctgtcgaggacgccgcagtggccggggttcgcccacagcagataaaaagggcagttgctaaacccacggaacagactctctgggcaattagccatccccctctgactttggtcattgtgctggttctgatatatattttttttaatgaaaggcaactttagattttccctctatccttgctttttttcccttcacctcccacgtgtccctccatccctccccccacccctctgttttgggtatgtacaacagaagcacaaactactgaaacaaaacaaaacagcagaatgagcgttcttccgagagatggcatcgtgatgcgctatttattttccatagaaataggaagttagacggattgtctcttttctgaggggagggggtctttttgacaggagcagagttgatgtcctcaattttcatatttattggcaaaaggaagagaagaggaactttgggttggaaacaaagaaccaataacattaaaacattattatttatatattctagctgttattagaatcagactttttttgcgagagagagagagagagagagagaagggaaatcaaagaaatcgaagcaatatcctgtttagaggcaagccgcccggtggggagaatttcctcaatgggagacggttgcactattctgtgccccacggagtttgcggctccccgcggcagacccctccctcattctcctccctgacctttccatcttcctctctgcttgcgagaaaatgtcagtagttccagagaagtcggggtgcctatgcctggcctccctccacacctgggccctgaccagccgcctcctgggctcctcctcctccgtcagtagagctgctgttttgttattgctggtttttcctcactttcctcctggcaaagaacgacttccaaatgcagggatggaatataagcagaacgtcatgggctcagcagtgactccaccacccgaggccgaggccgtgcttctggaagatagaaggagacatcatcgtgtgtttcccctccccttgcccctgttaagaaacgtatcaatacccattggatgatcaaggctaccgtatttcttctatttttttttatagtgcctgccaggcactttgttttatgtttccaatagcacttcctgaaataaaccaaagcaacactgctcaaggcccctggggcgatggagaaggccacccacctcactgacagtcccaagaatgaccggctgcgaggtcctagtcaaaagtcaacattatgacctggggactccagcatccttcaagcaagccatttccgaagaaggtgaaaagaagccaggatgattggcacctcctcctcctcctcctcttcttcctcttcccttgcccagccccctcctgtgcgtgtgtttcagacaacacaggagccagcacaggagtggaaaatcctgcagcgcaactcagctcagcccacagaagccttgggaatggcctcagtttgtgcaataagaagattttttttttctttttaaatcttcattatattttctttgattgtctgtgagaaagtacccaggtccgcctggaattactctacagtagaaataactgaacacaaacaaactgatggaaaaaaagagttaactattttatttatttcaatatttaaaaggaaaaaagtgctgacatggcacagtatttttgtttaaagtacctcctacttcaaaagttaagcgcaattttgtgaagacatgaaatcataagagtacttaatgtaaaataaaagactgcatattaactctaaagaaaaatgccccacattttaaataagaaaataaagatcaactctgctctctcaggctttttaaaaagccattcatgtatgtgctttaggtatttttatttctgcgagttggatgtggtaagtgaggagtgctcagtttttttttcctccttcaaaagtctattgaaagtgttggtgatgttaaatgattgtgtgttaagatttgactgaaataacttagccacaaatcagcagtttcccccaccctcattgccccctcaccccaggcaagccccttttatctgaatgtcagaagcagcctgcctcctagttatcatgtctgatgaggtctagctcaggaaggaattccatctattgatggaatatatcccctcaagttcaatagattcgaacacagagagctttgtttaaaataatgcagcaaaaaaaaaaaaaaaaaaaaagcaaaaataaaagcatcagctgaggtgatattagttcagtcacctaacaactcctagaagagatgaggaaagggaaccttctgctgagctggcttctggggcctgagcttccagagctgtccccaagggctaggaaggccgacctgaaggatgagaacctcaaattcagttgctggtgggagccaaggaagacggcgggtgttctaacatggccctttctggctgagctggcggaagtgggcgttttggccgatgggatgtatctcggcgctgtgtctgtggcccagcaaaggtgcagggctgactggctgagccactgggttctacccgcaggctccccactgcactgggctttcacacagccatgctcttgggtttccctcccttgtaagcagagtcataataacacacgaatagtctaaggctgggtattctggtcagcagaggtccttgagtcacagtgttactgaaatggttctgagcctgagaatctctttggcctctgaaagggcagggcaggtgggcaccgacttcctgccagtcctttcaggtttcctgttcaaagccagtcctgttggtggaggggatcaccgagagtgtctgtatcattttgtagcccttttctctgacgttttctggtagaaaatgtcccttgtcaaaatgctaataattatcataataatctgctttccaaccaactcccacaagtgacaacctgtgtagaactgtgataaaggtttgcataatgtagggtttgtaccaagtgtgtgtaagtttctgttaaataaaaagtctgtttccaatgctcctat

SEQ ID NO: 5980 - DNA, 883 bp, Homo sapiens
  source 1..883: mol_type = unassigned DNA; mol_type = unassigned DNA
aaatattttgcactggaaaaactataatctggagagacagaggagttgagagtgcccctttaaactgcaggactgcaattgatctctgtatgttttctggttttcgtccctttgaaaggggaatgagagccaggatcattggctgtactgtggagctgtcacatctccatactgaaaaggtacactgcaagtgaatttaaaccgtttttggctttctattgcatattgccaagagctttgagactgatgaaccaagtaaatgctctatttagggctaagtgagatacagattcctccaatctgatagcgtttcagcctccggagtgaggaagcagcagaaacagaagcagcagaagcaacagcagtagcagcggcagcagcaacagcagcagcccctactgaagtccaatagaggagacttgatctctagttcattctggaactccgcctgggattgtgcactgtccagggtcctgaaacatgaaccaaactgccagcgtgtcccatcacatcaagtgtcaaccctcaaaaacaatcaagaattctgaaaactaactaagatgctggagaaattgggagaccatttgttgaagaaatacctactgaatcttggaactgggaagtaacagccctccacagagaaactggaagggaattgctattgctctgctggtgattttagttgtatgctcactcatcactatgtcagtcatcctcttaaccccagatgaactcacaaattcgtcagaaaccagattgtctttggaagacctctttaggaaagactttgtgcttcacgatccagaggctcggtggatcaatgatacagatgtggtgtataaaagcgagaatggacatgtcattaaactgaatatagaaacaa

SEQ ID NO: 5981 - DNA, 6278 bp, Homo sapiens
  source 1..6278: mol_type = unassigned DNA; mol_type = unassigned DNA
aaatattttgcactggaaaaactataatctggagagacagaggagttgagagtgcccctttaaactgcaggactgcaattgatctctgtatgttttctggttttcgtccctttgaaaggggaatgagagccaggatcattggctgtactgtggagctgtcacatctccatactgaaaaggtacactgcaagtgaatttaaaccgtttttggctttctattgcatattgccaagagctttgagactgatgaaccaagtaaatgctctatttagggctaagtgagatacagattcctccaatctgatagcgtttcagcctccggagtgaggaagcagcagaaacagaagcagcagaagcaacagcagtagcagcggcagcagcaacagcagcagcccctactgaagtccaatagaggagacttgatctctagttcattctggaactccgcctgggattgtgcactgtccagggtcctgaaacatgaaccaaactgccagcgtgtcccatcacatcaagtgtcaaccctcaaaaacaatcaaggaactgggaagtaacagccctccacagagaaactggaagggaattgctattgctctgctggtgattttagttgtatgctcactcatcactatgtcagtcatcctcttaaccccagatgaactcacaaattcgtcagaaaccagattgtctttggaagacctctttaggaaagactttgtgcttcacgatccagaggctcggtggatcaatgatacagatgtggtgtataaaagcgagaatggacatgtcattaaactgaatatagaaacaaatgctaccacattattattggaaaacacaacttttgtaaccttcaaagcatcaagacattcagtttcaccagatttaaaatatgtccttctggcatatgatgtcaaacagatttttcattattcgtatactgcttcatatgtgatttacaacatacacactagggaagtttgggagttaaatcctccagaagtagaggactccgtcttgcagtacgcggcctggggtgtccaagggcagcagctgatttatatttttgaaaataatatctactatcaacctgatataaagagcagttcattgcgactgacatcttctggaaaagaagaaataatttttaatgggattgctgactggttatatgaagaggaactcctgcattctcacatcgcccactggtggtcaccagatggagaaagacttgccttcctgatgataaatgactctttggtacccaccatggttatccctcggtttactggagcgttgtatcccaaaggaaagcagtatccgtatcctaaggcaggtcaagtgaacccaacaataaaattatatgttgtaaacctgtatggaccaactcacactttggagctcatgccacctgacagctttaaatcaagagaatactatatcactatggttaaatgggtaagcaataccaagactgtggtaagatggttaaaccgagctcagaacatctccatcctcacagtctgtgagaccactacaggtgcttgtagtaaaaaatatgagatgacatcagatacgtggctctctcagcagaatgaggagcccgtgttttctagagacggcagcaaattctttatgacagtgcctgttaagcaagggggacgtggagaatttcaccacgtagctatgttcctcatccagagtaaaagtgagcaaattaccgtgcggcatctgacatcaggaaactgggaagtgataaagatcttggcatacgatgaaactactcaaaaaatttactttctgagcactgaatcttctcccagaggaaggcagctgtacagtgcttctactgaaggattattgaatcgccaatgcatttcatgtaatttcatgaaagaacaatgtacatattttgatgccagttttagtcccatgaatcaacatttcttattattctgtgaaggtccaagggtcccagtggtcagcctacatagtacggacaacccagcaaaatattttatattggaaagcaattctatgctgaaggaagctatcctgaagaagaagataggaaagccagaaattaaaatccttcatattgacgactatgaacttcctttacagttgtcccttcccaaagattttatggaccgaaaccagtatgctcttctgttaataatggatgaagaaccaggaggccagctggttacagataagttccatattgactgggattccgtactcattgacatggataatgtcattgtagcaagatttgatggcagaggaagtggattccagggtctgaaaattttgcaggagattcatcgaagattaggttcagtagaagtaaaggaccaaataacagctgtgaaatttttgctgaaactgccttacattgactccaaaagattaagcatttttggaaagggttatggtggctatattgcatcaatgatcttaaaatcagatgaaaagctttttaaatgtggatccgtggttgcacctatcacagacttgaaattgtatgcctcagctttctctgaaagataccttgggatgccatctaaggaagaaagcacttaccaggcagccagtgtgctacataatgttcatggcttgaaagaagaaaatatattaataattcatggaactgctgacacaaaagttcatttccaacactcagcagaattaatcaagcacctaataaaagctggagtgaattatactatgcaggtctacccagatgaaggtcataacgtatctgagaagagcaagtatcatctctacagcacaatcctcaaattcttcagtgattgtttgaaggaagaaatatctgtgctaccacaggaaccagaagaagatgaataatggactgtatttatacagaactgaagggaatattgaggctcaatgaaacctgacaaagagactgtaatattgtagttgctccagaatgtcaagggcagcttacggagatgtcactggagcagcacgctcagagacagtgaactagcatttgaatacacaagtccaagtctactgtgttgctaggggtgcagaacccgtttctttgtatgagagaggtcaaagggttggtttcctgggagaaattagttttgcattaaagtaggagtagtgcatgttttcttctgttatccccctgtttgttctgtaactagttgctctcattttaatttcactggccaccatcatctttgcatataatgcacaatctatcatctgtcctacagtccctgatctttcatggctgagctgcaatctaacactttactgtacctttataataagtgcaattctttcattgtctattattatgcttaagaaaatattcagttaataaaaaacagagtattttatgtaatttctgtttttaaaaagacattattaaatgggtcaaaggacatatagaaatgtggatttcagcaccttccaaagttcagccagttatcagtagatacaatatctttaaatgaacacacgagtgtatgtctcacaatatatatacacaagtgtgcatatacagttaatgaaactatctttaaatgttattcatgctataaagagtaaacgtttgatgaattagaagagatgctcttttccaagctataatggatgctttgtttaatgagccaaatatgatgaaacattttttccaattcaaattctagctattgctttcctataaatgtttgggttgtgtttggtattgtttttagtggttaatagttttccagttgcatttaattttttgaatatgataccttgtcacatgtaaattagatacttaaatattaaattatagtttctgataaagaaattttgttaacaatgcaatgccactgagtgctattttgctcttttggtggagaaggcttttttcaaaactcttggtccttttacttctttctctcagtgcagaatcaattctcattttcatcgtaaaagcaaatagctggattatttcatttgccagtttctatttagtattccatgcctgcccaattcatctgttactgtttaatttcaattcttctggtgagaattagaaatgaaatattttttattcattggccaaaaagttcacagacagcagtgtttgctatttactttgaattgaaggcacaaaatgcatcaattcctgtgctgtgttgacttgcagtagtaagtaactgagagcataaaataaacctgactgtatgaagtcaatttaagtgatgagaacatttaactttggtgactaaagtcagaatatcttctcacttcacttaagggatcttccagaagatatctaaaagtctgtaataagcttagaagttcagataaatctaggcaggatactgcatttttgtggttttaaaaaagtccttaggacagactgaattatcataacttatggcatcaggaggaaactttaaaatatcaaggaatcactcagtcaccctcctgttttgttgaaggatcaaccccaaattctgggtatttgagtacatgtgaatcatggatttggtattcaactttttccctggatgctttggaatcgtgtcttccatgctccactgggttcaatttaaaataggagaggctttctcttctgaaagatccattttaggtctttttcaagaatagtgaacacattttttaacaaaataagttgtaattttaaaaggaaagttttgcctattttattaagatggaaatttctttttaggctaatttgaaatccaactgaagctttttaaccaatattttaaatttgaaccactagagttttttatgatgcaaatgattatgttgtctgaaaggtgtggttttattgaatgtctatttgagtatcatttaaaaagtatttgccttttactgtcatcatttctcttgttttattattattatcaatgtttatctatttttcaattaatttaatacagtttctaatgtgaaagacatttttctggaacccgttttccccttaaacactaaagagacctcaagtgaaagcatattgcttagtaggaaggtagaaaatgttaatccctgcgattctttgagttttaatgacagggtcattttcagtaaaggaaatgctcaccaacacatagtcaccaactattaaaggaatcatgtgattggattttcccctgtatacatgtacccttggtcataatcccactatttcatacatatttatgcattgctagattttcctaggactccaatagcatgctttccaagtgttattattcccttaatgttaaagaaaaaaatcaatatattgaattctttaattaaataggtaagcagtattaaatcatccacagagataaacaatctcttgaaactcttttgaaagagaaaagtgtttgttcactttcattgccttcattaagatctccaaatactcagagactaagcaggctattctcatctctttgagtttcctgacagaactaaaggaaggaatcactcttcaaaagatggatctcacttcactctgaaaatgtgcctttttttaattgggtgtttagcataaaaatcactattggggatcttacagatgtctgttgtagatctattacaatgaggtgacttagacattgggctttaccatattagagaattacttaagccattgtccttcaaatgttgggcttggagacagaagtaccttggactgaattgctttcaagtctctagaatcactgacagcacatagcttctatgaggagttatatatgaaataccacttgtgtccctcctcaagttctctgaccaccttcacatcctgcggccaccaacactgtatggatacaatctggcctctcagctctgctcactttcactttctgttctggggattctctgatactaattttggctacttggtagaaccaagagacaaatcgcttacatgctgcaaaccgatgtgaaggtgttactaacccgctaaaacacaattaatgaaagactgtagcaggtaactgatctttccctcagatattctacatggtccatggaagactctgtgggccgcagaagcccatagctgcatacccttctattttcctcttccccatttcactcttttaagctccctactcctattccctatgatcactttccaaaataaacggcaggtgtgctagctgttgtcttagactctgctttctggaaactatttttcccctccacaagaaattatcactgtgaatattacaggaggagaaataaaataagaataaatcagtggtttattttca

SEQ ID NO: 5982 - DNA, 2165 bp, Homo sapiens
  source 1..2165: mol_type = unassigned DNA; mol_type = unassigned DNA
atattgcattaaacacttgatgaaagaagacctagaaggctttaagaaagacagggtaatattttgctggtgtagagggcctgctcttcggagacaaatacttgcttttcattttgatcagccgtctgcacttaaaagcctcctagccagggacatgttaattaaacagtctggggctcagtgctgccatccgtaaattggaggattagagaaataatatacacaagtacctggtacataccaaatatgatagaagatatcttcaacctttagctataagaagaatggaaaatgaaaaagagacaggtggagagagggagggagatgagagctgcgtggagctggtatgctggttaggaggtaggaaataatgaggcctcgaccatctaagatacagaagtctccctgctgaatcgaaaggaagtgctacaatattctttcaaattcatcgcagttgagagaaaactggagcagagtgtgatatcaagaaagggcttcaccaggatgatcaatgcaaatggatatggagctttcttggaatgaaacattatcccgtaacaccaggtatacatacatgaagagtggcttcaggactggatccattgctgtttacatgggcccattaaatggagttatgactattttctagtttatgaactgggaagtaacagccctccacagagaaactggaagggaattgctattgctctgctggtgattttagttgtatgctcactcatcactatgtcagtcatcctcttaaccccagatgaactcacaaattcgtcagaaaccagattgtctttggaagacctctttaggaaagactttgtgcttcacgatccagaggctcggtggatcaatgatacagatgtggtgtataaaagcgagaatggacatgtcattaaactgaatatagaaacaaatgctaccacattattattggaaaacacaacttttgtaaccttcaaagcatcaagacattcagtttcaccagatttaaaatatgtccttctggcatatgatgtcaaacaggagagcaatggagacagagttgcttatccaagggcagtctagcaagtggcagagctggggcatgagtccaggcagttttgttccagagtccgtgctcttggtcaccttactttgatgcgtatcctccaccagcacactttgagaaacaccacagtaaggaatacgcacacagatgtgacaactgcccctacaaagcaaatcattcctgtcaattatggatacctgtctcatttattgaaaacctacttcgtgccaaggactctggtagacagacaagttttttaaagcattacaaaataagtgtgaaaaacaaaatcctaaatgagtcttgattaacccaattgggtctctctgtggcctaatggtggaaccaaatgatgtagcagaaggaaagcaatgtttctgtgtttccaaatgctcaaactgcttctgagtacaccctgggctccatccagtgcagaacttaagaatttgctcctatgttttttactttttcttttaaaccagtatttatttggaaacaatttcaaattgacagataatatttaaagaataagagtagtataaaagaccttcatatacatttcactcagaatcactgaccattaacattttacctcattaggtccaacagttgcaaattctctctctctcagtttctctctgtccacataacgtatacacattttttaaaaattaattttaatttttgttttaagcttcagtgtatgtatgtacaggaagtgcaggttcattacataggtaaatgtgtgccatagtgtttcgctgcacctatgaactcatcacctaggtattaagcccagcatgcattaactatttttcctaatgctctccctcccccactccaccccctggcaggccccagtgtgtgttgttccctccctgtgtccatgttttctcattgttcagctcccacttataagtgagaccatgtggtgtttggttttctgtttctgccttagtttgctagctctacccatgcccctgcaaaggatatggtcttgttcctttttatggttgcatagtattccacagtatgtacacaattttttaaccattagtgccattagcattttcttatgggggaagtattggtactttgtcccagc

SEQ ID NO: 5983 - DNA, 3883 bp, Homo sapiens
  source 1..3883: mol_type = unassigned DNA; mol_type = unassigned DNA
aagacctagaaggctttaagaaagacagggtaatattttgctggtgtagagggcctgctcttcggagacaaatacttgcttttcattttgatcagccgtctgcacttaaaagcctcctagccagggacatgttaattaaacagtctggggctcagtgctgccatccgtaaattggaggattagagaaataatatacacaagtacctggtacataccaaatatgatagaagatatcttcaacctttagctataagaagaatggaaaatgaaaaagagacaggtggagagagggagggagatgagagctgcgtggagctggtatgctggttaggaggtaggaaataatgaggcctcgaccatctaagatacagaagtctccctgctgaatcgaaaggaagtgctacaatattctttcaaattcatcgcagttgagagaaaactggagcagagtgtgatatcaagaaagggcttcaccaggatgatcaatgcaaatggatatggagctttcttggaatgaaacattatcccgtaacaccaggtatacatacatgaagagtggcttcaggactggaactgggaagtaacagccctccacagagaaactggaagggaattgctattgctctgctggtgattttagttgtatgctcactcatcactatgtcagtcatcctcttaaccccagatgaactcacaaattcgtcagaaaccagattgtctttggaagacctctttaggaaagactttgtgcttcacgatccagaggctcggtggatcaatgatacagatgtggtgtataaaagcgagaatggacatgtcattaaactgaatatagaaacaaatgctaccacattattattggaaaacacaacttttgtaaccttcaaagcatcaagacattcagtttcaccagatttaaaatatgtccttctggcatatgatgtcaaacagatttttcattattcgtatactgcttcatatgtgatttacaacatacacactagggaagtttgggagttaaatcctccagaagtagaggactccgtcttgcagtacgcggcctggggtgtccaagggcagcagctgatttatatttttgaaaataatatctactatcaacctgatataaagagcagttcattgcgactgacatcttctggaaaagaagaaataatttttaatgggattgctgactggttatatgaagaggaactcctgcattctcacatcgcccactggtggtcaccagatggagaaagacttgccttcctgatgataaatgactctttggtacccaccatggttatccctcggtttactggagcgttgtatcccaaaggaaagcagtatccgtatcctaaggcaggtcaagtgaacccaacaataaaattatatgttgtaaacctgtatggaccaactcacactttggagctcatgccacctgacagctttaaatcaagagaatactatatcactatggttaaatgggtaagcaataccaagactgtggtaagatggttaaaccgagctcagaacatctccatcctcacagtctgtgagaccactacaggtgcttgtagtaaaaaatatgagatgacatcagatacgtggctctctcagcagaatgaggagcccgtgttttctagagacggcagcaaattctttatgacagtgcctgttaagcaagggggacgtggagaatttcaccacgtagctatgttcctcatccagagtaaaagtgagcaaattaccgtgcggcatctgacatcaggaaactgggaagtgataaagatcttggcatacgatgaaactactcaaaaaatttactttctgagcactgaatcttctcccagaggaaggcagctgtacagtgcttctactgaaggattattgaatcgccaatgcatttcatgtaatttcatgaaagaacaatgtacatattttgatgccagttttagtcccatgaatcaacatttcttattattctgtgaaggtccaagggtcccagtggtcagcctacatagtacggacaacccagcaaaatattttatattggaaagcaattctatgctgaaggaagctatcctgaagaagaagataggaaagccagaaattaaaatccttcatattgacgactatgaacttcctttacagttgtcccttcccaaagattttatggaccgaaaccagtatgctcttctgttaataatggatgaagaaccaggaggccagctggttacagataagttccatattgactgggattccgtactcattgacatggataatgtcattgtagcaagatttgatggcagaggaagtggattccagggtctgaaaattttgcaggagattcatcgaagattaggttcagtagaagtaaaggaccaaataacagctgtgaaatttttgctgaaactgccttacattgactccaaaagattaagcatttttggaaagggttatggtggctatattgcatcaatgatcttaaaatcagatgaaaagctttttaaatgtggatccgtggttgcacctatcacagacttgaaattgtatgcctcagctttctctgaaagataccttgggatgccatctaaggaagaaagcacttaccaggcagccagtgtgctacataatgttcatggcttgaaagaagaaaatatattaataattcatggaactgctgacacaaaagttcatttccaacactcagcagaattaatcaagcacctaataaaagctggagtgaattatactatgcaggtctacccagatgaaggtcataacgtatctgagaagagcaagtatcatctctacagcacaatcctcaaattcttcagtgattgtttgaaggaagaaatatctgtgctaccacaggaaccagaagaagatgaataatggactgtatttatacagaactgaagggaatattgaggctcaatgaaacctgacaaagagactgtaatattgtagttgctccagaatgtcaagggcagcttacggagatgtcactggagcagcacgctcagagacagtgaactagcatttgaatacacaagtccaagtctactgtgttgctaggggtgcagaacccgtttctttgtatgagagaggtcaaagggttggtttcctgggagaaattagttttgcattaaagtaggagtagtgcatgttttcttctgttatccccctgtttgttctgtaactagttgctctcattttaatttcactggccaccatcatctttgcatataatgcacaatctatcatctgtcctacagtccctgatctttcatggctgagctgcaatctaacactttactgtacctttataataagtgcaattctttcattgtctattattatgcttaagaaaatattcagttaataaaaaacagagtattttatgtaatttctgtttttaaaaagacattattaaatgggtcaaaggacatatagaaatgtggatttcagcaccttccaaagttcagccagttatcagtagatacaatatctttaaatgaacacacgagtgtatgtctcacaatatatatacacaagtgtgcatatacagttaatgaaactatctttaaatgttattcatgctataaagagtaaacgtttgatgaattagaagagatgctcttttccaagctataatggatgctttgtttaatgagccaaatatgatgaaacattttttccaattcaaattctagctattgctttcctataaatgtttgggttgtgtttggtattgtttttagtggttaatagttttccagttgcatttaattttttgaatatgataccttgtcacatgtaaattagatacttaaatattaaattatagtttctgataaagaaattttgttaacaa

SEQ ID NO: 5984 - DNA, 457 bp, Homo sapiens
  source 1..457: mol_type = unassigned DNA; mol_type = unassigned DNA
acacatatttcggttggacataggtgggcactgacgtagattctttgcttcctgtacttatatgtgaatagcaaagtgttgagaactggaagcatgagtgagtgacatgcaaggaactgacattgaagtaagattctgtgagggtgaggttgcatttgtagaaagtggttatagtccacttagcaatggtcatcacagaggtggctgagggaccagtagatggttctgaaaagggattcctcaaaatttgcaattggttgatggcactcttcatctttctgatgttcatttagaagtgataattactgggaacctgatgctcagtactgtattaggcattaaaaggatgaagatgactaagggaacaaaataacagcttagaataattctctcctttttagagtttttccctaactttgtcaaagtataattaaaaaataaaaatgtctatattttc

SEQ ID NO: 5985 - DNA, 862 bp, Homo sapiens
  source 1..862: mol_type = unassigned DNA; mol_type = unassigned DNA
gagtgacatgcaaggaactgacattgaagtaagattctgtgagggtgaggttgcatttgtagaaagtggttatagtccacttagcaatggtcatcacagaggtggctgagggaccagtagatggttctgaaaaggaactgggaagtaacagccctccacagagaaactggaagggaattgctattgctctgctggtgattttagttgtatgctcactcatcactatgtcagtcatcctcttaaccccagatgaactcacaaattcgtcagaaaccagattgtctttggaagacctctttaggaaagactttgtgcttcacgatccagaggctcggtggatcaatgatacagatgtggtgtataaaagcgagaatggacatgtcattaaactgaatatagaaacaaatgctaccacattattattggaaaacacaacttttgtaaccttcaaagcatcaagacattcagtttcaccagatttaaaatatgtccttctggcatatgatgtcaaacagatttttcattattcgtatactgcttcatatgtgatttacaacatacacactagggaagtttgggagttaaatcctccagaagtagaggactccgtcttgcagtacgcggcctggggtgtccaagggcagcagctgatttatatttttgaaaataatatctactatcaacctgatataaagagcagttcattgcgactgacatcttctggaaaagaagaaataatttttaatgggattgctgactggttatatgaagaggaactcctgcattctcacatcgcccactggtggtcaccagatggagaaagacttgccttcctgatgataaatgactctttggtacccac

SEQ ID NO: 5986 - DNA, 2758 bp, Homo sapiens
  source 1..2758: mol_type = unassigned DNA; mol_type = unassigned DNA
aagaaggcacgaggcgtcgccgcagctcggtcaggggccggggccccgccgctcgccgctgcactaacttgccgcttggtctcgcctcgccgccgcggctcgctgcgctttgggtggcggggggcggggagagcggggagtcagagggtctgcggtggccgagggagggaccctacgacggggagcccgcccggtgccgctcttcttcccctccccgcccctccgctccccccaccccgtcccttccgccgattccgggagcgacgggcgcccgtgacctgcgaacgctgccaagtgacggtccccgagtctgaagcgcccgcgaggaagcgagcgccagcgcgggccgccggcgatgacggccgcgaagcaggagccgcagcccaccccgggggccagggcgagccaggcgcagccggcggaccaggaactgggaagtaacagccctccacagagaaactggaagggaattgctattgctctgctggtgattttagttgtatgctcactcatcactatgtcagtcatcctcttaaccccagatgaactcacaaattcgtcagaaaccagattgtctttggaagacctctttaggaaagactttgtgcttcacgatccagaggctcggtggatcaatgatacagatgtggtgtataaaagcgagaatggacatgtcattaaactgaatatagaaacaaatgctaccacattattattggaaaacacaacttttgtaaccttcaaagcatcaagacattcagtttcaccagatttaaaatatgtccttctggcatatgatgtcaaacagatttttcattattcgtatactgcttcatatgtgatttacaacatacacactagggaagtttgggagttaaatcctccagaagtagaggactccgtcttgcagtacgcggcctggggtgtccaagggcagcagctgatttatatttttgaaaataatatctactatcaacctgatataaagagcagttcattgcgactgacatcttctggaaaagaagaaataatttttaatgggattgctgactggttatatgaagaggaactcctgcattctcacatcgcccactggtggtcaccagatggagaaagacttgccttcctgatgataaatgactctttggtacccaccatggttatccctcggtttactggagcgttgtatcccaaaggaaagcagtatccgtatcctaaggcaggtcaagtgaacccaacaataaaattatatgttgtaaacctgtatggaccaactcacactttggagctcatgccacctgacagctttaaatcaagagaatactatatcactatggttaaatgggtaagcaataccaagactgtggtaagatggttaaaccgagctcagaacatctccatcctcacagtctgtgagaccactacaggtgcttgtagtaaaaaatatgagatgacatcagatacgtggctctctcagcagaatgaggagcccgtgttttctagagacggcagcaaattctttatgacagtgcctgttaagcaagggggacgtggagaatttcaccacgtagctatgttcctcatccagagtaaaagtgagcaaattaccgtgcggcatctgacatcaggaaactgggaagtgataaagatcttggcatacgatgaaactactcaaaaaatttactttctgagcactgaatcttctcccagaggaaggcagctgtacagtgcttctactgaaggattattgaatcgccaatgcatttcatgtaatttcatgaaagaacaatgtacatattttgatgccagttttagtcccatgaatcaacatttcttattattctgtgaaggtccaagggtcccagtggtcagcctacatagtacggacaacccagcaaaatattttatattggaaagcaattctatgctgaaggaagctatcctgaagaagaagataggaaagccagaaattaaaatccttcatattgacgactatgaacttcctttacagttgtcccttcccaaagattttatggaccgaaaccagtatgctcttctgttaataatggatgaagaaccaggaggccagctggttacagataagttccatattgactgggattccgtactcattgacatggataatgtcattgtagcaagatttgatggcagaggaagtggattccagggtctgaaaattttgcaggagattcatcgaagattaggttcagtagaagtaaaggaccaaataacagctgtgaaatttttgctgaaactgccttacattgactccaaaagattaagcatttttggaaagggttatggtggctatattgcatcaatgatcttaaaatcagatgaaaagctttttaaatgtggatccgtggttgcacctatcacagacttgaaattgtatgcctcagctttctctgaaagataccttgggatgccatctaaggaagaaagcacttaccaggcagccagtgtgctacataatgttcatggcttgaaagaagaaaatatattaataattcatggaactgctgacacaaaagttcatttccaacactcagcagaattaatcaagcacctaataaaagctggagtgaattatactatgcaggtctacccagatgaaggtcataacgtatctgagaagagcaagtatcatctctacagcacaatcctcaaattcttcagtgattgtttgaaggaagaaatatctgtgctaccacaggaaccagaagaagatgaataa

SEQ ID NO: 5987 - DNA, 3052 bp, Homo sapiens
  source 1..3052: mol_type = unassigned DNA; mol_type = unassigned DNA
ggctgggctcccgcgcctccctcttctcaccctcccccgccccgccccagttccaggctctcctgcttctccacggactctgcgggaagttagagcctctgcgtgcgctccggggcccggcgagaggatgcgcaaggtggagagccgcggggaagggggcagagaggaactgggaagtaacagccctccacagagaaactggaagggaattgctattgctctgctggtgattttagttgtatgctcactcatcactatgtcagtcatcctcttaaccccagatgaactcacaaattcgtcagaaaccagattgtctttggaagacctctttaggaaagactttgtgcttcacgatccagaggctcggtggatcaatgatacagatgtggtgtataaaagcgagaatggacatgtcattaaactgaatatagaaacaaatgctaccacattattattggaaaacacaacttttgtaaccttcaaagcatcaagacattcagtttcaccagatttaaaatatgtccttctggcatatgatgtcaaacagatttttcattattcgtatactgcttcatatgtgatttacaacatacacactagggaagtttgggagttaaatcctccagaagtagaggactccgtcttgcagtacgcggcctggggtgtccaagggcagcagctgatttatatttttgaaaataatatctactatcaacctgatataaagagcagttcattgcgactgacatcttctggaaaagaagaaataatttttaatgggattgctgactggttatatgaagaggaactcctgcattctcacatcgcccactggtggtcaccagatggagaaagacttgccttcctgatgataaatgactctttggtacccaccatggttatccctcggtttactggagcgttgtatcccaaaggaaagcagtatccgtatcctaaggcaggtcaagtgaacccaacaataaaattatatgttgtaaacctgtatggaccaactcacactttggagctcatgccacctgacagctttaaatcaagagaatactatatcactatggttaaatgggtaagcaataccaagactgtggtaagatggttaaaccgagctcagaacatctccatcctcacagtctgtgagaccactacaggtgcttgtagtaaaaaatatgagatgacatcagatacgtggctctctcagcagaatgaggagcccgtgttttctagagacggcagcaaattctttatgacagtgcctgttaagcaagggggacgtggagaatttcaccacgtagctatgttcctcatccagagtaaaagtgagcaaattaccgtgcggcatctgacatcaggaaactgggaagtgataaagatcttggcatacgatgaaactactcaaaaaatttactttctgagcactgaatcttctcccagaggaaggcagctgtacagtgcttctactgaaggattattgaatcgccaatgcatttcatgtaatttcatgaaagaacaatgtacatattttgatgccagttttagtcccatgaatcaacatttcttattattctgtgaaggtccaagggtcccagtggtcagcctacatagtacggacaacccagcaaaatattttatattggaaagcaattctatgctgaaggaagctatcctgaagaagaagataggaaagccagaaattaaaatccttcatattgacgactatgaacttcctttacagttgtcccttcccaaagattttatggaccgaaaccagtatgctcttctgttaataatggatgaagaaccaggaggccagctggttacagataagttccatattgactgggattccgtactcattgacatggataatgtcattgtagcaagatttgatggcagaggaagtggattccagggtctgaaaattttgcaggagattcatcgaagattaggttcagtagaagtaaaggaccaaataacagctgtgaaatttttgctgaaactgccttacattgactccaaaagattaagcatttttggaaagggttatggtggctatattgcatcaatgatcttaaaatcagatgaaaagctttttaaatgtggatccgtggttgcacctatcacagacttgaaattgtatgcctcagctttctctgaaagataccttgggatgccatctaaggaagaaagcacttaccaggcagccagtgtgctacataatgttcatggcttgaaagaagaaaatatattaataattcatggaactgctgacacaaaagttcatttccaacactcagcagaattaatcaagcacctaataaaagctggagtgaattatactatgcaggtctacccagatgaaggtcataacgtatctgagaagagcaagtatcatctctacagcacaatcctcaaattcttcagtgattgtttgaaggaagaaatatctgtgctaccacaggaaccagaagaagatgaataatggactgtatttatacagaactgaagggaatattgaggctcaatgaaacctgacaaagagactgtaatattgtagttgctccagaatgtcaagggcagcttacggagatgtcactggagcagcacgctcagagacagtgaactagcatttgaatacacaagtccaagtctactgtgttgctaggggtgcagaacccgtttctttgtatgagagaggtcaaagggttggtttcctgggagaaattagttttgcattaaagtaggagtagtgcatgttttcttctgttatccccctgtttgttctgtaactagttgctctcattttaatttcactggccaccatcatctttgcatataatgcacaatctatcatctgtcctacagtccctgatctttcatggctgagctgcaatctaacactttactgtacctttataataagtgcaattctttcattgtctattattatgcttaagaaaatattcagttaataaaaaacagagtattttatgtaatttctgtttttaaaaagacattattaaatgggtcaaaggac

SEQ ID NO: 5988 - DNA, 913 bp, Homo sapiens
  source 1..913: mol_type = unassigned DNA; mol_type = unassigned DNA
agttccaggctctcctgcttctccacggactctgcgggaagttagagcctctgcgtgcgctccggggcccggcgagaggatgcgcaaggtggagagccgcggggaagggggcagagaggaactgggaagtaacagccctccacagagaaactggaagggaattgctattgctctgctggtgattttagttgtatgctcactcatcactatgtcagtcatcctcttaaccccagatgaactcacaaattcgtcagaaaccagattgtctttggaagacctctttaggaaagactttgtgcttcacgatccagaggctcggtggatcaatgatacagatgtggtgtataaaagcgagaatggacatgtcattaaactgaatatagaaacaaatgctaccacattattattggaaaacacaacttttgtaaccttcaaagcatcaagacattcagtttcaccagatttaaaatatgtccttctggcatatgatgtcaaacaggtaaaggagtgatcttctttgagaatacttttctttgtgatgcattggggtgacaatgcataattttactcagctataactcacctaagcaaaatctggcatgtctagtaactaccggaggacagtaatgactactttgcacaaaagatgtttgaagataatgtccaaacatcttccatatctgcacagcaaataattgggacagtttgcccagtgcctgtgctgatccaagtccatctcttggcagaggagaatgtggcagagtttagcaaatccaacaaatgcgggcttgtgaaagtttcaagataagccttaccatatacttgagtgtttcatgtgtgtacagattagagactttcctagtggctgtgcctagagcttcagatgtgtatattgggaaggcaactgctgaaa

SEQ ID NO: 5989 - DNA, 553 bp, Homo sapiens
  source 1..553: mol_type = unassigned DNA; mol_type = unassigned DNA
atgcgcaaggtggagagccgcggggaagggggcagagagatgaactcacaaattcgtcagaaaccagattgtctttggaagacctctttaggaaagactttgtgcttcacgatccagaggctcggtggatcaatgatacagatgtggtgtataaaagcgagaatggacatgtcattaaactgaatatagaaacaaatgctaccacattattattggaaaacacaacttttgtaaccttcaaagcatcaagacattcagtttcaccagatttaaaatatgtccttctggcatatgatgtcaaacaggagagcaatggagacagagttgcttatccaagggcagtctagcaagtggcagagctggggcatgagtccaggcagttttgttccagagtccgtgctcttggtcaccttactttgatgcgtatcctccaccagcacactttgagaaacaccacaatttttcattattcgtatactgcttcatatgtgatttacaacatacacactagggaagtttgggagttaaatcctccagaagtagaggactccgt

SEQ ID NO: 5990 - DNA, 565 bp, Homo sapiens
  source 1..565: mol_type = unassigned DNA; mol_type = unassigned DNA
gtacaaaggattctcaggtcaatagctagattttactaaactggccctgaaaattttataattttgattctcaatagcagttttctgtactctagtctgtgagttactggggaacatttgaaggcaagaagaatagcagttaatacggcgtgccaccttctcaccatgcacactggattcgcaggaactgggaagtaacagccctccacagagaaactggaagggaattgctattgctctgctggtgattttagttgtatgctcactcatcactatgtcagtcatcctcttaaccccagatgaactcacaaattcgtcagaaaccagattgtctttggaagacctctttaggaaagactttgtgcttcacgatccagaggctcggtggatcaatgatacagatgtggtgtataaaagcgagaatggacatgtcattaaactgaatatagaaacaaatgctaccacattattattggaaaacacaacttttgtaaccttcaaagcatcaagacattcagtttcaccagatttaaaatatgtccttctggcatatgatgtcaaacag

SEQ ID NO: 5991 - DNA, 546 bp, Homo sapiens
  source 1..546: mol_type = unassigned DNA; mol_type = unassigned DNA
attgttggtgctagtaccttatcagttcattgggctcctttgaaatgctgaggatctgcttacacaggtcaactcctggcagaagcgggttggatacagatgtggtgtataaaagcgagaatggacatgtcattaaactgaatatagaaacaaatgctaccacattattattggaaaacacaacttttgtaaccttcaaagcatcaagacattcagtttcaccagatttaaaatatgtccttctggcatatgatgtcaaacagatttttcattattcgtatactgcttcatatgtgatttacaacatacacactagggaagtttgggagttaaatcctccagaagtagaggactccgtcttgcagtacgcggcctggggtgtccaagggcagcagctgatttatatttttgaaaataatatctactatcaacctgatataaagagcagttcattgcgactgacatcttctggaaaagaagaaataatttttaatgggattgctgactggttatatgaagaggaactcctgcattctcacatcgccc

SEQ ID NO: 5992 - DNA, 548 bp, Homo sapiens
  source 1..548: mol_type = unassigned DNA; mol_type = unassigned DNA
tcaagaattaacagaaattttaatagccagcacagttctttcccattacttaacttgtgagtatgaaaggtaaaatttctaccagattttcagttgctcttgttttggtccaatatgttggtatttgcagggatgaagaaccaggaggccagctggttacagataagttccatattgactgggattccgtactcattgacatggataatgtcattgtagcaagatttgatggcagaggaagtggattccagggtctgaaaattttgcaggagattcatcgaagattaggttcagtagaagtaaaggaccaaataacagctgtgaaatttttgctgaaactgccttacattgactccaaaagattaagcatttttggaaagggttatggtggctatattgcatcaatgatcttaaaatcagatgaaaagctttttaaatgtggatccgtggttgcacctatcacagacttgaaattgtatgcctcagctttctctgaaagataccttgggatgccatctaaggaagaaagcacttaccaggcagccagt

SEQ ID NO: 5993 - DNA, 5075 bp, Homo sapiens
  source 1..5075: mol_type = unassigned DNA; mol_type = unassigned DNA
gggacgagcccgccctccaccctccgcccgcccgcccgctggagagtgagctgcgcccagccgcccagccagcccgccgttctctggccgccgtccgggcgcgcgcagcgagcgggcgcgactatgccaagatggtcctgcaggcgcggaacaagcaccgggaggcggctcccaagccgccccagccaccccgcgcctcacagtcgccgctgaggggggcgtcggacgtcggcgccggggagccggggcccgagcgcgcgcccctgtccccggggcgcaagggcgccgcgggcaggaaggggccccgcgccgagcccggcgcgccgcccgccgggggcggccttggggggcgcctggccgcccggctgcgctgggcgctgggcctgcggcgcgcggggcgcggccggacctggaccacgctcctgttagctgtttttgcagcagtgttgcactggagccatataacacacctctttgaaaatgaccgtcatttttctcacctctcaacattggaaagggagatggcttttcgcactgaaatgggactatattattcctatttcaagactattgtggaagcaccctcatttttgaatggagtatggatgattatgaatgataaactgactgaatacccccttgtcattaatacattaaaaagattcaatctttaccctgaggtaattttggccagttggtaccggatttataccaaaataatggacttgattggtattcaaaccaagatatgttggacggttaccagaggagaaggactcagtcctattgaaagctgtgaaggattgggagatcctgcttgcttttatgttgctgtaatttttattttaaatggactaatgatggcattattcttcatatatggcacatatttaagtggcagccgattaggaggcctggttacagtgttgtgcttctttttcaatcatggagagtgtacccgtgtaatgtggacaccacctctccgtgaaagcttctcatatccatttcttgttcttcagatgttgctagtgactcatattctcagggctacaaaactttatagaggaagcttgattgcactctgcatttccaatgtatttttcatgcttccttggcagtttgctcagtttgtacttcttactcagattgcatcattatttgcagtatatgttgtcgggtacattgatatatgtaaattacggaagatcatttatatacacatgatttctcttgcactttgttttgttttgatgtttgggaactcaatgttattaacttcttattatgcttcttctttggtaattatttggggtattctggcaatgaaaccacatttcctgaaaataaatgtatctgaacttagtttatgggttattcaaggatgtttttggttatttggaactgtcatacttaaatacttgacatctaaaatttttggtattgcagatgacgctcatattggcaacttactaacatcaaaattctttagttataaggattttgatactttattgtatacctgtgcagcggagtttgactttatggaaaaagagactccactgagatacacaaagacattattgcttccagttgttcttgtagtgtttgttgctattgttagaaagattattagtgatatgtggggtgtcttagctaaacaacagacacatgtaagaaaacaccagtttgatcatggagagctggtttaccatgcattgcaattgttagcatatacagcccttggtattttaattatgagactaaaactcttcttgacaccacacatgtgtgttatggcatcactgatctgctcaagacagctatttggatggctcttttgcaaagtacatcctggtgctattgtgtttgctatattagcagcaatgtcaatacaaggttcagcaaatctgcaaacccagtggaatattgtaggggagttcagcaatttgccccaagaagaacttatagaatggatcaaatatagtactaaaccagatgcagtgtttgcgggtgccatgcccacgatggcaagtgttaagctctctgcacttcggcccattgtgaatcatccacattatgaagacgcaggcttgagagccagaacaaaaatagtatactcaatgtatagtcggaaagcagccgaagaagtgaagcgagaactgataaagttaaaagtgaactattacattctagaagagtcatggtgtgtaagaagatccaagcctggttgcagtatgcctgaaatttgggatgtagaagatcctgccaatgctgggaaaactcccttatgtaacctcttggtgaaggattccaaacctcacttcaccactgtattccagaacagtgtttacaaagtcctagaagttgtaaaagaatgactgctacatgacctgctgcctacggagaactacatctgtaatggttttaatgttttgctaagtcatgtgttgttcatatcccaaaaacttttataggtaactgttttcaaatagaaaacgttttatttggtcaatttgaatgtcattctaattataaaaatgacttacacctttatcaattggttactatttcaatgcaccctttaaaatttgctatgcaaatgagtatatgcttgtacttgactttaatatttgtgctaaagtgagcaaagctacctgtataaagaaaacacagtgggttgtgacaaggatgacatgaaaatacaggacaattctgacaatgtaggggctgattttatagtgtaagaactattaatgccccttgcttcttttttctgcctcttgctcttgtcttttggacatttcagtgattgtaagttcttcggtcatgtcagcccctgtcatcaacttgagttacagtagatggggcagacatggagtgtttgctatatagaactatctgtttgttttacttccttgtgcgctttttgttctctgttctcttgttaatgaagcttttcctgcccattattaatccaaactcttggaccttgtggttaggaaattcccttaacttccagccatatggcattatcgtgtctctttctctctctctcttgctctctctcttctcctcttccccatattttctgtcaaataagtactgtttactcatttagttgcttatcaagtacttattcttggttttaaaaaaaattaatggtaactgtatttttctcatttttagcattattcaaatgtttatattttaatacctttaaaccactttaaagttttttcatgtttaattatagttttaagaaaaactattttgaacaaccccaaatatagtgcatctagaaactaatgtatatttgattagacatcatttatagtggaacagtagactgtagtacatggtaatttttcttttactattaagatacaataaaacatgactaattttgctgtcaaaaatgtaaagaataatgataaatggagtttttatattttacttttaagattgcctgtctttaataagacaaagccttaagccttatgttataattttggttctaaaaaccatcatttcagtataaggaataagtatatttcgtcctcctctttagtttttttcttcctatttatttttattttgaaaaatttctacaccttctttgaattccttgtatgaatttttgtttcttagaagttaatttgtgtgaaatgagattcttcaaaacgatgaaacctcatagctctgagaaaaggttttagggttttaaattctaagcaaagcgtgactatggctgacagactacacatttaattatacagcttctctttcttaaccacaggcagattaacctcattgtggattgtccttcagaccttagtcctcaggcatggtttctggtgcccactcctggaagccgctgttccctttctaccttcttaccagagcccaagggcaggcctggtcccggggaagcagcagcttgctgacataagtcagctgcaaaggctgaggagtgtgccctcagagaagcaccgccccccagtcttgtgccagcgcctagagccgcagctcccagggatgctccttccctggaggcagcccaggagagggactctggcagcgttcttcagatttgtggccactgtttctcatttgctggttgactgtttttatttcttaggcttttgctagttttagaaaatagggaagcagcccttgatttgtggattaaaagcaacatttgagcgatgatgcacaacagtccaggaaaatgggcggtggacacttgaggctgaggatgggagttgacatgagcagggagagggaggtgcgcgctgcttatctgtgattgttgctcacctgagtgtggctgattgtgtacatccagcagttacaatttttaaaaattatacttttacatttattttatatttttctcacccccagtaatttccttccaaagaagttcacatgtaataagtagaaattctgtataggaaaaaagcattaaaaatactattataactgcttcatttgctgggaaccattaaaagtaatataaattagctttttccagaaggatccttttgtagcagtgtttatgaatgtaacccccagcaaaatatggctatatattaggggagccagtttggagcagaggcctgaaggtccctgctatgcagccgtggccacagctcgcagcccaagcactgtggagcatccacacctttgatggcaatgcagattggtagcaggttccataggcgtacaaaacagtattaaagctcagtgttttgcatattgttagcatttacaaatatttttgctttagtatgaggaaagtaaggatgggcaaagaagcgatcaaaatagctattgctacaacattttcgaaaacaaagttggggctgtatttctttaaaaagataagcctctaaaaatgcttggcaaaaaaaatatagtgttaaaataggccagtgatattaatgagaaaatgaaagtatgtatcaggaataaagtgatattgcataggagtattgtatttttatgaattttatgccagttgtttacatgtactatatatgttaaattaaaaaaaatcatgagtaatgagggaa

SEQ ID NO: 5994 - DNA, 4870 bp, Homo sapiens
  source 1..4870: mol_type = unassigned DNA; mol_type = unassigned DNA
ccctaagtggccgctccgggcgccttctccctgccccgccgcgtctcgcctgcgcgggctccaagcgcagccttaacaggctccgaaacttgaatcagcgccccgatcccgagagggctcttccttcggccccatcactcccacaatggaagggcggccgcctccggaaggccgtccgcccccgcgtcctcgcaccggccgagccccgcgcgggcgccgaagagctgtttttgcagcagtgttgcactggagccatataacacacctctttgaaaatgaccgtcatttttctcacctctcaacattggaaagggagatggcttttcgcactgaaatgggactatattattcctatttcaagactattgtggaagcaccctcatttttgaatggagtatggatgattatgaatgataaactgactgaatacccccttgtcattaatacattaaaaagattcaatctttaccctgaggtaattttggccagttggtaccggatttataccaaaataatggacttgattggtattcaaaccaagatatgttggacggttaccagaggagaaggactcagtcctattgaaagctgtgaaggattgggagatcctgcttgcttttatgttgctgtaatttttattttaaatggactaatgatggcattattcttcatatatggcacatatttaagtggcagccgattaggaggcctggttacagtgttgtgcttctttttcaatcatggagagtgtacccgtgtaatgtggacaccacctctccgtgaaagcttctcatatccatttcttgttcttcagatgttgctagtgactcatattctcagggctacaaaactttatagaggaagcttgattgcactctgcatttccaatgtatttttcatgcttccttggcagtttgctcagtttgtacttcttactcagattgcatcattatttgcagtatatgttgtcgggtacattgatatatgtaaattacggaagatcatttatatacacatgatttctcttgcactttgttttgttttgatgtttgggaactcaatgttattaacttcttattatgcttcttctttggtaattatttggggtattctggcaatgaaaccacatttcctgaaaataaatgtatctgaacttagtttatgggttattcaaggatgtttttggttatttggaactgtcatacttaaatacttgacatctaaaatttttggtattgcagatgacgctcatattggcaacttactaacatcaaaattctttagttataaggattttgatactttattgtatacctgtgcagcggagtttgactttatggaaaaagagactccactgagatacacaaagacattattgcttccagttgttcttgtagtgtttgttgctattgttagaaagattattagtgatatgtggggtgtcttagctaaacaacagacacatgtaagaaaacaccagtttgatcatggagagctggtttaccatgcattgcaattgttagcatatacagcccttggtattttaattatgagactaaaactcttcttgacaccacacatgtgtgttatggcatcactgatctgctcaagacagctatttggatggctcttttgcaaagtacatcctggtgctattgtgtttgctatattagcagcaatgtcaatacaaggttcagcaaatctgcaaacccagtggaatattgtaggggagttcagcaatttgccccaagaagaacttatagaatggatcaaatatagtactaaaccagatgcagtgtttgcgggtgccatgcccacgatggcaagtgttaagctctctgcacttcggcccattgtgaatcatccacattatgaagacgcaggcttgagagccagaacaaaaatagtatactcaatgtatagtcggaaagcagccgaagaagtgaagcgagaactgataaagttaaaagtgaactattacattctagaagagtcatggtgtgtaagaagatccaagcctggttgcagtatgcctgaaatttgggatgtagaagatcctgccaatgctgggaaaactcccttatgtaacctcttggtgaaggattccaaacctcacttcaccactgtattccagaacagtgtttacaaagtcctagaagttgtaaaagaatgactgctacatgacctgctgcctacggagaactacatctgtaatggttttaatgttttgctaagtcatgtgttgttcatatcccaaaaacttttataggtaactgttttcaaatagaaaacgttttatttggtcaatttgaatgtcattctaattataaaaatgacttacacctttatcaattggttactatttcaatgcaccctttaaaatttgctatgcaaatgagtatatgcttgtacttgactttaatatttgtgctaaagtgagcaaagctacctgtataaagaaaacacagtgggttgtgacaaggatgacatgaaaatacaggacaattctgacaatgtaggggctgattttatagtgtaagaactattaatgccccttgcttcttttttctgcctcttgctcttgtcttttggacatttcagtgattgtaagttcttcggtcatgtcagcccctgtcatcaacttgagttacagtagatggggcagacatggagtgtttgctatatagaactatctgtttgttttacttccttgtgcgctttttgttctctgttctcttgttaatgaagcttttcctgcccattattaatccaaactcttggaccttgtggttaggaaattcccttaacttccagccatatggcattatcgtgtctctttctctctctctcttgctctctctcttctcctcttccccatattttctgtcaaataagtactgtttactcatttagttgcttatcaagtacttattcttggttttaaaaaaaattaatggtaactgtatttttctcatttttagcattattcaaatgtttatattttaatacctttaaaccactttaaagttttttcatgtttaattatagttttaagaaaaactattttgaacaaccccaaatatagtgcatctagaaactaatgtatatttgattagacatcatttatagtggaacagtagactgtagtacatggtaatttttcttttactattaagatacaataaaacatgactaattttgctgtcaaaaatgtaaagaataatgataaatggagtttttatattttacttttaagattgcctgtctttaataagacaaagccttaagccttatgttataattttggttctaaaaaccatcatttcagtataaggaataagtatatttcgtcctcctctttagtttttttcttcctatttatttttattttgaaaaatttctacaccttctttgaattccttgtatgaatttttgtttcttagaagttaatttgtgtgaaatgagattcttcaaaacgatgaaacctcatagctctgagaaaaggttttagggttttaaattctaagcaaagcgtgactatggctgacagactacacatttaattatacagcttctctttcttaaccacaggcagattaacctcattgtggattgtccttcagaccttagtcctcaggcatggtttctggtgcccactcctggaagccgctgttccctttctaccttcttaccagagcccaagggcaggcctggtcccggggaagcagcagcttgctgacataagtcagctgcaaaggctgaggagtgtgccctcagagaagcaccgccccccagtcttgtgccagcgcctagagccgcagctcccagggatgctccttccctggaggcagcccaggagagggactctggcagcgttcttcagatttgtggccactgtttctcatttgctggttgactgtttttatttcttaggcttttgctagttttagaaaatagggaagcagcccttgatttgtggattaaaagcaacatttgagcgatgatgcacaacagtccaggaaaatgggcggtggacacttgaggctgaggatgggagttgacatgagcagggagagggaggtgcgcgctgcttatctgtgattgttgctcacctgagtgtggctgattgtgtacatccagcagttacaatttttaaaaattatacttttacatttattttatatttttctcacccccagtaatttccttccaaagaagttcacatgtaataagtagaaattctgtataggaaaaaagcattaaaaatactattataactgcttcatttgctgggaaccattaaaagtaatataaattagctttttccagaaggatccttttgtagcagtgtttatgaatgtaacccccagcaaaatatggctatatattaggggagccagtttggagcagaggcctgaaggtccctgctatgcagccgtggccacagctcgcagcccaagcactgtggagcatccacacctttgatggcaatgcagattggtagcaggttccataggcgtacaaaacagtattaaagctcagtgttttgcatattgttagcatttacaaatatttttgctttagtatgaggaaagtaaggatgggcaaagaagcgatcaaaatagctattgctacaacattttcgaaaacaaagttggggctgtatttctttaaaaagataagcctctaaaaatgcttggcaaaaaaaatatagtgttaaaataggccagtgatattaatgagaaaatgaaagtatgtatcaggaataaagtgatattgcataggagtattgtatttttatgaattttatgccagttgtttacatgtactatatatgttaaattaaaaaaaatcatgagtaatgagggaa

SEQ ID NO: 5995 - DNA, 255 bp, Homo sapiens
  source 1..255: mol_type = unassigned DNA; mol_type = unassigned DNA
gtttgcgggtgccatgcccacgatggcaagtgttaagctctctgcacttcggcccattgtgaatcatccacattatgaagacgcaggcttgaggcctggttgcagtatgcctgaaatttgggatgtagaagatcctgccaatgctgggaaaactcccttatgtaacctcttggtgaaggattccaaacctcacttcaccactgtattccagaacagtgtttacaaagtcctagaagttgtaaaagaatgactgct

SEQ ID NO: 5996 - DNA, 619 bp, Homo sapiens
  source 1..619: mol_type = unassigned DNA; mol_type = unassigned DNA
tgtacccgtgtaatgtggacaccacctctccgtgaaagcttctcatatccatttcttgttcttcagatgttgctagtgactcatattctcagggctacaaaactttatagaggaagcttgattgcactctgcatttccaatgtatttttcatgcttccttggcagtttgctcagtttgtacttcttactcagattgcatcattatttgcagtatatgttgtcgggtacattgatatatgtaaattacggaagatcatttatatacacatgggtattctggcaatgaaaccacatttcctgaaaataaatgtatctgaacttagtttatgggttattcaaggatgtttttggttatttggaactgtcatacttaaatacttgacatctaaaatttttggtattgcagatgacgctcatattggcaacttactaacatcaaaattctttagttataaggattttgatactttattgtatacctgtgcagcggagtttgactttatggaaaaagagactccactgagatacacaaagacattattgcttccagttgttcttgtagtgtttgttgctattgttagaaagattattagtgatatgtggggtgtcttagctaaac

SEQ ID NO: 5997 - DNA, 293 bp, Homo sapiens
  source 1..293: mol_type = unassigned DNA; mol_type = unassigned DNA
ggtattctggcaatgaaaccacatttcctgaaaataaatgtatctgaacttagtttatgggttattcaaggatgtttttggttatttggaactgtcatacttaaatacttgacatctaaaatttttggtattgcagatgacgtaagtgcattttttacttaaatttgaaagacttgaaaagaatcgaataggctaagaataaattgagttattcaagtatcactattaaatgaaattctaggatgaagtctgttcacctattattttatttaatataatagaaagtaaatgta

SEQ ID NO: 5998 - DNA, 574 bp, Homo sapiens
  source 1..574: mol_type = unassigned DNA; mol_type = unassigned DNA
aggaagaccactgtttgtaaagtgcaaaggtctatcgtgctaccctcagtgtatactatggtttttaattcttcgtcttacgttttcttataattttgatactcatgtggcatgaacatcattccttacaaagttttcttaaattttaacaatggaattcagactattcaactggcttttcaggctgatgaattgtctttttgatacttttcagctacttggtgtagctgaaaagcatgcttagacatcacttttttaggaaaagtgtacccgtgtaatgtggacaccacctctccgtgaaagcttctcatatccatttcttgttcttcagatgttgctagtgactcatattctcagggctacaaaactttatagaggaagcttgattgcactctgcatttccaatgtatttttcatgcttccttggcagtttgctcagtttgtacttcttactcagattgcatcattatttgcagtatatgttgtcgggtacattgatatatgtaaattacggaagatcatttatatacacatgggtattctggcaatgaaaccacatttcctgaaaataaat

SEQ ID NO: 5999 - DNA, 461 bp, Homo sapiens
  source 1..461: mol_type = unassigned DNA; mol_type = unassigned DNA
gaaggattctgaggtcccaggattttgctgttcttcagctgatatttctgtatgcattgttttggtttgataggtggaagtttactctttctaatattgccatttttcaggatcctattgtgctccatttttagctgtcatacatgtaattttataattattctaatagtttcctcagttaattttacttagactcatttattgaactaacgacacattggagggaaaggtaacatactgcatgttggggggcggattcttaaatgtctgcttttgtgattacacatttccccgactcctcattctccagtggcagccgattaggaggcctggttacagtgttgtgcttctttttcaatcatggagagtgtacccgtgtaatgtggacaccacctctccgtgaaagcttctcatatccatttcttgttcttcagatgttgctagtgactcatattctcagg

SEQ ID NO: 6000 - DNA, 566 bp, Homo sapiens
  source 1..566: mol_type = unassigned DNA; mol_type = unassigned DNA
acttgtgcctcgtcccttatcagctccccatgagattccaggctgctattttaatactctgttactatcttaaatcgggtcgcacccgttcttcttgtcgctgtttttgcagcagtgttgcactggagccatataacacacctctttgaaaatgaccgtcatttttctcacctctcaacattggaaagggagatggcttttcgcactgaaatgggactatattattcctatttcaagactattgtggaagcaccctcatttttgaatggagtatggatgattatgaatgataaactgactgaatacccccttgtcattaatacattaaaaagattcaatctttaccctgaggtaattttggccagttggtaccggatttataccaaaataatggacttgattggtattcaaaccaagatatgttggacggttaccagaggagaaggactcagtcctattgaaagctgtgaaggattgggagatcctgcttgcttttatgttgctgtaatttttattttaaatggactaatgatggcattattcttcatatatggcacatatttaag

SEQ ID NO: 6001 - DNA, 607 bp, Homo sapiens
  source 1..607: mol_type = unassigned DNA; mol_type = unassigned DNA
atgcaaacagacagtgagtggaggacaccagcaaagtaataaggaatgtttcaaaaggatatgatgaactgaggcttatcgagtcagggagcagaaagctgaaataagaccgctaagctctaaacaaatccgttaaagcttcacagggcagagccagaacaaaaatagtatactcaatgtatagtcggaaagcagccgaagaagtgaagcgagaactgataaagttaaaagtgaactattacattctagaagagtcatggtgtgtaagaagatccaagcctggttgcagtatgcctgaaatttgggatgtagaagatcctgccaatgctgggaaaactcccttatgtaacctcttggtgaaggattccaaacctcacttcaccactgtattccagaacagtgtttacaaagtcctagaagttgtaaaagaatgactgctacatgacctgctgcctacggagaactacatctgtaatggttttaatgttttgctaagtcatgtgttgttcatatcccaaaaacttttataggtaactgttttcaaatagaaaacgttttatttggtcaatttgaatgtcattctaattataaaaatgacttacacctt

SEQ ID NO: 6002 - DNA, 4060 bp, Homo sapiens
  source 1..4060: mol_type = unassigned DNA; mol_type = unassigned DNA
gcgaatggcttccaacgcatgcgccccaccccacatttcacagtcgccatgacgaccgggaggtccgcaacggctgcggggacaagtccgttgaggctgccaggcgagtcaggtctctctggacctcgcctgactcggctgggctgtgcctgaaattgacccagctccaccatactccttgattatgagaaaacaaggagtaagctcaaagcggctgcaatcttccggccgcagccagtctaaggggcggcgcggggcctccctcgcccgggagccggaggtagaggaggagatggaaaagtcggccctaggcggcgggaaactgccaaggggctcctggaggtcctccccggggaggatccaaagtctgaaagagcgaaaaggcttggagctagaggtggtggccaagacctttcttctcggccccttccagttcgtccgtaattccctggcgcagctccgggaaaaggtgcaggaactgcaggcgcggcggttctccagcagaaccactctcggcatcgctgtctttgtggcaattttacattggttacatttagtaacactttttgaaaatgatcgtcatttctctcacctctcatctttggaacgggagatgacttttcgcactgaaatgggactttattattcatacttcaagaccattattgaagcaccttcgtttttggaaggactgtggatgattatgaatgacaggcttactgaatatcctcttataattaatgcaataaaacgcttccatctttatccagaggtaatcatagcctcctggtattgcacattcatgggaataatgaatttatttggactagaaactaagacctgctggaatgtcaccagaatagaacctcttaatgaagttcaaagctgtgaaggattgggagatcctgcttgcttttatgttggtgtaatctttattttaaatggactaatgatgggattgttcttcatgtatggagcatacctgagtgggactcaactgggaggtcttattacagtactgtgcttctttttcaaccatggagaggccacccgtgtgatgtggacaccacctctccgtgaaagtttttcctatcctttccttgtacttcagatgtgtattttaactttgattctcaggacctcaagcaatgatagaaggcccttcattgcactctgtctttccaatgttgcttttatgcttccctggcaatttgctcagtttatactttttacacagatagcatcattatttcccatgtatgttgtgggatacattgaaccaagcaaatttcagaagatcatttatatgaacatgatttcagttacccttagtttcattttgatgtttggaaattcaatgtacttatcttcttattattcttcatctttgttaatgacgtgggcaataattctaaagagaaatgaaattcaaaaactgggagtatctaaactcaacttttggctaattcaaggtagtgcctggtggtgtggaacaatcattttgaaatttctgacatctaaaatcttaggcgtttcagaccacattcgcctgagtgatcttatagcagccagaatcttaaggtatacagattttgatactttaatatatacctgtgctcccgaatttgacttcatggaaaaagcgactccgctgagatacacaaagacattattgcttccagttgttatggtgattacatgttttatctttaaaaagactgttcgtgatatttcatatgttttagctacaaacatttatctaagaaaacagctccttgaacacagtgagctggcttttcacacattgcagttgttagtgtttactgcccttgccattttaattatgaggctaaagatgtttttgacaccgcacatgtgtgttatggcttccttgatatgctctcgacagctctttggctggctttttcgcagagttcgttttgagaaggttatctttggcattttaacagtgatgtcaatacaaggttatgcaaacctccgtaatcaatggagcataataggagaatttaataatttgcctcaggaagaacttttacagtggatcaaatacagtaccacatcagatgctgtctttgcaggtgccatgcctacaatggcaagcatcaagctgtctacacttcatcccattgtgaatcatccacattacgaagatgcagacttgagggctcggacaaaaatagtttattctacatatagtcgaaaatctgccaaagaagtaagagataaattgttggagttacatgtgaattattatgttttagaagaggcatggtgtgttgtgagaactaagcctggttgcagtatgcttgaaatctgggatgtggaagacccttccaatgcagctaaccctcccttatgtagcgtcctgctcgaagacgccaggccttacttcaccacagtatttcagaatagtgtgtacagagtattaaaggttaactgagaaggatactacccattttactatggcacaatgccgtgtgtcaaaaacaatcaccctttggcttattcacattaataaaaatcacaagctttaataacagacacttaaaaataagataaaaatggattggaaatttttctgattactaaaaggtaaattacttttctgttcattgaatgtcagccttattaagcttgtcatataagttattaaatcattcatgtcatactgcataaacaaatgttcatttcagaattttaaagagaaatgtatataaaagaacaatgaattttaataaatcaggggtatgtaagtcctttttcatccaactaggtgaattgcttcagattttctctagtaccagagggtacctcctcaaactctttgaaccacttaaggcagaagaatgcaagctctgaaatgacatccttaaaatgctgatactggtcacagcctctttacctctgtgaggaaattgtaacagtgtgtcttttaaggtgtttttattttaccagcccttaagaaagatctctaataccttttaatacttttttttaataatttcaagttgaagtgtttttaaaaacactttgttttgtaatgttttgaatctcttgagatgtgtttaccccactagatacatatttgccactggttagttctccatctaagctcaagaggttattcatctctctttagattccagtggcttttcttttaacatccaggtaaaacagaaactgctatggtatacaaccaagttttggggttaaacataatcagaaaagaaaatccagttaaatttatgaagtgagattttcagatcctagatcttgaataaaggaaaggtcttttcatcttgatggccccaaagcttgttggtcatggtctttatttctggccactatcttcttaaataatatatttttaagccctcatttatttttggttttgggtgaggaaagtcatgttttctaagtcctctcccctaataaaacctacccaacaatagtgctttgaaaagtggtagttatcttgaagatactcttgccaaatgcaaagataaacattctttttgtctgctttataaatatgaaatatgccagatctatagtattttaatgtgcatctactttaaatgagtcatcttggggtttttataattcccttatgttcttgcccctctacacttgaaataacaaaatgccttaattttatggattagttctcttatagtagacaggcagctatatgcagcaaaaccaataaagttatttttcaactttcatagttgtaaaatatcttataacagaatacaaaacagctaagaaaacatgccacattttattttagcattttcaaataatttgtttttggtgtaagcacaggataaaaaaggagagcgtcaaagaaaagagacataacacctaacattcataaaaattaacaaagtatattttggatgatgtttttacaggaaatattttaaataagttggtagaacttttaaaatggtactgtattagctaataaaatattcagtacaaatatatgtttggatttatgcattaaaaaactaataaaattatttccaacttt

SEQ ID NO: 6003 - DNA, 850 bp, Homo sapiens
  source 1..850: mol_type = unassigned DNA; mol_type = unassigned DNA
tcatgtatatcggtgttccatccagtgagtattgagatttcaatttgctagtaagatttttttagtctattctattatcatttattttaaaatcttttaaattattgtttaaatttaaagggctcggacaaaaatagtttattctacatatagtcgaaaatctgccaaagaagtaagagataaattgttggagttacatgtgaattattatgttttagaagaggcatggtgtgttgtgagaactaagcctggttgcagtatgcttgaaatctgggatgtggaagacccttccaatgcagctaaccctcccttatgtagcgtcctgctcgaagacgccaggccttacttcaccacagtatttcagaatagtgtgtacagagtattaaaggttaactgagaaggatactacccattttactatggcacaatgccgtgtgtcaaaaacaatcaccctttggcttattcacattaataaaaatcacaagctttaataacagacacttaaaaataagataaaaatggattggaaatttttctgattactaaaaggtaaattacttttctgttcattgaatgtcagccttattaagcttgtcatataagttattaaatcattcatgtcatactgcataaacaaatgttcatttcagaattttaaagagaaatgtatataaaagaacaatgaattttaataaatcaggggtatgtaagtcctttttcatccaactaggtgaattgcttcagattttctctagtaccagagggtacctcctcaaactctttgaaccacttaaggcagaagaatgcaagctctgaaatgacatccttaaaatgctgatactggtcacag

SEQ ID NO: 6004 - DNA, 1339 bp, Homo sapiens
  source 1..1339: mol_type = unassigned DNA; mol_type = unassigned DNA
tacactgtatatataggttgaatagaaggtcatcctattcatttattaatgagaggtacaatctctagggatctgtaaaatctattttgtcttaaccaaagaacaaatttttgacatatcttgaataggatgactataaattatgacttttaaattgttgtaatttttgtactattatctgatatttttatttttatgtattttcgtaagtagtttagagatagtcacattttaaaaatctaagatcaagcaaatgaagcttatttttatgtattcatagtataaaagaccttcagtaaataggtaatatttttgttttattctagaaaacagctccttgaacacagtgagctggcttttcacacattgcagttgttagtgtttactgcccttgccattttaattatgaggctaaagatgtttttgacaccgcacatgtgtgttatggcttccttgatatgctctcgacagctctttggctggctttttcgcagagttcgttttgagaaggttatctttggcattttaacagtgatgtcaatacaaggttatgcaaacctccgtaatcaatggagcataataggagaatttaataatttgcctcaggaagaacttttacagtggatcaaatacagtaccacatcagatgctgtctttgcaggtgccatgcctacaatggcaagcatcaagctgtctacacttcatcccattgtgaatcatccacattacgaagatgcagacttgagggctcggacaaaaatagtttattctacatatagtcgaaaatctgccaaagaagtaagagataaattgttggagttacatgtgaattattatgttttagaagaggcatggtgtgttgtgagaactaagcctggttgcagtatgcttgaaatctgggatgtggaagacccttccaatgcagctaaccctcccttatgtagcgtcctgctcgaagacgccaggccttacttcaccacagtatttcagaatagtgtgtacagagtattaaaggttaactgagaaggatactacccattttactatggcacaatgccgtgtgtcaaaaacaatcaccctttggcttattcacattaataaaaatcacaagctttaataacagacacttaaaaataagataaaaatggattggaaatttttctgattactaaaaggtaaattacttttctgttcattgaatgtcagccttattaagcttgtcatataagttattaaatcattcatgtcatactgcataaacaaatgttcatttcagaattttaaagagaaatgtatataaaagaacaatgaattttaataaatcaggggtatgtaagtc

SEQ ID NO: 6005 - DNA, 1173 bp, Homo sapiens
  source 1..1173: mol_type = unassigned DNA; mol_type = unassigned DNA
caataattctaaagagaaatgaaattcaaaaactgggagtatctaaactcaacttttggctaattcaaggtagtgcctggtggtgtggaacaatcattttgaaatttctgacatctaaaatcttaggcgtttcagaccacattcgcctgagtgatcttatagcagccagaatcttaaggtatacagattttgatactttaatatatacctgtgctcccgaatttgacttcatggaaaaagcgactccgctgagatacacaaagacattattgcttccagttgttatggtgattacatgttttatctttaaaaagactgttcgtgatatttcatatgttttagctacaaacatttatctaagacagatggagcacagggaaatgtgtcttggcattctaaaaaagaatgaatggagaaccctggacactgttcccataaggagtacatgaagggacttgggatatttaattggataatagaagattgaaggaaaacagctccttgaacacagtgagctggcttttcacacattgcagttgttagtgtttactgcccttgccattttaattatgaggctaaagatgtttttgacaccgcacatgtgtgttatggcttccttgatatgctctcgacagatgctgtctttgcaggtgccatgcctacaatggcaagcatcaagctgtctacacttcatcccattgtgaatcatccacattacgaagatgcagacttgagggctcggacaaaaatagtttattctacatatagtcgaaaatctgccaaagaagtaagagataaattgttggagttacatgtgaattattatgttttagaagaggcatggtgtgttgtgagaactaagcctggttgcagtatgcttgaaatctgggatgtggaagacccttccaatgcagctaaccctcccttatgtagcgtcctgctcgaagacgccaggccttacttcaccacagtatttcagaatagtgtgtacagagtattaaaggttaactgagaaggatactacccattttactatggcacaatgccgtgtgtcaaaaacaatcaccctttggcttattcacattaataaaaatcacaagctttaataacagacacttaaaaataagataaaaatggattggaaatttttctgattactaaaaggtaaattac

SEQ ID NO: 6006 - DNA, 1549 bp, Homo sapiens
  source 1..1549: mol_type = unassigned DNA; mol_type = unassigned DNA
tttcacagtcgccatgacgaccgggaggtccgcaacggctgcggggacaagtccgttgaggctgccaggcgagtcaggtctctctggacctcgcctgactcggctgggctgtgcctgaaattgacccagctccaccatactccttgattatgagaaaacaaggagtaagctcaaagcggctgcaatcttccggccgcagccagtctaaggggcggcgcggggcctccctcgcccgggagccggaggtagaggaggagatggaaaagtcggccctaggcggcgggaaactgccaaggggctcctggaggtcctccccggggaggatccaaagtctgaaagagcgaaaaggcttggagctagaggtggtggccaagacctttcttctcggccccttccagttcgtccgtaattccctggcgcagctccgggaaaaggtgcaggaactgcaggcgcggcggttctccagcagaaccactctcggcatcgctgtctttgtggcaattttacattgggactttattattcatacttcaagaccattattgaagcaccttcgtttttggaaggactgtggatgattatgaatgacaggcttactgaatatcctcttataattaatgcaataaaacgcttccatctttatccagaggtaatcatagcctcctggtattgcacattcatgggaataatgaatttatttggactagaaactaagacctgctggaatgtcaccagaatagaacctcttaatgaagttcaaagctgtgaaggattgggagatcctgcttgcttttatgttggtgtaatctttattttaaatggactaatgatgggattgttcttcatgtatggagcatacctgagtgggactcaactgggaggtcttattacagtactgtgcttctttttcaaccatggagaggacctcaagcaatgatagaaggcccttcattgcactctgtctttccaatgttgcttttatgcttccctggcaatttgctcagtttatactttttacacagatagcatcattatttcccatgtatgttgtgggatacattgaaccaagcaaatttcagaagatcatttatatgaacatgatttcagttacccttagtttcattttgatgtttggaaattcaatgtacttatcttcttattattcttcatctttgttaatgacgtgggcaataattctaaagagaaatgaaattcaaaaactgggagtatctaaactcaacttttggctaattcaaggtagtgcctggtggtgtggaacaatcattttgaaatttctgacatctaaaatcttaggcgtttcagaccacattcgcctgagtgatcttatagcagccagaatcttaaggtatacagattttgatactttaatatatacctgtgctcccgaatttgacttcatggaaaaagcgactccgctgagatacacaaagacattattgcttccagttgttatggtgattacatgttttatctttaaaaagactgttcgtgatatttcatatgttttagctacaaacatttatctaag

SEQ ID NO: 6007 - DNA, 603 bp, Homo sapiens
  source 1..603: mol_type = unassigned DNA; mol_type = unassigned DNA
aactacataactagtaacaagaaactgaactggggaagcagagagtaaatggagaattttgatgacatttcatgatactaagattttccatcagagctccttcctacataacaaatgctgatgataataataatattctatattggaagtgagaaattctgccaagaagtctcatgctgccaatagcctacaaagaatgaaattataaccccagctcaattggtgctgcatgtttaaagtattccgtctgtttaacttcataaaagttggcccctttcagatagcatcattatttcccatgtatgttgtgggatacattgaaccaagcaaatttcagaagatcatttatatgaacatgatttcagttacccttagtttcattttgatgtttggaaattcaatgtacttatcttcttattattcttcatctttgttaatgacgtgggcaataattctaaagagaaatgaaattcaaaaactgggagtatctaaactcaacttttggctaattcaaggtagtgcctggtggtgtggaacaatcattttgaaatttctgacatctaaaatcttaggcgtttcagaccacattcgcctgagtgatct

SEQ ID NO: 6008 - DNA, 882 bp, Homo sapiens
  source 1..882: mol_type = unassigned DNA; mol_type = unassigned DNA
gcagagctgtgcgcactgggggtgctgcaggcgctggggagagtgtggagaggctgcgtggagctgcgcgctcggggtgggggctgcactcccaatgaagcgcgtgaagggcaagcggtgatgggttctgcgccagtggggctgggagcccgtccggggctgtacatggggctgcgcgcaagctgtctttgtggcaattttacattggttacatttagtaacactttttgaaaatgatcgtcatttctctcacctctcatctttggaacgggagatgacttttcgcactgaaatgggactttattattcatacttcaagaccattattgaagcaccttcgtttttggaaggactgtggatgattatgaatgacaggcttactgaatatcctcttataattaatgcaataaaacgcttccatctttatccagaggtgagtcataatttgagacaaataatatttgtagagtgatcctctttgtcagataaaaatagtaagcacaatcttgttaagaaagggaggggacgtttcaggtttattaattgtgtgtatccttatagttgagtagaatatcataagttcctctcttaaaatttaaagaccccagaaactgttctctcatgaactcgaagaatgaaccttagtgtgtaaataatggccagggtaatagacaagccaaatggaaaagagagtcatgggagccaaaaagttctaaatagggatgggcttttggctttggacacctcgtgggtgagcatgatgaccacgtgaagggacagtaagagtgatgagcttgaatagtgatcttggagttaagttagtaaagtaagatttatttagtcacacagccagaaatctattactattttccaacacttagc

SEQ ID NO: 6009 - DNA, 491 bp, Homo sapiens
  source 1..491: mol_type = unassigned DNA; mol_type = unassigned DNA
gtcgccatgacgaccgggaggtccgcaacggctgcggggacaagtccgttgaggctgccaggcgagtcaggtctctctggacctcgcctgactcggctgggctgtgcctgaaattgacccagctccaccatactccttgattatgagaaaacaaggaaggaattgaaaacaagcagttccccaaccaaacgggcacaggctgcgtttgcagctcctgtaaaagctccatacccagagcagtgtctcctagctcccagctgtctttgtggcaattttacattggttacatttagtaacactttttgaaaatgatcgtcatttctctcacctctcatctttggaacgggagatgacttttcgcactgaaatgggactttattattcatacttcaagaccattattgaagcaccttcgtttttggaaggactgtggatgattatgaatgacaggcttactgaatatcctcttataattaatgcaataaaacgct

SEQ ID NO: 6010 - DNA, 505 bp, Homo sapiens
  source 1..505: mol_type = unassigned DNA; mol_type = unassigned DNA
cccaatgaagcgcgtgaagggcaagcggtgatgggttctgcgccagtggggctgggagcccgtccggggctgtacatggggctgcgcgcaagtcgccatgacgaccgggaggtccgcaacggctgcggggacaagtccgttgaggctgccaggcgagtcaggtctctctggacctcgcctgactcggctgggctgtgcctgaaattgacccagctccaccatactccttgattatgagaaaacaaggagtaagctcaaagcggctgcaatcttccggccgcagccagtctaaggggcggcgcggggcctccctcgcccgggagccggaggtagaggaggagatggaaaagtcggccctaggcggcgggaaactgccaaggggctcctggaggtcctccccggggaggatccaaagtctgaaagagcgaaaaggcttggagctagaggtggtggccaagacctttcttctcggccccttccagttcgtccgtaattccctggcgca

SEQ ID NO: 6011 - DNA, 680 bp, Homo sapiens
  source 1..680: mol_type = unassigned DNA; mol_type = unassigned DNA
ggcggcggccaggagctacagctgtgggctgcactcccggcgtggagtctccttcctgcccgcgcaggccccggcgccccagcgaaacgctccggccgctcccctctcccaacactctggttcccgggccgcctgcggggacgcggttggcggcgacaccggaggggggtgggtcaggaagtgggggcgcggcggccaggagcgggcccccggaggccgaggggttcggcgacgcggagggagggagagtctgggccgcgcgggagccgcagggcgccctagccttcgcagaaacgatggcggaggaagaaggaccacctgtagagctgcgccaaagaaaaaagccaaagtcttcagaaaataaggaatctgccaaagaagagaaaatcagtgacattccaattcctgaaagagctccaaaacgtgtttacgaactgacacacaataacaaaactgtatctctgaagactataaatgcagtgcagcaaatgtctctgtatccggaacttattgctagcattttatatcaagccactggtagcaatgagattattgagccagtgtatttctatattggcattgtttttggattgcaaggaatatatgttactgctttatttgttacaagttggcttatgagtggaacatggctagcaggaatgcttactgttgcgtggttc

SEQ ID NO: 6012 - DNA, 581 bp, Homo sapiens
  source 1..581: mol_type = unassigned DNA; mol_type = unassigned DNA
gtcaggaagtgggggcgcggcggccaggagcgggcccccggaggccgaggggttcggcgacgcggagggagggagagtctgggccgcgcgggagccgcagggcgccctagccttcgcagaaacgatggcggaggaagaaggaccacctgtagagctgcgccaaagaaaaaagccaaagtcttcagaaaataaggaatctgccaaagaagagaaaatcagtgacattccaattcctgaaagagctccaaaacgagcttgaacgggaaatcacgtttcagggtgacagtgccatttattactcctattataaagatatgttaaaggcaccttcatttgaaagaggtgtttacgaactgacacacaataacaaaactgtatctctgaagactataaatgcagtgcagcaaatgtctctgtatccggaacttattgctagcattttatatcaagccactggtagcaatgagattattgagccagtgtatttctatattggcattgtttttggattgcaaggaatatatgttactgctttatttgttacaagttggcttatgagtggaacatggctagcaggaatg

SEQ ID NO: 6013 - DNA, 6197 bp, Homo sapiens
  source 1..6197: mol_type = unassigned DNA; mol_type = unassigned DNA
aggagcgggcccccggaggccgaggggttcggcgacgcggagggagggagagtctgggccgcgcgggagccgcagggcgccctagccttcgcagaaacgatggcggaggaagaaggaccacctgtagagctgcgccaaagaaaaaagccaaagtcttcagaaaataaggaatctgccaaagaagagaaaatcagtgacattccaattcctgaaagagctccaaaacatgtattatttcaacgctttgcaaagattttcattggctgtcttgcagcggttactagtggtatgatgtatgctctctacttatcagcataccatgaacggaaattctggttttccaacaggcaggagcttgaacgggaaatcacgtttcagggtgacagtgccatttattactcctattataaagatatgttaaaggcaccttcatttgaaagaggtgtttacgaactgacacacaataacaaaactgtatctctgaagactataaatgcagtgcagcaaatgtctctgtatccggaacttattgctagcattttatatcaagccactggtagcaatgagattattgagccagtgtatttctatattggcattgtttttggattgcaaggaatatatgttactgctttatttgttacaagttggcttatgagtggaacatggctagcaggaatgcttactgttgcgtggttcgttattaacagggtagatacaacaagaattgaatactccattcctttaagagaaaactgggcactaccatattttgcatgccaaattgctgcacttacaggctatttaaaaagcaacttaaatacttatggagagaggttttgctacttgttgatgagtgcttcaacttacacatttatgatgatgtgggagtatagccactatctcctgtttcttcaagcaatatctctattcctgctagataccttttcagtggagcaaagtgacaaggtttatgaagtttataaaatctacatattttccctctttctgggatatttactacagtttgagaatccagctttgttggtatctcctttattaagtttagtagcagccttaatgcttgctaagtgccttcagctgaatgtgaagaaaggaagttttgtagctaaaataataaaagtgattaatttttacttggtgtgtactctgacaataacattgaatattataatgaagatgtttgtcccacacaaagaaaatgggcacatgctgaaattccttgaagtaaaatttggactaaatatgaccaagaattttacaatgaattggctcctctgtcaagaatccctgcaggcaccatctcaagatttttttctgcgattgacacagtcttctttattacctttctacattctagtgttaattatttgttttctttctatgttgcaagttatttttaggaggattaatggtaagtccctgaaggaaactgttactcttgaagatggacgaattggagaaagaccagaaataatttatcatgtaattcacactattttattgggttctcttgcaatggttatagaaggcttgaagtacatctggattccttatgtgtgcatgttagcagcatttggtgtatgttctcccgaactttggatgacacttttcaagtggcttcgattaagaactgtacacccaatattgttggctcttattctgagcatggccgtgcctactataataggtctcagcttatggaaagagttttttcccagattaatgacagaattaatggaactacaggaattctatgacccagatacagtggaacttatgacctggataaaaaggcaagctccagttgcagctgtgtttgcagggagtccacagttaatgggtgcgattaaattatgcactggatggatggtgacaagtttgcctctttacaatgatgatgatcttctcaagagaaatgaaaatatctaccaaatctattcaaagcgatctgctgaggatatttataaaatactgacatcttacaaagctaattacctaattgtagaggatgctatctgcaatgaggtgggacccatgagaggctgtagggttaaagatttattagacattgcaaatggccacatggtttgtgaagaaggtgacaagctaacctactcaaaatatgggcgattttgtcatgaggtcaaaattaactattctccatatgtgaattatttcactagagtatactggaacagatcctactttgtatataaaatcaacactgtgatatccttccagtcttgaaaaataacagagccttcatttcaaagactacctgaagtaaaatgcagttttcttctacctactcggtgtcttttgcagatcagagtatggacatttgaaatattgctgcttctttcccccttctgctgttaactggatccagagttctgtgggaaatagaagatcaagcattactgtcctttgattaaatgtgatatctaccactctgcaatattccagacaggtgtcttccttaccgttacatggtctttaacacttttactgattgcaatattttccccataaaatcttcattctattataatattgatcttgaatttgaatatgtgcaaggtcagatacatttctcaaacataacatttaataaataatgtgatataattatttaatagaaagaataattccgaccttcaagcaagtttctgaaggtattttatgatgtataacaactgaagttttacaataaaaactaatttaaatgttagctgaagatatgtggcatttaaattaaaatggaaattatataaaggaaagtgatttttaaggatatacataaagatatatttagaattttcatgatactgttctcctcatctactgcttatgttaagtgagaactttcttagtaatacataatgcatgatgttactgcattttctaaatgactagtaagtgattagttttttcacttatgcctattaatttgataccaatttaatcatgataaaacaataaccgttaacatatattttgttaaatggacatttaaaagaatgttgttcaggttttttttttaaatactgatatggggcatacaatctattcacatgttttctactgaagtactaagtaaaaaaattaaatcattatcagaataaaaatatgtgttctaaaattagcaacaatttctggggatacatgcagatgttgttaaacgtacctctgcatacagatatattataaaacacaagcaatgttatttatgaaactgtgatgcagtcttcaacatcaagaaaaaatgacaactataataaaatttacaacacagtttcacagtctaaatgctatgttcctttaagtattttcatatttttaatcatttattaagagaaaattgtgaaaagttaatttggccttatagagagattcaggatagatgtagcctatagatgtgtcattttaataagttgggatacatgtttagtttttccttatattcctgttcagtgaacagattttcataattctcacttgttaaagtgctgcaaaaattgcattttcagtactctaaattactacattagaagagagcatttctccattgtctttattttctgttatatatgtgttgtaaaagtacactacattagaagggagcttttccgttgtctttattttctgttatacatgtgttgttaaagtacatgcattcttagactaactctcagatgctttgctcttttggagctgaagaattgtttgatggtgatgtcatatatctgatagattagtttcagtggttctcatttcacttttatacgtaatttcttaactatattaagatagttgcaggcagtgtacctcaggttgactctgtacatctgaatagtgagtcactagtattttgcttcaagccttctgaaaatataaccatagttacctaagcacacagtgaatagtcacatggtagtacttgtgattagagcatgtaaaacaatgtaattgaaaagtcagcttccatattttgtaggggaaatagaacaccctactttttatctagtgtgaaatatttaatcgaatttttgttgatttatattatgttacctgtgctgaattaggtttggtacttgtgttttgtttgacatattagtaagttgcttttgcttctttctgtcaacttattttttaaataaaattgatctggaaaaattgttaatgggatgttttaaataatgaatttttcatccagcatcagttgaaaaggaaaagaaagcttcattatggaaatgacaatattgaatatgacagataagtttatttgcttctgttttaactgcagttaatagtactagacaactttaagtggaaagcatttagtttatttcttcacttatttgtagagtgaacaaatgattcacaattctacaagtaattccacttaggtaacttacagttgttaggtttgacaataaagatctactatgagaggagaagaatttatgggttttgggtggaaggaatttctcaaagaaataaaaaatgttctttgcccttgatactgcaaacccactgatacaagtgccttgaatttattattattattattttttatttttttgagatggagtttcactcttgtctcccaggctggagtgcaatggcgcgatcttggctcactgcaacctccgctcgctgcaacctccgcctcccaggttcaagtgattctcctgcctcagcctccggagtagctgggattacaggcacctgccaccaagcacggctaatttttgtatttttagtagaaacggggtttcgccatgttggccaggctggtctcgaactcctgacctcagatgatccactcaccccagcctcccaaagtgctgggattacagacgtgagccactgcgcccggcgcaagtctttgttaaaagtagagatggaggccaggcgcagtggctcactcctgtaatcccagcactttgggaggctgaggcaggcagatcacgaggtcaggagatcgagaccatcttggctaacacggtgaaaccccgtctctactgaaaatacaaaaaattagccgggcagggtggcgggcgcctgtagtcccagctactccgaggctgaagcaggagaatggcgtcaagcggcgaggcggagcttgcggtgagccgagatcatgccgctgcactccagcctgggcaacagagcaagactccatctcaaaaagaaaaaaaaagtagagatgggatctctagcctcctaagttaatttagcctcccaaatgccagacaaagaatctaacataaaatttaccttgaataagatatatgatattgattctgagctgctttgtattttttctgactttggcatctgtatcttggtgctttctgttagactggtagagtttaagaacctaaggagtatgcattgtacttcagtgctaacttttttcttcatttactttctgtgtatataggcagcatattttttttgtagaacattaacccagattgctaatagcttcatgttacggcattcttccacacagtccagattgatttaaggaaaagcagaaatggaagtcaaagtgtgttataaattgagactgaaaaacatgctttaaaaaatagatttaatttcttacactgtgaatagccattgtattgttttgtttctgataaatcagttgttttgggcccctatttttgaactgttaaaaaattttgatgcttttcgtggataaaagtagtgcctctctttatacaactgatggggttttaaaaagtgtaaattgccttttttgttaaacttattttaaatgctttagtatttaaagggtgtatgttattaattaatctgcatatttgtaacgcaaataactacttcctgatttacatctcaatatattcttctttcatttgcccaatttaaaaaatacgtagtctctattgttgctgtttactaatagttttagatcccaatgtgtattagaattatagctacaaaaagttgcaagtaaaatttagcaatttcctattcaaacaggatctcattagtatgttttttaatgtgtagaattaacactttaaaataaacaggtgtgaaaattataaaggaatatatatgacaattattttctgtacattaatgtctaaacattatacttactttttcataataaaggaaattttggaaccaaa

SEQ ID NO: 6014 - DNA, 340 bp, Homo sapiens
  source 1..340: mol_type = unassigned DNA; mol_type = unassigned DNA
gaagagaaaatcagtgacattccaattcctgaaagagctccaaaacgagcttgaacgggaaatcacgtttcagggtgacagtgccatttattactcctattataaagatatgttaaaggcaccttcatttgaaagaggtgtttacgaactgacacacaataacaaaactgtatctctgaagactataaatgcagtgcagcaaatgtctctgtatccggaacttattgctagcattttatatcaagccactggtagcaatgagattattgagccagtgtatttctatattggcattgtttttggattgcaaggaatatatgttactgctttatttgttaca

SEQ ID NO: 6015 - DNA, 1124 bp, Homo sapiens
  source 1..1124: mol_type = unassigned DNA; mol_type = unassigned DNA
aaaatcagtgacattccaattcctgaaagagctccaaaacatgtattatttcaacgctttgcaaagattttcattggctgtcttgcagcggttactagtggtatgatgtatgctctctacttatcagcataccatgaacggaaattctggttttccaacaggcaggagcttgaacgggaaatcacgtttcagggtgacagtgccatttattactcctattataaagatatgttaaaggcaccttcatttgaaagaggtgtttacgaactgacacacaataacaaaactgtatctctgaagactataaatgcagtgcagcaaatgtctctgtatccggaacttattgctagcattttatatcaagccactggtagcaatgagattattgagccagtgtatttctatattggcattgtttttggattgcaaggaatatatgttactgctttatttgttacaagttggcttatgagtggaacatggctagcaggaatgcttactgttgcgtggttcgttattaacagttgcacagacccctggtacagtgtgggaggtgacaacacaggatattaataccaggaggcaggaatcattgggaccgtcttggaggctggctaccacattcaattaactttgctattaatttcatgtaatccctatatctgtcttcatatttgaagaggaaaagatactttctcatgtaaacataatggttttaaagaataagactctcttatgctacttaaacaaaagaataagactctctttagagatcttagtgagaattgtaagaaataaaataaacagaagtctgactgccttatttgatgtcactgatgtatgttgtattgctggagtagaagttaaatagaaaaattgacctggtatattctactcaaatgtatcttttgacaattgaaatgttcttaatagctaagttttaaaaaatgcgtttgtttgctttttgtttatattttattggtatgtatcttgtactgcaaaatacattttaatgccatgaaagaatatgctgtctctttattcatcagctttatagcttttatttatatatgacttcttagaaaagtataaaaagatattaaagtcattccattatattatga

SEQ ID NO: 6016 - DNA, 802 bp, Homo sapiens
  source 1..802: mol_type = unassigned DNA; mol_type = unassigned DNA
gccactggtagcaatgagattattgagccagtgtatttctatattggcattgtttttggattgcaaggaatatatgttactgctttatttgttacaagttggcttatgagtggaacatggctagcaggaatgcttactgttgcgtggttcgttattaacagggcagcatgcaacttggcagctggtctcccttacagtgaatgatccaagagagtatgagagagtgtgccacaatggaagccaggtatctgttataacctcatcttagaaatgatataacatcactctgccatattttgtcagttgcacagacccctggtacagtgtgggaggtgacaacacaggatattaataccaggaggcaggaatcattgggaccgtcttggaggctggctaccacattcaattaactttgctattaatttcatgtaatccctatatctgtcttcatatttgaagaggaaaagatactttctcatgtaaacataatggttttaaagaataagactctcttatgctacttaaacaaaagaataagactctctttagagatcttagtgagaattgtaagaaataaaataaacagaagtctgactgccttatttgatgtcactgatgtatgttgtattgctggagtagaagttaaatagaaaaattgacctggtatattctactcaaatgtatcttttgacaattgaaatgttcttaatagctaagttttaaaaaatgcgtttgtttgctttttgtttatattttattggtatgtatcttgtactgcaaaatacattttaatgccatgaaa

SEQ ID NO: 6017 - DNA, 828 bp, Homo sapiens
  source 1..828: mol_type = unassigned DNA; mol_type = unassigned DNA
tattgagccagtgtatttctatattggcattgtttttggattgcaaggaatatatgttactgctttatttgttacaagttggcttatgagtggaacatggctagcaggaatgcttactgttgcgtggttcgttattaacagggtagatacaacaagaattgaatactccattcctttaagagaaaactgggcactaccatattttgcatgccaaattgctgcacttacaggctatttaaaaagcaacttaaatacttatggagagaggttttgctacttgttgatgagtgcttcaacttacacatttatgatgatgtgggagtatagccactatctcctgtttcttcaagcaatatctctattcctgctagataccttttcagtggagcaaagtgacaagctgaatgtgaagaaaggaagttttgtagctaaaataataaaagtgattaatttttacttggtgtgtactctgacaataacattgaatattataatgaagatgtttgtcccacacaaagaaaatgggcacatgctgaaattccttgaagtaaaatttggactaaatatgaccaagaattttacaatgaattggctcctctgtcaagaatccctgcaggcaccatctcaagatttttttctgcgattgacacagtcttctttattacctttctacattctagtgttaattatttgttttctttctatgttgcaagttatttttaggaggattaatggtaagtccctgaaggaaactgttactcttgaagatggacgaattggagaaagaccagaaataatttatcatgtaattcacactattttattggg

SEQ ID NO: 6018 - DNA, 548 bp, Homo sapiens
  source 1..548: mol_type = unassigned DNA; mol_type = unassigned DNA
ctggattccttatgtgtgcatgttagcagcatttggtgtatgttctcccgaactttggatgacacttttcaagtggcttcgattaagaactgtacacccaatattgttggctcttattctgagcatggccgtgcctactataataggtctcagcttatggaaagagaaggcaagctccagttgcagctgtgtttgcagggagtccacagttaatgggtgcgattaaattatgcactggatggatggtgacaagtttgcctctttacaatgatgatgatcttctcaagagaaatgaaaatatctaccaaatctattcaaagcgatctgctgaggatatttataaaatactgacatcttacaaagctaattacctaattgtagaggatgctatctgcaatgaggtgggacccatgagaggctgtagggttaaagatttattagacattgcaaatggccacatggtttgtgaagaaggtgacaagctaacctactcaaaatatgggcgattttgtcatgaggtcaaaattaactattctccatatgtgaat

SEQ ID NO: 6019 - DNA, 4412 bp, Homo sapiens
  source 1..4412: mol_type = unassigned DNA; mol_type = unassigned DNA
tttcgactcgcgctccggctgctgtcacttggctctctggctggagcttgaggacgcaaggagggtttgtcactggcagactcgagactgtaggcactgccatggcccctgtgctcagtaaggactcggcggacatcgagagtatcctggctttaaatcctcgaacacaaactcatgcaactctgtgttccacttcggccaagaaattagacaagaaacattggaaaagaaatcctgataagaactgctttaattgtgagaagctggagaataattttgatgacatcaagcacacgactcttggtgagcgaggagctctccgagaagcaatgagatgcctgaaatgtgcagatgccccgtgtcagaagagctgtccaactaatcttgatattaaatcattcatcacaagtattgcaaacaagaactattatggagctgctaagatgatattttctgacaacccacttggtctgacttgtggaatggtatgtccaacctctgatctttgtgtaggtggatgcaatttatatgccactgaagagggacccattaatattggtggattgcagcaatttgctactgaggtattcaaagcaatgagtatcccacagatcagaaatccttcgctgcctcccccagaaaaaatgtctgaagcctattctgcaaagattgctctttttggtgctgggcctgcaagtataagttgtgcttcctttttggctcgattggggtactctgacatcactatatttgaaaaacaagaatatgttggtggtttaagtacttctgaaattcctcagttccggctgccgtatgatgtagtgaattttgagattgagctaatgaaggaccttggtgtaaagataatttgcggtaaaagcctttcagtgaatgaaatgactcttagcactttgaaagaaaaaggctacaaagctgctttcattggaataggtttgccagaacccaataaagatgccatcttccaaggcctgacgcaggaccaggggttttatacatccaaagactttttgccacttgtagccaaaggcagtaaagcaggaatgtgcgcctgtcactctccattgccatcgatacggggagtcgtgattgtacttggagctggagacactgcctttgactgtgcaacatctgctctacgttgtggagctcgccgtgtgttcatcgtcttcagaaaaggctttgttaatataagagctgtccctgaggagatggaacttgctaaggaagaaaagtgtgaatttctgccattcctgtccccacggaaggttatagtaaaaggtgggagaattgttgctatgcagtttgttcggacagagcaagatgaaactggaaaatggaatgaagatgaagatcagatggtccatctgaaagccgatgtggtcatcagtgcctttggttcagttctgagtgatcctaaagtaaaagaagccttgagccctataaaatttaacagatggggtctcccagaagtagatccagaaactatgcaaactagtgaagcatgggtatttgcaggtggtgatgtcgttggtttggctaacactacagtggaatcggtgaatgatggaaagcaagcttcttggtacattcacaaatacgtacagtcacaatatggagcttccgtttctgccaagcctgaactacccctcttttacactcctattgatctggtggacattagtgtagaaatggccggattgaagtttataaatccttttggtcttgctagcgcaactccagccaccagcacatcaatgattcgaagagcttttgaagctggatggggttttgccctcaccaaaactttctctcttgataaggacattgtgacaaatgtttcccccagaatcatccggggaaccacctctggccccatgtatggccctggacaaagctcctttctgaatattgagctcatcagtgagaaaacggctgcatattggtgtcaaagtgtcactgaactaaaggctgactttccagacaacattgtgattgctagcattatgtgcagttacaataaaaatgactggacggaacttgccaagaagtctgaggattctggagcagatgccctggagttaaatttatcatgtccacatggcatgggagaaagaggaatgggcctggcctgtgggcaggatccagagctggtgcggaacatctgccgctgggttaggcaagctgttcagattcctttttttgccaagctgaccccaaatgtcactgatattgtgagcatcgcaagagctgcaaaggaaggtggtgccaatggcgttacagccaccaacactgtctcaggtctgatgggattaaaatctgatggcacaccttggccagcagtggggattgcaaagcgaactacatatggaggagtgtctgggacagcaatcagacctattgctttgagagctgtgacctccattgctcgtgctctgcctggatttcccattttggctactggtggaattgactctgctgaaagtggtcttcagtttctccatagtggtgcttccgtcctccaggtatgcagtgccattcagaatcaggatttcactgtgatcgaagactactgcactggcctcaaagccctgctttatctgaaaagcattgaagaactacaagactgggatggacagagtccagctactgtgagtcaccagaaagggaaaccagttccacgtatagctgaactcatggacaagaaactgccaagttttggaccttatctggaacagcgcaagaaaatcatagcagaaaacaagattagactgaaagaacaaaatgtagctttttcaccacttaagagaaactgttttatccccaaaaggcctattcctaccatcaaggatgtaataggaaaagcactgcagtaccttggaacatttggtgaattgagcaacgtagagcaagttgtggctatgattgatgaagaaatgtgtatcaactgtggtaaatgctacatgacctgtaatgattctggctaccaggctatacagtttgatccagaaacccacctgcccaccataaccgacacttgtacaggctgtactctgtgtctcagtgtttgccctattgtcgactgcatcaaaatggtttccaggacaacaccttatgaaccaaagagaggcgtacccttatctgtgaatccggtgtgttaaggtgatttgtgaaacagttgctgtgaactttcatgtcacctacatatgctgatcttttaaaatcatgatccttgtgttcagctctttccaaattaaaacaaatatacattttctaaataaaaatatgtaatttcaaaatacatttgtaagtgtaaaaaatgtctcatgtcaatgaccattcaattagtggtcataaaatagaataattcttttctgaggatagtagttaaataactgtgtggcagttaattggatgttcactgccagttgtcttatgtgaaaaattaacttttttgtggcaattagtgtgacagtttccaaattgccctatgctgtgctccatatttgatttctaattgtaagtgaaattaagcattttgaaacaaagtactctttaacatacaagaaaatgtatccaaggaaacattttatcattaaaaattacctttaattttaatgctgtttctaagaaaatgtagttagctccataaagtacaaatgaagaaagtcaaaaaattatttgctatggcaggataagaaagcctaaaattgagtttgtagaactttattaagtaaaatccccttcgctgaaattgcttatttttggtgttggatagaggatagggagaatatttactaactaaataccattcactactcatgcgtgagatgggtgtacaaactcatcctcttttaatggcatttctctttaaactatgttcctaacaaaatgagatgataggatagatcctggttaccactcttttgctgtgcacatacgggctctgactggttttaatagtcaccttcatgattatagcaactaatgtttgaacaaagctcaaagtatgcaatgcttcattattcaagaatgaaaaatataatgttgataatatatattaagtgtgccaaatcagtttgactactctctgttttagtgtttatgtttaaaagaaatatattttttgttattattagataatatttttgtatttctctattttcataatcagtaaatagtgtcatataaactcatttatctcctcttcatggcatcttcaatatgaatctataagtagtaaatcagaaagtaacaatctatggcttatttctatgacaaattcaagagctagaaaaataaaatgtttcattatgcacttttagaaatgcatatttgccacaaaacctgtattactgaataatatcaaataaaatatcataaagcattttaaa

SEQ ID NO: 6020 - DNA, 1036 bp, Homo sapiens
  source 1..1036: mol_type = unassigned DNA; mol_type = unassigned DNA
taagatgatattttctgacaacccacttggtctgacttgtggaatggtatgtccaacctctgatctttgtgtaggtggatgcaatttatatgccactgaagagggacccattaatattggtggattgcagcaatttgctactgagactttgatcctggctttctctttaatgaatcatttgtaaagactttgattcttcagacactcttgggctctctgacgtctcctatttggagtcaacaagcaggtattcaaagcaatgagtatcccacagatcagaaatccttcgctgcctcccccagaaaaaatgtctgaagcctattctgcaaagattgctctttttggtgctgggcctgcaagtataagttgtgcttcctttttggctcgattggggtactctgacatcactatatttgaaaaacaagaatatgttggtggtttaagtacttctgaaattcctcagttccggctgccgtatgatgtagtgaattttgagattgagctaatgaaggaccttggtgtaaaggtaaatgaaaaaaacacctatctgtgtactgctcaaaaagaaaggagtaagctctacactaaagattaacagcaaatgtcatgcattttaggaaagaacaattaaaagctacatcaggcagaagcagaaagatgcttccccttgcttagggcatttgtctgtctactgtctgaatgccactagcctggaaaagggcaatcaatagttctcatctggcatgcctgcatgtgattaattgtctgtaagaaacaaattcctaaattgctttaggggttcagtgcagctaatagaaggatttggtttctttaatcatgttttttcatgcaagttgtgtgcactctgaaacattagtatttcacaatttggaacataatttcttatggagatttattttatttgttatattcatcatgtcagtagtgtgaatgtgataatcctttctcaacacaagcagtaaatcagtgggatagaaagcaacagcttcgtattttttattattttgttaaataa

SEQ ID NO: 6021 - DNA, 1779 bp, Homo sapiens
  source 1..1779: mol_type = unassigned DNA; mol_type = unassigned DNA
cgcgccgccggccctagtctgcctgttttcgactcgcgctccggctgctgtcacttggctctctggctggagcttgaggacgcaaggagggtttgtcactggcagactcgagactgtaggcactgccatggcccctgtgctcagtaaggactcggcggacatcgagagtatcctggctttaaatcctcgaacacaaactcatgcaactctgtgttccacttcggccaagaaattagacaagaaacattggaaaagaaatcctgataagaactgctttaattgtgagaagctggagaataattttgatgacatcaagcacacgactcttggtgagcgaggagctctccgagaagcaatgagatgcctgaaatgtgcagatgccccgtgtcagaagagctgtccaactaatcttgatattaaatcattcatcacaagtattgcaaacaagaactattatggagctgctaagatgatattttctgacaacccacttggtctgacttgtggaatggtatgtccaacctctgatctttgtgtaggtggatgcaatttatatgccactgaagagggacccattaatattggtggattgcagcaatttgctactgagactttgatcctggctttctctttaatgaatcatttgtaaagactttgattcttcagacactcttgggctctctgacgtctcctatttggagtcaacaagcaggttaattcccatgtatcatttaaatgatcagcttatatgaagggtatagtaagattttataatctttggagactagttggctagaaggtcaaattaagtgcccgtcaacctagatttttagttaatgacttactgatctggttttgtcagcataaacacaatgtgttctttcattttgggacccttcccataatattcctcaagcttaagtctcactttgctcttagtaataaatcagggttattcccttcctgctttctgacaggttaattctaaagaagagctcctgggaataagaaaataaaaacaattcgaggttgtggattgttgcaataaattctgggatttaatttcttttcttaccaaattcaaaattgcattaggcttacctgaccactacgaagtatgatctttactacctgtgaaaatccttagttgatggagaagattcacttgaattcctcctcacttttctttggggacccattgcctcttcattaaaccagggcaagctttcacagatgcagtaagtgaaaggtcacatagtatgtatatcaactaacacagcattttaaaacaaaatgaattaaaatgatatcattagtaattgatctggtcatgagaggtgtgtgtgtttgtgtgtgtgtgtgtgtgtgtgtgagagagagagagagaaagagagagagagacagggaaatacattattcctctggaaactctcacatggttttaattcttttctctgggaacactgtccctctgggaactcttacttggttctaccactcattcccagagcagagtctatttaagacagagacatgtgccttcagaacagaatttattagaaacttactaaaatttgagagtggtcacacttaggtcttgccataagtatcacctaatgaagagttatgcatagattaggactgcagtagatgcattttaagtgaatcaaggaatttagaataggaatgtatctgcttatttcattccaattatagtttgtataattgtaatttcaatatcaaattataaattaaaaatgtcctcgtgggaactactga

SEQ ID NO: 6022 - DNA, 551 bp, Homo sapiens
  source 1..551: mol_type = unassigned DNA; mol_type = unassigned DNA
acttggctctctggctggagcttgaggacgcaaggagggtttgtcactggcagactcgagactgtaggcactgccatggcccctgtgctcagtaaggactcggcggacatcgagagtatcctggctttaaatcctcgaacacaaactcatgcaactctgtgttccacttcggccaagaaattagacaagaaacattggaaaagaaatcctgataagaactgctttaaatctgcagggacctgtgcctgggcttagggcctctggcagcactaccgtcacctgtcatagcagttccaggaccagcttgacacagagcaccatggccaacaacacgttctctgtgactcccgaggccactgctgagctatctcaggtcgccagaagcctgcctaccactatgaactttcgagaacacacgtatacaattcttctctgaaccgaacaagtgcctggcaatgaggacagacctcagtggaggttgggaaggggaagcaaacagtagaacacagctttcccacctccttcacatcctgacactcagagactataat

SEQ ID NO: 6023 - DNA, 5309 bp, Homo sapiens
  source 1..5309: mol_type = unassigned DNA; mol_type = unassigned DNA
ggcagatgcaaagaggaaaatcaatagggataagagagaagagggaggagtcgcagatcagccattcttgtcttatggggtcccagctggcgcagcaaaagaaaaaaaaaaacaaaacccgggcgtgaacgcgggtggaggagggtgtgcgtgggggggcgggggtgaaagggggaccggggagatttactattgtctctggcagccgccgcgggagcccgggaggggggcggaggcgggcggaggcggcggcgcggccagcgcaccattcactccacctgatctcggggcgctgtgcgctgaggaaggcgcgggcgagccggagcagaagaaggagggagggagccagccgctgcagccaccaccgccaccatgtcctaccaaggcaagaagaacatcccgcggatcacgagtgaccgtctccttatcaagggaggcagaatcgtcaatgatgatcagtccttttatgctgatatttacatggaagatggcttaataaaacaaattggagacaatctgattgttcctggaggagtgaagaccattgaagccaatgggaagatggtgatccctggaggcatcgatgtccatactcacttccagatgccatataagggaatgaccacagtagatgacttcttccaagggacaaaggcggccttagcaggtggcaccaccatgatcattgaccatgtggtgcctgagcctgagtccagcctgactgaggcctatgagaaatggagagagtgggctgatgggaagagttgctgtgactatgccctgcatgtggacatcacccactggaatgacagcgtcaagcaggaagtgcagaacctcatcaaggacaaaggggttaactccttcatggtttatatggcttataaggatttgtatcaagtatctaacacagagctctatgagatcttcacctgcctgggagagctgggggccattgctcaagttcatgctgagaatggggatatcattgcccaggagcaaacccgcatgttggaaatggggataactggcccagaaggccatgtactgagcaggccagaagagctggaagctgaggctgtgttccgtgccatcaccattgccagccaaaccaattgccctctctacgtcacaaaggtcatgagcaagagtgcagctgacctcatctcacaagccaggaaaaaaggaaatgtagtctttggtgagcccatcactgccagcctcggcatagatggaacccattattggagcaagaactgggccaaggcggctgcatttgtgacatccccacccctgagccctgacccaactactccggactacatcaactccttgctggccagcggggatctgcagctatctgggagtgcccactgcaccttcagcactgcccagaaagcaattgggaaggacaacttcacagccattcctgagggcaccaatggtgtggaggagcggatgtctgtcatctgggacaaggctgtggccacagggaaaatggacgaaaaccagttcgtggctgtgacaagcacaaacgctgccaagatcttcaacctgtatccccgcaagggaagaatatctgtgggttctgacagcgacctcgtcatctgggatccagatgctgtgaagatcgtctctgccaagaaccaccagtctgcggcagagtacaacatctttgaagggatggagctgcgcggggctcctctggttgtcatctgccagggcaagatcatgctggaagatggcaacctgcacgtgacccagggggctggccgcttcataccctgcagcccgttctccgactatgtctacaagcgcattaaagcacggaggaagatggcagacctgcatgccgtcccaaggggcatgtacgatgggcctgtgtttgacctgaccaccacccccaaaggtggcacccccgcaggctctgctcggggctctcctactcggccgaacccacctgtgaggaatcttcatcagtcgggatttagcctgtcaggcacccaagtggatgagggggttcgctcagccagcaagcgcatcgtggcgcccccaggcggccgttctaatatcacatctctgagttaagcaagccttcctcaaagagaggggcagaagcaagaagagattgttttgaagccaaaatggtacaccgatatttaagaaggaaagcgaatccaaacggttgtgatctaaagaatcaataagcctcaagccttatgtttctccaatgttacgctcgcttgcctagctttacgaatattgctttgttttctgtttatgcatagccttgatttgtttgactcccctccccccatttacatgcatgcaatcagacaggccactaaggtaaaagagtctgctctatcatagtgttgagagcgtgtgtagtgctgcatcttatgacaaggggacagacaagctgggacgtcagggaaatgaacaaaagggacgcaggttatttggggtgagtgggtggtgggagcctggagcaaggtggagggtgcagaggggctggggtagggcatgtaggagggaggtgggtgggtcaggtgagtggaaggggtgttgtatattgtgttgatgacgtacgttatttccatggaagatagccgctgtggcagctgtcacatcaccacagctccctagggtctgccgagaaggcaggcagtctttgggttctgttctttgtcacgtcccctacaagtaaattttgtttctttgaacgtttattaaaatgccaagacccaaccatttcttccacctgcttgattgtgccagtgtttgctcaggcctctttcttagtgttgctttcaaatccttctctttcctgggttgggaaggccaggcagggacagagcaaatgacacttctcttcctcttgccctccctgcctctttggtgctcttaaaagccagcagctgagaacatagcacaggcccacgtggtgagggcacccacagcttaaagacgcttccttctaaacacggcgaggtcacctctcactcttctgtctttgcaaaccgagaagagtggcatgcttctggcatcccaagtcaggattttagctcagatgaggcagaatgaagggcctctcttacaggcagtttgtgtttgattctctcgatcctggcacatccatgataaataggagtttttgaaagttggttttattaggtgttccctaatttttaccgtaataggtcatctcagcttatatgaaagtcaagtggggaactgggaaagccaaagtcagtcttgagcagagggagcacattttgtggacctggttccacctttccattccaaaccacctgtttccccttccattagcagaaactctgggggaactttgtgtctcagtcctagaatctccccaagtgagtggaagtgacatgatgcagtcttcctcatggggcacctgaaagaaattagtgtgggtgcttcgatctaccttgtctgtcagagttgaatatctctttccctatcatgctgcttctgaaaattcagttttggagcaagtcctgtgagcaagataagaatctatagaaccaagatgctcattttcagaagaaatatgttcaacctgggatcagacttccatgctctggggaatccaagtggtagcacctgtaaccctgtgtactaagtgctttgaagagaagagcaggcctcagacaccttttaattgcttaggagaaaccattgtctctgactgcaggtttgaataagttgaagaccagagaaaagtacacactgggctacaaaggaatttggagatagccaaggaacaggatttcccctagcaagctaccttctgttcaaatcatgaaaaaagactatttccccttagaatagggaagcttgctattttaaagctcttgtagtgcttttcttttaagggagatgtagtaaaagggaaaatgtagctcttagtttacacttcaaagatgtgggggtctttcagagaactaagaataacagttttatgtgcagagagagtttgccagatctgaagcatatacctcattgactaggctgttactttgggataggttgcagtaccagccacagccagcagatagaggaaaagacacacataaactcgcttctgagcgtccacttctgcactctctgctctgctgttactcagcccctgagtctgactcatctctgcacaacctctctgtgccatgaagataagtcttccatggccaaatcggtcatccgcactgcccttgggacttccgaagtgaaccattccaccagaacctttgattctgcacaagatttccttgctctgggaacaacccccaaatgcccttgggaggaacaacatgagctcaggaagcctctctttcttcacttaccattactaactctccaagcatagaaatccctgggaattgcgagaataactcccactattttaaaatttatattcagatttgtttcgtttcataagacacatcaaacaggcctatacaaaaggtttaggaaaagaaaacaatggtgagtcccggccctcttcgaattcactggcacctcatgcaagtgtaggaaggcacgctggatcgtctatctgattccaaagctgtcctttgccatctcatcccttggcctgccccccaaccctgaggatgcccctgccatccccccaacctcctcatattgcctctgaacccagatggcaatccatcccggttctctctgagggccacgggcttgggtagtggaaagggtgtttgggaaattgttaaatcagttacccgtagtagagctatttcttgtacttctaagttttctagaagtggaaggattgtagtcatcctgaaaatgggtttacttcaaaatccctcagccttgttcttcacgactgtctatactgagagtgtcatgtttccacaaagggctgacacctgagcctggattttcactcatccctgagaagccctttccagtagggtgggcaattcccaacttccttgccacaagcttcccaggctttctcccctggaaaactccagcttgagtcccagatacactcatgggctgccctgggcagccagcattcattgtaagttccctctttgaaaactggtgtgtgggtgttcagttctgtgtctggtgggtatggacagacagtaatctcctgtgatctgtgctagctgtgaggcagctctggaacgtgaagagctgtttggtttgaaccgtgaacaaaactgtgttttgagtttagctgacattaaagaaaaaagttcatcacgtgactgttaatgtaaacctggttattaaaataactatgaaattac

SEQ ID NO: 6024 - DNA, 5476 bp, Homo sapiens
  source 1..5476: mol_type = unassigned DNA; mol_type = unassigned DNA
tgctccgcgcgctagctggctgtgtggctcgctggctcgctagggacaagcaggaatcggagcagcactgccgcctctggcgcgaaggctcaggcgcctcctcccgccacagtcactgtggctcggcgcacgctgccggcggctgccctttccgcctctggggaagaaaaacccgcgggccgctttcgtgcttgaaccatggcctcgggccggaggggctgggacagctcccacgaagacgatctgcccgtgtacctggccaggccgggcaccacggaccaggtcccgcggcagaaatacggcggcatgttctgcaacgtggagggcgccttcgagagcaagacgctggatttcgatgccctcagcgtggggcagcggggcgcgaagactcctcggagcggccagggcagcgaccgaggatcggggagtcggcccgggatcgagggggacaccccgcgcaggggccaaggccgggaagagagcagggagcccgcgcccgcctcccccgcccccgccggggtagagatccggagcgccaccggcaaagaggtgttgcagaacctcggccccaaggacaagagtgaccgtctccttatcaagggaggcagaatcgtcaatgatgatcagtccttttatgctgatatttacatggaagatggcttaataaaacaaattggagacaatctgattgttcctggaggagtgaagaccattgaagccaatgggaagatggtgatccctggaggcatcgatgtccatactcacttccagatgccatataagggaatgaccacagtagatgacttcttccaagggacaaaggcggccttagcaggtggcaccaccatgatcattgaccatgtggtgcctgagcctgagtccagcctgactgaggcctatgagaaatggagagagtgggctgatgggaagagttgctgtgactatgccctgcatgtggacatcacccactggaatgacagcgtcaagcaggaagtgcagaacctcatcaaggacaaaggggttaactccttcatggtttatatggcttataaggatttgtatcaagtatctaacacagagctctatgagatcttcacctgcctgggagagctgggggccattgctcaagttcatgctgagaatggggatatcattgcccaggagcaaacccgcatgttggaaatggggataactggcccagaaggccatgtactgagcaggccagaagagctggaagctgaggctgtgttccgtgccatcaccattgccagccaaaccaattgccctctctacgtcacaaaggtcatgagcaagagtgcagctgacctcatctcacaagccaggaaaaaaggaaatgtagtctttggtgagcccatcactgccagcctcggcatagatggaacccattattggagcaagaactgggccaaggcggctgcatttgtgacatccccacccctgagccctgacccaactactccggactacatcaactccttgctggccagcggggatctgcagctatctgggagtgcccactgcaccttcagcactgcccagaaagcaattgggaaggacaacttcacagccattcctgagggcaccaatggtgtggaggagcggatgtctgtcatctgggacaaggctgtggccacagggaaaatggacgaaaaccagttcgtggctgtgacaagcacaaacgctgccaagatcttcaacctgtatccccgcaagggaagaatatctgtgggttctgacagcgacctcgtcatctgggatccagatgctgtgaagatcgtctctgccaagaaccaccagtctgcggcagagtacaacatctttgaagggatggagctgcgcggggctcctctggttgtcatctgccagggcaagatcatgctggaagatggcaacctgcacgtgacccagggggctggccgcttcataccctgcagcccgttctccgactatgtctacaagcgcattaaagcacggaggaagatggcagacctgcatgccgtcccaaggggcatgtacgatgggcctgtgtttgacctgaccaccacccccaaaggtggcacccccgcaggctctgctcggggctctcctactcggccgaacccacctgtgaggaatcttcatcagtcgggatttagcctgtcaggcacccaagtggatgagggggttcgctcagccagcaagcgcatcgtggcgcccccaggcggccgttctaatatcacatctctgagttaagcaagccttcctcaaagagaggggcagaagcaagaagagattgttttgaagccaaaatggtacaccgatatttaagaaggaaagcgaatccaaacggttgtgatctaaagaatcaataagcctcaagccttatgtttctccaatgttacgctcgcttgcctagctttacgaatattgctttgttttctgtttatgcatagccttgatttgtttgactcccctccccccatttacatgcatgcaatcagacaggccactaaggtaaaagagtctgctctatcatagtgttgagagcgtgtgtagtgctgcatcttatgacaaggggacagacaagctgggacgtcagggaaatgaacaaaagggacgcaggttatttggggtgagtgggtggtgggagcctggagcaaggtggagggtgcagaggggctggggtagggcatgtaggagggaggtgggtgggtcaggtgagtggaaggggtgttgtatattgtgttgatgacgtacgttatttccatggaagatagccgctgtggcagctgtcacatcaccacagctccctagggtctgccgagaaggcaggcagtctttgggttctgttctttgtcacgtcccctacaagtaaattttgtttctttgaacgtttattaaaatgccaagacccaaccatttcttccacctgcttgattgtgccagtgtttgctcaggcctctttcttagtgttgctttcaaatccttctctttcctgggttgggaaggccaggcagggacagagcaaatgacacttctcttcctcttgccctccctgcctctttggtgctcttaaaagccagcagctgagaacatagcacaggcccacgtggtgagggcacccacagcttaaagacgcttccttctaaacacggcgaggtcacctctcactcttctgtctttgcaaaccgagaagagtggcatgcttctggcatcccaagtcaggattttagctcagatgaggcagaatgaagggcctctcttacaggcagtttgtgtttgattctctcgatcctggcacatccatgataaataggagtttttgaaagttggttttattaggtgttccctaatttttaccgtaataggtcatctcagcttatatgaaagtcaagtggggaactgggaaagccaaagtcagtcttgagcagagggagcacattttgtggacctggttccacctttccattccaaaccacctgtttccccttccattagcagaaactctgggggaactttgtgtctcagtcctagaatctccccaagtgagtggaagtgacatgatgcagtcttcctcatggggcacctgaaagaaattagtgtgggtgcttcgatctaccttgtctgtcagagttgaatatctctttccctatcatgctgcttctgaaaattcagttttggagcaagtcctgtgagcaagataagaatctatagaaccaagatgctcattttcagaagaaatatgttcaacctgggatcagacttccatgctctggggaatccaagtggtagcacctgtaaccctgtgtactaagtgctttgaagagaagagcaggcctcagacaccttttaattgcttaggagaaaccattgtctctgactgcaggtttgaataagttgaagaccagagaaaagtacacactgggctacaaaggaatttggagatagccaaggaacaggatttcccctagcaagctaccttctgttcaaatcatgaaaaaagactatttccccttagaatagggaagcttgctattttaaagctcttgtagtgcttttcttttaagggagatgtagtaaaagggaaaatgtagctcttagtttacacttcaaagatgtgggggtctttcagagaactaagaataacagttttatgtgcagagagagtttgccagatctgaagcatatacctcattgactaggctgttactttgggataggttgcagtaccagccacagccagcagatagaggaaaagacacacataaactcgcttctgagcgtccacttctgcactctctgctctgctgttactcagcccctgagtctgactcatctctgcacaacctctctgtgccatgaagataagtcttccatggccaaatcggtcatccgcactgcccttgggacttccgaagtgaaccattccaccagaacctttgattctgcacaagatttccttgctctgggaacaacccccaaatgcccttgggaggaacaacatgagctcaggaagcctctctttcttcacttaccattactaactctccaagcatagaaatccctgggaattgcgagaataactcccactattttaaaatttatattcagatttgtttcgtttcataagacacatcaaacaggcctatacaaaaggtttaggaaaagaaaacaatggtgagtcccggccctcttcgaattcactggcacctcatgcaagtgtaggaaggcacgctggatcgtctatctgattccaaagctgtcctttgccatctcatcccttggcctgccccccaaccctgaggatgcccctgccatccccccaacctcctcatattgcctctgaacccagatggcaatccatcccggttctctctgagggccacgggcttgggtagtggaaagggtgtttgggaaattgttaaatcagttacccgtagtagagctatttcttgtacttctaagttttctagaagtggaaggattgtagtcatcctgaaaatgggtttacttcaaaatccctcagccttgttcttcacgactgtctatactgagagtgtcatgtttccacaaagggctgacacctgagcctggattttcactcatccctgagaagccctttccagtagggtgggcaattcccaacttccttgccacaagcttcccaggctttctcccctggaaaactccagcttgagtcccagatacactcatgggctgccctgggcagccagcattcattgtaagttccctctttgaaaactggtgtgtgggtgttcagttctgtgtctggtgggtatggacagacagtaatctcctgtgatctgtgctagctgtgaggcagctctggaacgtgaagagctgtttggtttgaaccgtgaacaaaactgtgttttgagtttagctgacattaaagaaaaaagttcatcacgtgactgttaatgtaaacctggttattaaaataactatgaaatta

SEQ ID NO: 6025 - DNA, 838 bp, Homo sapiens
  source 1..838: mol_type = unassigned DNA; mol_type = unassigned DNA
gacatccccacccctgagccctgacccaactactccggactacatcaactccttgctggccagcggggatctgcagctatctgggagtgcccactgcaccttcagcactgcccagaaagcaattgggaaggacaacttcacagccattcctgagggcaccaatggtgtggaggagcggatgtctgtcatctgggacaaggctgtggccacagggaaaatggacgaaaaccagttcgtggctgtgacaagcacaaacgctgccaagatcttcaacctgtatccccgcaagggaagaatatctgtgggttctgacagcgacctcgtcatctgggatccagatgctgtgaagatcgtctctgccaagaaccaccagtctatggcagacctgcatgccgtcccaaggggcatgtacgatgggcctgtgtttgacctgaccaccacccccaaaggtggcacccccgcaggctctgctcggggctctcctactcggccgaacccacctgtgaggaatcttcatcagtcgggatttagcctgtcaggcacccaagtggatgagggggttcgctcagccagcaagcgcatcgtggcgcccccaggcggccgttctaatatcacatctctgagttaagcaagccttcctcaaagagaggggcagaagcaagaagagattgttttgaagccaaaatggtacaccgatatttaagaaggaaagcgaatccaaacggttgtgatctaaagaatcaataagcctcaagccttatgtttctccaatgttacgctcgcttgcctagctttacgaatattgctttgttttctgtttatgcatagccttgatttg

SEQ ID NO: 6026 - DNA, 514 bp, Homo sapiens
  source 1..514: mol_type = unassigned DNA; mol_type = unassigned DNA
actccacctgatctcggggcgctgtgcgctgaggaaggcgcgggcgagccggagcagaagaaggagggagggagccagccgctgcagccaccaccgccacagggaaaatggacgaaaaccagttcgtggctgtgacaagcacaaacgctgccaagatcttcaacctgtatccccgcaagggaagaatatctgtgggttctgacagcgacctcgtcatctgggatccagatgctgtgaagatcgtctctgccaagaaccaccagtctgcggcagagtacaacatctttgaagggatggagctgcgcggggctcctctggttgtcatctgccagggcaagatcatgctggaagatggcaacctgcacgtgacccagggggctggccgcttcataccctgcagcccgttctccgactatgtctacaagcgcattaaagcacggaggaagatggcagacctgcatgccgtcccaaggggcatgtacgatgggcctgtgtttgacctgaccaccacccc

SEQ ID NO: 6027 - DNA, 584 bp, Homo sapiens
  source 1..584: mol_type = unassigned DNA; mol_type = unassigned DNA
gctgacctcatctcacaagccaggaaaaaaggaaatgtagtctttggtgagcccatcactgccagcctcggcatagatggaacccattattggagcaagaactgggccaaggcggctgcatttgtgacatccccacccctgagccctgacccaactactccggactacatcaactccttgctggccaggccacagggaaaatggacgaaaaccagttcgtggctgtgacaagcacaaacgctgccaagatcttcaacctgtatccccgcaagggaagaatatctgtgggttctgacagcgacctcgtcatctgggatccagatgctgtgaagatcgtctctgccaagaaccaccagtctgcggcagagtacaacatctttgaagggatggagctgcgcggggctcctctggttgtcatctgccagggcaagatcatgctggaagatggcaacctgcacgtgacccagggggctggccgcttcataccctgcagcccgttctccgactatgtctacaagcgcattaaagcacggaggaagatggcagacctgcatgccgtcccaaggggcatgtacgatgggcct

SEQ ID NO: 6028 - DNA, 746 bp, Homo sapiens
  source 1..746: mol_type = unassigned DNA; mol_type = unassigned DNA
aaattaaccctttgctgaccacttactgctgcaggaaaggatttgaggaaccatgatgcctaactgccttggctggttattttagacataatggtttgctattgtgtttgcccagagattctgtcctgagaagattgaggagcaaaggctttcattcagatgtcacctttgtgataaccacagaggctaaggaaaaagtacttaccctctgccagacattgctctcagatgacaatgctgtgctatactattttactagtgagggatagaggcactgggaagctgagtaaagtgacacagttaggaagtggtagatctgagatgtggatataggctatctaattccagatcctgccaaaattatccataacctttgtgcagcactgcatcctcacagttcgtggaggtgggagccaccagtttgagaggttcatgtttctattgactcctggagactttttcttgcagctggaagctgaggctgtgttccgtgccatcaccattgccagccaaaccaattgccctctctacgtcacaaaggtcatgagcaagagtgcagctgacctcatctcacaagccaggaaaaaaggaaatgtagtctttggtgagcccatcactgccagcctcggcatagatggaacccattattggagcaagaactgggccaaggcggctgcatttgtgacatccccacccctgagccctgacccaactactccggactacatcaactccttgctggccag

SEQ ID NO: 6029 - DNA, 572 bp, Homo sapiens
  source 1..572: mol_type = unassigned DNA; mol_type = unassigned DNA
gtgcgctgaggaaggcgcgggcgagccggagcagaagaaggagggagggagccagccgctgcagccaccaccgccaccatgtcctaccaaggcaagaagaacatcccgcggatcacgagtgaccgtctccttatcaagggaggcagaatcgtcaatgatgatcagtccttttatgctgatatttacatggaagatggcttaataaaacaaattggagacaatctgattgttcctggaggagtgaagaccattgaagccaatgggaagatggtgatccctggaggcatcgatgtccatactcacttccagatgccatataagggaatgaccacagtagatgacttcttccaagggacaaaggggttaactccttcatggtttatatggcttataaggatttgtatcaagtatctaacacagagctctatgagatcttcacctgcctgggagagctgggggccattgctcaagttcatgctgagaatggggatatcattgcccaggagcaaacccgcatgttggaaatggggataactggcccagaaggccatgtactgagcaggccagaagag

SEQ ID NO: 6030 - DNA, 539 bp, Homo sapiens
  source 1..539: mol_type = unassigned DNA; mol_type = unassigned DNA
gcggccgccgcattcgacccgcgccatggcagaggagagcgggtgccgggagggaagccgggaaccgtctccattctgaaactagggcggggaagccgccgcgggagcccgggaggggggcggaggcgggcggaggcggcggcgcggccagcgcaccattcactccacctgatctcggggcgctgtgcgctgaggaaggcgcgggcgagccggagcagaagaaggagggagggagccagccgctgcagccaccaccgccaccatgtcctaccaaggcaagaagaacatcccgcggatcacgagtgaccgtctccttatcaagggaggcagaatcgtcaatgatgatcagtccttttatgctgatatttacatggaagatggcttaataaaacaaattggagacaatctgattgttcctggaggagtgaagaccattgaagccaatgggaagatggtgatccctggaggcatcgatgtccatactcacttccagatgccatataagggaatgaccacagtagatgacttcttccaaggga

SEQ ID NO: 6031 - DNA, 771 bp, Homo sapiens
  source 1..771: mol_type = unassigned DNA; mol_type = unassigned DNA
agagatccggagcgccaccggcaaagaggtgttgcagaacctcggccccaaggacaaggtttattactgaggaacttggctgttggtctccactgggaaagaaacacaaggatatggaattctacttggaaaactcaggtcttcctgtttgctggataaatacagagacaaaatcacaatgagccctctcacattgatgtgaaaaaagatctttggatagaaacctactcatttattctcaggactttaagtgccctgcttcatgttttggcatgttgcaactgactttattttatttattttattacaagcaagagaaacaaagtctggttcccgtatgatttaaaaaagaaaacaaaagaaaaagacttgggttgggttaggagtttctctgaaccatgaaaatgacctcaatattggctgaaaaatttgacaagaatgaaaaatggcatggtacaagctccaggaagatgttgcagagatgagcttcagatgcatttcattttgcgttgttattaatggcttggaaagaggccataaacctattatggtaattatgtctgcagatgagggtaaataggatggtgttataaacaccagtaagcaagagacgtagtacagagcaacctagggagattagaaatatggacaggaaatgaacaaacgagatcagcctggaaaagtgaaaacatgcatctggagaaatacataatttgaaaaacagagagatacttaaaggcagggtcatacttggaaagcagtaatggtaaa

SEQ ID NO: 6032 - DNA, 2729 bp, Homo sapiens
  source 1..2729: mol_type = unassigned DNA; mol_type = unassigned DNA
gcccagcgggggcgggaccggaacggagccgtgcggccccgcgcgctcgcagtctgtctcccgccgtccccacgcacgcgtcccggctcacgcgtccccccgcccgcccgcccgcccgcccgcccccgcttgtgccgcccctaccagagacccccaggagcaggatgtccttccagggcaagaaaagcatcccccggatcacgagtgaccgccttctgatcagaggtgggaggatcgtgaatgacgaccagtccttttacgctgatgtgcacgtggaagatggcttgataaaacaaatcggagaaaacctcatcgtccctgggggcatcaagaccattgacgcccacggcctgatggtccttcctggtggcgttgacgtccacacaaggctgcagatgcctgtcctgggcatgacaccggctgacgacttctgtcagggcaccaaggcagcgctagcaggaggaaccaccatgatcttggaccacgtcttccccgacacgggtgtgagcctgctggcggcctacgagcagtggcgggagcgggcggacagcgcggcctgctgcgactactccctgcacgtggacatcacccgatggcatgagagcatcaaggaggagctggaggccctggtcaaggagaagggtgtgaactccttcctggtcttcatggcatacaaggaccggtgccagtgcagcgacagccagatgtacgagatcttcagcatcatccgggacctgggggccttggcccaggtgcacgctgagaacggggacatcgtggaggaggagcagaagcggttgctggagctcggcatcactggccccgagggccacgtgctcagccaccccgaggaggtggaggctgaggcggtgtaccgagctgtcaccatcgccaagcaggcaaactgcccgctgtacgtcaccaaggtgatgagcaagggggcggccgacgccatcgctcaggccaagcgcagaggggtggtcgtgtttggggagcccatcaccgccagcctgggcaccgacggttcacactactggagcaagaactgggccaaggccgcagccttcgtcacatcaccccctgtcaacccagaccccaccacggcggaccacctcacctgcttgctgtccagcggggacctccaggtgacaggcagcgcccactgcaccttcaccactgcccagaaggctgtgggcaaggacaacttcgcgctgatccccgagggcaccaacggcattgaggagcgcatgtcgatggtctgggagaaatgtgtggcctctgggaagatggacgagaatgagttcgtcgcggtgaccagtacaaatgctgccaaaatcttcaatttttacccaaggaaggggcgagtggctgtgggctctgacgctgacctggtcatatggaaccccaaggccaccaagatcatctctgccaagacccacaatctgaacgtggagtacaacatcttcgagggagtggagtgccggggagcgcctgccgtggtcataagtcagggccgagtggcgctggaggacgggaagatgtttgtcaccccgggggcgggccgcttcgtccctcggaaaacattcccggactttgtctacaagaggatcaaagctcgcaacaggctggcggagatccacggtgtgccccgtggactgtatgacgggcccgtccacgaggtgatggtgcctgccaagccagggagtggcgctccggcccgcgcgtcctgcccaggcaagatctccgtccctcctgtgcgcaacctacatcagtcggggttcagcctatctgggtctcaggctgatgaccacatcgcccgacgcacagcacagaagatcatggcaccacctggcggccgctccaacatcacctctctctcctagacgcccaggaccggccctgtgagccgtgctggccccacccgaggccgcgggggccccagggcactcgcccccctccttagcattttcttttgtagaagtttctcgaaggtgcttggcggtcttgccttccccctccccacaggctctccttgtggggtcccaggtcctgctgccaagagcccctcaagagaagggctgaacctggggagatgtcactgccagggtgaggtggagccacatggcagggacaatgccggcagcctgagcccaggcaccccagtgcccgctgggcccagcctggggacagggaacctgccgggctcacagtgtgggagcagctggacaccaggcttcttggtgaaccggcgaggggccgagtcccgcctggtgggcatttgccgccgcctccccaccaccagtcactgcctcgcagagccctacactcccgcagccgctcctcagaggcctgtgcccatcgcaggcctgggaggaaagtgggcgcagagccctcctgctcacacagctgctgagacttcagggacccatcagaacttggtgcagcacagccccgcccgtggagggtcccttttacgcaccccaaggcccacacctaagcttccatgtagccctcatccagggaagttttgcgatcctttaggaagacactgtcctcttattacagattgtgtatttccgtaggcttcttagtagcagctttgtacactgaggacactgtagccaggaacctgtgcatgccacccaccgcctggacaggcagtcatcctgcctctgatgtgaatcaggcccattaaagacgtctgggtttgaagccgcctgtgcatggaa

SEQ ID NO: 6033 - DNA, 627 bp, Homo sapiens
  source 1..627: mol_type = unassigned DNA; mol_type = unassigned DNA
cgtcccggctcacgcgtccccccgcccgcccgcccgcccgcccgcccccgcttgtgccgcccctaccagagacccccaggagcaggatgtccttccagggcaagaaaagcatcccccggatcacgagtgaccgccttctgatcagaggtgggaggatcgtgaatgacgaccagtccttttacgctgatgtgcacgtggaagatggcttgataaacacttagtatggtgcctggctcatagcaggtgcttcctaaatactggtgcccacatctattagcgcacctgcttccgtttgtcaagctgctccgtcctctagtcaaaaaagtaccaaccagggacctgagtggaaaaccacagggcgtggcgtctgcgtgaggctggaccctgcagtgaccgtcctgagctgcgctgagtgatgctttgctccctggcactcccgaggagctagtccaacaaatcggagaaaacctcatcgtccctgggggcatcaagaccattgacgcccacggcctgatggtccttcctggtggcgttgacgtccacacaaggctgcagatgcctgtcctgggcatgacaccggctgacgacttctgtcagggcaccaaggcagcgctagcaggaggaacc

SEQ ID NO: 6034 - DNA, 668 bp, Homo sapiens
  source 1..668: mol_type = unassigned DNA; mol_type = unassigned DNA
gcaggatgtccttccagggcaagaaaagcatcccccggatcacgagtgaccgccttctgatcagaggtgggaggatcgtgaatgacgaccagtccttttacgctgatgtgcacgtggaagatggcttgataaactgctccgtcctctagtcaaaaaagtaccaaccagggacctgagtggaaaaccacagggcgtggcgtctgcgtgaggctggaccctgcagtgaccgtcctgagctgcgctgagtgatgctttgctccctggcactcccgaggagctagtccaacaaatcggagaaaacctcatcgtccctgggggcatcaagaccattgacgcccacggcctgatggtccttcctggtggcgttgacgtccacacaaggctgcagatgcctgtcctgggcatgacaccggctgacgacttctgtcagggcaccaaggcagcgctagcaggaggaaccaccatgatcttggaccacgtcttccccgacacgggtgtgagcctgctggcggcctacgagcagtggcgggagcgggcggacagcgcggcctgctgcgactactccctgcacgtggacatcacccgatggcatgagagcatcaaggaggagctggaggccctggtcaaggagaagggtgtgaactccttcctggtcttcatggcataca

SEQ ID NO: 6035 - DNA, 1545 bp, Homo sapiens
  source 1..1545: mol_type = unassigned DNA; mol_type = unassigned DNA
gatgcctgtcctgggcatgacaccggctgacgacttctgtcagggcaccaaggcagcgctagcaggaggaaccaccatgatcttggaccacgtcttccccgacacgggtgtgagcctgctggcggcctacgagcagtggcgggagcgggcggacagcgcggcctgctgcgactactccctgcacgtggacatcacccgatggcatgagagcatcaaggaggagctggaggccctggtcaaggagaagggtgtgaactccttcctggtcttcatggcatacaaggaccggtgccagtgcagcgacagccagatgtacgagatcttcagcatcatccgggacctgggggccttggcccaggtgcacgctgagaacggggacatcgtggaggaggtggaggctgaggcggtgtaccgagctgtcaccatcgccaagcaggcaaactgcccgctgtacgtcaccaaggtgatgagcaagggggcggccgacgccatcgctcaggccaagcgcagaggggtggtcgtgtttggggagcccatcaccgccagcctgggcaccgacggttcacactactggagcaagaactgggccaaggccgcagccttcgtcacatcaccccctgtcaacccagaccccaccacggcggaccacctcacctgcttgctgtccagcggggacctccaggtgacaggcagcgcccactgcaccttcaccactgcccagaaggctgtgggcaaggacaacttcgcgctgatccccgagggcaccaacggcattgaggagcgcatgtcgatggtctgggagaaatgtgtggcctctgggaagatggacgagaatgagttcgtcgcggtgaccagtacaaatgctgccaaaatcttcaatttttacccaaggaaggggcgagtggctgtgggctctgacgctgacctggtcatatggaaccccaaggccaccaagatcatctctgccaagacccacaatctgctggcggagatccacggtgtgccccgtggactgtatgacgggcccgtccacgaggtgatggtgcctgccaagccagggagtggcgctccggcccgcgcgtcctgcccaggcaagatctccgtccctcctgtgcgcaacctacatcagtcggggttcagcctatctgggtctcaggctgatgaccacatcgcccgacgcacagcacagaagatcatggcaccacctggcggccgctccaacatcacctctctctcctagacgcccaggaccggccctgtgagccgtgctggccccacccgaggccgcgggggccccagggcactcgcccccctccttagcattttcttttgtagaagtttctcgaaggtgcttggcggtcttgccttccccctccccacaggctctccttgtggggtcccaggtcctgctgccaagagcccctcaagagaagggctgaacctggggagatgtcactgccagggtgaggtggagccacatggcagggacaatgccggcagcctgagcccaggcaccccagtgcccgctgggcccagcctggggac

SEQ ID NO: 6036 - DNA, 444 bp, Homo sapiens
  source 1..444: mol_type = unassigned DNA; mol_type = unassigned DNA
gggaggactgcaaggagggaggcgtgtgtgaacttgggttgagcacccccccagggcagccccaaattcctgaagctggcactggagaggcgcagagcaggcccagccctccagctgcccatgctcagcccctcatgccccatctctggccccacagctgcccaggctcagcccctcatgccctgtctctgcccccacccccccggcagctggcggagatccacggtgtgccccgtggactgtatgacgggcccgtccacgaggtgatggtgcctgccaagccagggagtggcgctccggcccgcgcgtcctgcccaggcaagatctccgtccctcctgtgcgcaacctacatcagtcggggttcagcctatctgggtctcaggctgatgaccacatcgcccgacgcacagcacagaagatcatggcaccacctggcggccgct

SEQ ID NO: 6037 - DNA, 4054 bp, Homo sapiens
  source 1..4054: mol_type = unassigned DNA; mol_type = unassigned DNA
gtgccccgcgggaaccccgccggcctgtgcgcttgctggtgccagctcggctcgctgcctcgcattgccacaggctcctgagaggtcgcgggcagtgcctgcggggaggcgcggggccctgctctgtagggctgaaggccgcccgaggttcgccaaggctctgggctctcgaaaggaagccaagaaaagaagctgcccaggtgaccagtcctgggagtgctctctcccaaggaagctccgagcgcccaggagcccttagccggggtctagtgccctttgaacaatctccagctcttcaaggaagtgggctgccgccgcctctcttgggacctggcctgggatcctttccccaaacgcaccccggcgatttttgcgcaccgggagccgaacccctgctgcgcgcagctggctgggctcaggcgcgcttcctcaacgtttcggagccgctgcccccagcgaagtccacattccaagctccaggggctttgagagagacgaccccaaggcaaggcgtttggagagctgctgaggagccaggggcttggaggagcgagaagacatgtattttcagctgagtctcagaaggggagaatctcctgtcaccaccagaaaagcaacagccccgaaatgtgattgcaactgactagcagagcagaggcccaggagtcactggattgatgatttagaatatgctaaaaagccagtgctttatttggggaattcaggggctttctggtgcccaagacagtgacctgcagcaagggagtcagaagacagatgtagaaatcaagagtgaccatccacgggattgacttggattgccactcaagcggtcctctcatggaatgttggtgaggccctctgccagggaagcaatctggctgtgcaaagtgctgcctggtggggaggactcctggaaatctgactgacccctattccctgcttgggaacttgaggggtgtcagagcccctgatgtgctttctcttaggaagatgaggactctgaacacctctgccatggacgggactgggctggtggtggagagggacttctctgttcgtatcctcactgcctgtttcctgtcgctgctcatcctgtccacgctcctggggaacacgctggtctgtgctgccgttatcaggttccgacacctgcggtccaaggtgaccaacttctttgtcatctccttggctgtgtcagatctcttggtggccgtcctggtcatgccctggaaggcagtggctgagattgctggcttctggccctttgggtccttctgtaacatctgggtggcctttgacatcatgtgctccactgcatccatcctcaacctctgtgtgatcagcgtggacaggtattgggctatctccagccctttccggtatgagagaaagatgacccccaaggcagccttcatcctgatcagtgtggcatggaccttgtctgtactcatctccttcatcccagtgcagctcagctggcacaaggcaaaacccacaagcccctctgatggaaatgccacttccctggctgagaccatagacaactgtgactccagcctcagcaggacatatgccatctcatcctctgtaataagcttttacatccctgtggccatcatgattgtcacctacaccaggatctacaggattgctcagaaacaaatacggcgcattgcggccttggagagggcagcagtccacgccaagaattgccagaccaccacaggtaatggaaagcctgtcgaatgttctcaaccggaaagttcttttaagatgtccttcaaaagagaaactaaagtcctgaagactctgtcggtgatcatgggtgtgtttgtgtgctgttggctacctttcttcatcttgaactgcattttgcccttctgtgggtctggggagacgcagcccttctgcattgattccaacacctttgacgtgtttgtgtggtttgggtgggctaattcatccttgaaccccatcatttatgcctttaatgctgattttcggaaggcattttcaaccctcttaggatgctacagactttgccctgcgacgaataatgccatagagacggtgagtatcaataacaatggggccgcgatgttttccagccatcatgagccacgaggctccatctccaaggagtgcaatctggtttacctgatcccacatgctgtgggctcctctgaggacctgaaaaaggaggaggcagctggcatcgccagacccttggagaagctgtccccagccctatcagtcatattggactatgacactgacgtctctctggagaagatccaacccatcacacaaaacggtcagcacccaacctgaactcgcagatgaatcctgccacacatgctcatcccaaaagctagaggagattgctctggggcttgctattaagaaactaaggtacggtgagactctgaggtgtcaggagagccctctgctgctttccaacacacaattaactccgtttccaaatacattccagtgtattttctgtgttgttcatagtcaatcaaacagggacactacaaacatggggagccataagggacatgtctttggcttcagaattgtttttagaaatttattcttatcttaggatttaccaaatagggcaaagaatcaacagtgaacagcttcacttaaaatcaaatttttctgggaagaaaatgagatgggttgagtttgctgtatacaaacaggtgctaacactgttcccagcaaagttttcagattgtaaaggtaggtgcatgccttcataaattatttctaaaacattaattgaggcttacagtaggagtgagaaatttttttccagaattgagagatgttttgttgatattggttctatttatttattgtatatatggatatttttaatttatgatataataaatatatatttatcatatttaataggataaattaatgagttttatccaagaccttacaaccacatttctggccatttaactagcactttataagccaatgaagcaaacacacagactctgtgagattctaaatgttcatgtgtaacttctagaaacacagcagaaactgatagataagggaataaagttgaaatgattccttaaaattcatggacacagataaatgcaaggtgagaattgacaaatgctataaatgctttctttttctgaaaagattttgaaaaatttaaaaaagtatagctactactgtgttcaaaacgttttaaatgacaaatgactttcccaggggaatttgcagttctgtaaatatcttaaataaaagccaacttaagaagagcccagcattaaatttacgatcttaggtggtaatgaaaagtatatgctgctttgtatttatgtaaaataattggccctctccatcttttctcatttcatgtgtcaggtagtttttctgaaccacacaaatggctttcctggagagagatctgtagcacagacagtgggttacagcagccccactgagggaccaaactcaaaccctgcatttccatcttaccaggtcaaaccaaaccagtcagtggggctactttttatagtgctttaatctgaatttagagctgatttttaaaggagtctttaaatgttaatggtatactaactaacgaatagtgcctcattatcattcttgagtcagatacttctgttgatgggagaaacagaagaatccttccctttgggtgtgttgagctcccccaaagccatcagcatctcttttgacaaatgctagtcctttctctgtgctttggaatcaggttcctgcatcatcacccggactgtaaaaagtatcataagcctcccttgccagatgccaactcgtggggcatttcaacagagtttctttgaaatgtttacaacgtattcttcttgataagcaatgaacttaacatttagatgcaatccgtgaaaagaaaaaaaaatctgaaaaatatctcctgcatcaggtctgtgttatttatgtattgtgaatgttttcttaattttattggctgtatgctttcttacacataataaaaatattttgtgaactc

SEQ ID NO: 6038 - DNA, 2433 bp, Homo sapiens
  source 1..2433: mol_type = unassigned DNA; mol_type = unassigned DNA
agcagccggcgccgtctctgcccccgggcgccctatggcttgaagagcctggccacccagtggctccaccgccctgatggatccactgaatctgtcctggtatgatgatgatctggagaggcagaactggagccggcccttcaacgggtcagacgggaaggcggacagaccccactacaactactatgccacactgctcaccctgctcatcgctgtcatcgtcttcggcaacgtgctggtgtgcatggctgtgtcccgcgagaaggcgctgcagaccaccaccaactacctgatcgtcagcctcgcagtggccgacctcctcgtcgccacactggtcatgccctgggttgtctacctggaggtggtaggtgagtggaaattcagcaggattcactgtgacatcttcgtcactctggacgtcatgatgtgcacggcgagcatcctgaacttgtgtgccatcagcatcgacaggtacacagctgtggccatgcccatgctgtacaatacgcgctacagctccaagcgccgggtcaccgtcatgatctccatcgtctgggtcctgtccttcaccatctcctgcccactcctcttcggactcaataacgcagaccagaacgagtgcatcattgccaacccggccttcgtggtctactcctccatcgtctccttctacgtgcccttcattgtcaccctgctggtctacatcaagatctacattgtcctccgcagacgccgcaagcgagtcaacaccaaacgcagcagccgagctttcagggcccacctgagggctccactaaaggaggctgcccggcgagcccaggagctggagatggagatgctctccagcaccagcccacccgagaggacccggtacagccccatcccacccagccaccaccagctgactctccccgacccgtcccaccatggtctccacagcactcccgacagccccgccaaaccagagaagaatgggcatgccaaagaccaccccaagattgccaagatctttgagatccagaccatgcccaatggcaaaacccggacctccctcaagaccatgagccgtaggaagctctcccagcagaaggagaagaaagccactcagatgctcgccattgttctcggcgtgttcatcatctgctggctgcccttcttcatcacacacatcctgaacatacactgtgactgcaacatcccgcctgtcctgtacagcgccttcacgtggctgggctatgtcaacagcgccgtgaaccccatcatctacaccaccttcaacattgagttccgcaaggccttcctgaagatcctccactgctgactctgctgcctgcccgcacagcagcctgcttcccacctccctgcccaggccggccagcctcacccttgcgaaccgtgagcaggaaggcctgggtggatcggcctcctcttcaccccggcaggccctgcagtgttcgcttggctccatgctcctcactgcccgcacaccctcactctgccagggcagtgctagtgagctgggcatggtaccagccctggggctgggccccccagctcaggggcagctcatagagtcccccctcccacctccagtccccctatccttggcaccaaagatgcagccgccttccttgaccttcctctggggctctagggttgctggagcctgagtcagggcccagaggctgagttttctctttgtggggcttggcgtggagcaggcggtggggagagatggacagttcacaccctgcaaggcccacaggaggcaagcaagctctcttgccgaggagccaggcaacttcagtcctgggagacccatgtaaataccagactgcaggttggaccccagagattcccaagccaaaaaccttagctccctcccgcaccccgatgtggacctctactttccaggctagtccggacccacctcaccccgttacagctccccaagtggtttccacatgctctgagaagaggagccctcatcttgaagggcccaggagggtctatggggagaggaactccttggcctagcccaccctgctgccttctgacggccctgcaatgtatcccttctcacagcacatgctggccagcctggggcctggcagggaggtcaggccctggaactctatctgggcctgggctaggggacatcagaggttctttgagggactgcctctgccacactctgacgcaaaaccactttccttttctattccttctggcctttcctctctcctgtttcccttcccttccactgcctctgccttagaggagcccacggctaagaggctgctgaaaaccatctggcctggcctggccctgccctgaggaaggaggggaagctgcagcttgggagagcccctggggcctagactctgtaacatcactatccatgcaccaaactaataaaactttgacgagtca

SEQ ID NO: 6039 - DNA, 2789 bp, Homo sapiens
  source 1..2789: mol_type = unassigned DNA; mol_type = unassigned DNA
ccggcagcctcacgcgcgcaccgcgccgcctccgccccgtccccgcgctccctcctgcccgcccgccccgcgcccggccccgccccgccccgccccgccgcggcccgtccactgctccccgcgggccagagccggccgagctgctgcccgccggggctctgaacggcgcggcggggccgggagccagggaccggccgaggagagtggcggccccggacggctgccggaggggcggccgcgcgtggatgcggcgggagctggaagcctcaagcagccggcgccgtctctgcccccgggcgccctatggcttgaagagcctggccacccagtggctccaccgccctgatggatccactgaatctgtcctggtatgatgatgatctggagaggcagaactggagccggcccttcaacgggtcagacgggaaggcggacagaccccactacaactactatgccacactgctcaccctgctcatcgctgtcatcgtcttcggcaacgtgctggtgtgcatggctgtgtcccgcgagaaggcgctgcagaccaccaccaactacctgatcgtcagcctcgcagtggccgacctcctcgtcgccacactggtcatgccctgggttgtctacctggaggtggtaggtgagtggaaattcagcaggattcactgtgacatcttcgtcactctggacgtcatgatgtgcacggcgagcatcctgaacttgtgtgccatcagcatcgacaggtacacagctgtggccatgcccatgctgtacaatacgcgctacagctccaagcgccgggtcaccgtcatgatctccatcgtctgggtcctgtccttcaccatctcctgcccactcctcttcggactcaataacgcagaccagaacgagtgcatcattgccaacccggccttcgtggtctactcctccatcgtctccttctacgtgcccttcattgtcaccctgctggtctacatcaagatctacattgtcctccgcagacgccgcaagcgagtcaacaccaaacgcagcagccgagctttcagggcccacctgagggctccactaaagggcaactgtactcaccccgaggacatgaaactctgcaccgttatcatgaagtctaatgggagtttcccagtgaacaggcggagagtggaggctgcccggcgagcccaggagctggagatggagatgctctccagcaccagcccacccgagaggacccggtacagccccatcccacccagccaccaccagctgactctccccgacccgtcccaccatggtctccacagcactcccgacagccccgccaaaccagagaagaatgggcatgccaaagaccaccccaagattgccaagatctttgagatccagaccatgcccaatggcaaaacccggacctccctcaagaccatgagccgtaggaagctctcccagcagaaggagaagaaagccactcagatgctcgccattgttctcggcgtgttcatcatctgctggctgcccttcttcatcacacacatcctgaacatacactgtgactgcaacatcccgcctgtcctgtacagcgccttcacgtggctgggctatgtcaacagcgccgtgaaccccatcatctacaccaccttcaacattgagttccgcaaggccttcctgaagatcctccactgctgactctgctgcctgcccgcacagcagcctgcttcccacctccctgcccaggccggccagcctcacccttgcgaaccgtgagcaggaaggcctgggtggatcggcctcctcttcaccccggcaggccctgcagtgttcgcttggctccatgctcctcactgcccgcacaccctcactctgccagggcagtgctagtgagctgggcatggtaccagccctggggctgggccccccagctcaggggcagctcatagagtcccccctcccacctccagtccccctatccttggcaccaaagatgcagccgccttccttgaccttcctctggggctctagggttgctggagcctgagtcagggcccagaggctgagttttctctttgtggggcttggcgtggagcaggcggtggggagagatggacagttcacaccctgcaaggcccacaggaggcaagcaagctctcttgccgaggagccaggcaacttcagtcctgggagacccatgtaaataccagactgcaggttggaccccagagattcccaagccaaaaaccttagctccctcccgcaccccgatgtggacctctactttccaggctagtccggacccacctcaccccgttacagctccccaagtggtttccacatgctctgagaagaggagccctcatcttgaagggcccaggagggtctatggggagaggaactccttggcctagcccaccctgctgccttctgacggccctgcaatgtatcccttctcacagcacatgctggccagcctggggcctggcagggaggtcaggccctggaactctatctgggcctgggctaggggacatcagaggttctttgagggactgcctctgccacactctgacgcaaaaccactttccttttctattccttctggcctttcctctctcctgtttcccttcccttccactgcctctgccttagaggagcccacggctaagaggctgctgaaaaccatctggcctggcctggccctgccctgaggaaggaggggaagctgcagcttgggagagcccctggggcctagactctgtaacatcactatccatgcaccaaactaataaaactttgacgagtca

SEQ ID NO: 6040 - DNA, 2473 bp, Homo sapiens
  source 1..2473: mol_type = unassigned DNA; mol_type = unassigned DNA
agagcctggccacccagtggctccaccgccctgatggatccactgaatctgtcctggtatgatgatgatctggagaggcagaactggagccggcccttcaacgggtcagacgggaaggcggacagaccccactacaactactatgccacactgctcaccctgctcatcgctgtcatcgtcttcggcaacgtgctggtgtgcatggctgtgtcccgcgagaaggcgctgcagaccaccaccaactacctgatcgtcagcctcgcagtggccgacctcctcgtcgccacactggtcatgccctgggttgtctacctggaggtaggtgagtggaaattcagcaggattcactgtgacatcttcgtcactctggacgtcatgatgtgcacggcgagcatcctgaacttgtgtgccatcagcatcgacaggtacacagctgtggccatgcccatgctgtacaatacgcgctacagctccaagcgccgggtcaccgtcatgatctccatcgtctgggtcctgtccttcaccatctcctgcccactcctcttcggactcaataacgcagaccagaacgagtgcatcattgccaacccggccttcgtggtctactcctccatcgtctccttctacgtgcccttcattgtcaccctgctggtctacatcaagatctacattgtcctccgcagacgccgcaagcgagtcaacaccaaacgcagcagccgagctttcagggcccacctgagggctccactaaagggcaactgtactcaccccgaggacatgaaactctgcaccgttatcatgaagtctaatgggagtttcccagtgaacaggcggagagtggaggctgcccggcgagcccaggagctggagatggagatgctctccagcaccagcccacccgagaggacccggtacagccccatcccacccagccaccaccagctgactctccccgacccgtcccaccatggtctccacagcactcccgacagccccgccaaaccagagaagaatgggcatgccaaagaccaccccaagattgccaagatctttgagatccagaccatgcccaatggcaaaacccggacctccctcaagaccatgagccgtaggaagctctcccagcagaaggagaagaaagccactcagatgctcgccattgttctcggcgtgttcatcatctgctggctgcccttcttcatcacacacatcctgaacatacactgtgactgcaacatcccgcctgtcctgtacagcgccttcacgtggctgggctatgtcaacagcgccgtgaaccccatcatctacaccaccttcaacattgagttccgcaaggccttcctgaagatcctccactgctgactctgctgcctgcccgcacagcagcctgcttcccacctccctgcccaggccggccagcctcacccttgcgaaccgtgagcaggaaggcctgggtggatcggcctcctcttcaccccggcaggccctgcagtgttcgcttggctccatgctcctcactgcccgcacaccctcactctgccagggcagtgctagtgagctgggcatggtaccagccctggggctgggccccccagctcaggggcagctcatagagtcccccctcccacctccagtccccctatccttggcaccaaagatgcagccgccttccttgaccttcctctggggctctagggttgctggagcctgagtcagggcccagaggctgagttttctctttgtggggcttggcgtggagcaggcggtggggagagatggacagttcacaccctgcaaggcccacaggaggcaagcaagctctcttgccgaggagccaggcaacttcagtcctgggagacccatgtaaataccagactgcaggttggaccccagagattcccaagccaaaaaccttagctccctcccgcaccccgatgtggacctctactttccaggctagtccggacccacctcaccccgttacagctccccaagtggtttccacatgctctgagaagaggagccctcatcttgaagggcccaggagggtctatggggagaggaactccttggcctagcccaccctgctgccttctgacggccctgcaatgtatcccttctcacagcacatgctggccagcctggggcctggcagggaggtcaggccctggaactctatctgggcctgggctaggggacatcagaggttctttgagggactgcctctgccacactctgacgcaaaaccactttccttttctattccttctggcctttcctctctcctgtttcccttcccttccactgcctctgccttagaggagcccacggctaagaggctgctgaaaaccatctggcctggcctggccctgccctgaggaaggaggggaagctgcagcttgggagagcccctggggcctagactctgtaacatcactatccatgcaccaaactaataaaactttgacgagtc

SEQ ID NO: 6041 - DNA, 2467 bp, Homo sapiens
  source 1..2467: mol_type = unassigned DNA; mol_type = unassigned DNA
ttaagaagtgtttgttgaatgaataaataaatgatggatcagctctgttcaagctcatcttattatgcatttttaaaaaattgtgtttgctcatttgtcctaccagctgtaaaaacttgctagcaaaagagtggcagaaggcccaacatttttagaaaattcttagccgtaaaccttaaaatcccgagttggaaaattctcattattaaatgccaggagttggtcttcttcctggagacctctgcaagaggccctctcactgacaccttgtgtccatttttcctggccagagcctggccacccagtggctccaccgccctgatggatccactgaatctgtcctggtatgatgatgatctggagaggcagaactggagccggcccttcaacgggtcagacgggaaggcggacagaccccactacaactactatgccacactgctcaccctgctcatcgctgtcatcgtcttcggcaacgtgctggtgtgcatggctgtgtcccgcgagaaggcgctgcagaccaccaccaactacctgatcgtcagcctcgcagtggccgacctcctcgtcgccacactggtcatgccctgggttgtctacctggaggtggtaggtgagtggaaattcagcaggattcactgtgacatcttcgtcactctggacgtcatgatgtgcacggcgagcatcctgaacttgtgtgccatcagcatcgacaggtacacagctgtggccatgcccatgctgtacaatacgcgctacagctccaagcgccgggtcaccgtcatgatctccatcgtctgggtcctgtccttcaccatctcctgcccactcctcttcggactcaataacgcagaccagaacgagtgcatcattgccaacccggccttcgtggtctactcctccatcgtctccttctacgtgcccttcattgtcaccctgctggtctacatcaagatctacattgtcctccgcagacgccgcaagcgagtcaacaccaaacgcagcagccgagctttcagggcccacctgagggctccactaaagggcaactgtactcaccccgaggacatgaaactctgcaccgttatcatgaagtctaatgggagtttcccagtgaacaggcggagagtggaggctgcccggcgagcccaggagctggagatggagatgctctccagcaccagcccacccgagaggacccggtacagccccatcccacccagccaccaccagctgactctccccgacccgtcccaccatggtctccacagcactcccgacagccccgccaaaccagagaagaatgggcatgccaaagaccaccccaagattgccaagatctttgagatccagaccatgcccaatggcaaaacccggacctccctcaagaccatgagccgtaggaagctctcccagcagaaggagaagaaagccactcagatgctcgccattgttctcggcgtgttcatcatctgctggctgcccttcttcatcacacacatcctgaacatacactgtgactgcaacatcccgcctgtcctgtacagcgccttcacgtggctgggctatgtcaacagcgccgtgaaccccatcatctacaccaccttcaacattgagttccgcaaggccttcctgaagatcctccactgctgactctgctgcctgcccgcacagcagcctgcttcccacctccctgcccaggccggccagcctcacccttgcgaaccgtgagcaggaaggcctgggtggatcggcctcctcttcaccccggcaggccctgcagtgttcgcttggctccatgctcctcactgcccgcacaccctcactctgccagggcagtgctagtgagctgggcatggtaccagccctggggctgggccccccagctcaggggcagctcatagagtcccccctcccacctccagtccccctatccttggcaccaaagatgcagccgccttccttgaccttcctctggggctctagggttgctggagcctgagtcagggcccagaggctgagttttctctttgtggggcttggcgtggagcaggcggtggggagagatggacagttcacaccctgcaaggcccacaggaggcaagcaagctctcttgccgaggagccaggcaacttcagtcctgggagacccatgtaaataccagactgcaggttggaccccagagattcccaagccaaaaaccttagctccctcccgcaccccgatgtggacctctactttccaggctagtccggacccacctcaccccgttacagctccccaagtggtttccacatgctctgagaagaggagccctcatcttgaagggcccaggagggtctatggggagaggaactccttggcctagcccaccctgctgccttctgacggccctgcaatgtatcccttctcacagcacatgctggccagcctggggcctggcagggaggtcaggccctggaactc

SEQ ID NO: 6042 - DNA, 1493 bp, Homo sapiens
  source 1..1493: mol_type = unassigned DNA; mol_type = unassigned DNA
atggatccactgaatctgtcctggtatgatgatgatctggagaggcagaactggagccggcccttcaacgggtcagacgggaaggcggacagaccccactacaactactatgccacactgctcaccctgctcatcgctgtcatcgtcttcggcaacgtgctggtgtgcatggctgtgtcccgcgagaaggcgctgcagaccaccaccaactacctgatcgtcagcctcgcagtggccgacctcctcgtcgccacactggtcatgccctgggttgtctacctggaggtggtaggtgagtggaaattcagcaggattcactgtgacatcttcgtcactctggacgtcatgatgtgcacggcgagcatcctgaacttgtgtgccatcagcatcgacaggtacacagctgtggccatgcccatgctgtacaatacgcgctacagctccaagcgccgggtcaccgtcatgatctccatcgtctgggtcctgtccttcaccatctcctgcccactcctcttcggactcaataacgcagaccagaacgagtgcatcattgccaacccggccttcgtggtctactcctccatcgtctccttctacgtgcccttcattgtcaccctgctggtctacatcaagatctacattgtcctccgcagacgccgcaagcgagtcaacaccaaacgcagcagccgagctttcagggcccacctgagggctccactaaagggcaactgtactcaccccgaggacatgaaactctgcaccgttatcatgaagtctaatgggagtttcccagtgaacaggcggagagtggtgcaggaggctgcccggcgagcccaggagctggagatggagatgctctccagcaccagcccacccgagaggacccggtacagccccatcccacccagccaccaccagctgactctccccgacccgtcccaccatggtctccacagcactcccgacagccccgccaaaccagagaagaatgggcatgccaaagaccaccccaagattgccaagatctttgagatccagaccatgcccaatggcaaaacccggacctccctcaagaccatgagccgtaggaagctctcccagcagaaggagaagaaagccactcagatgctcgccattgttctcggcgtgttcatcatctgctggctgcccttcttcatcacacacatcctgaacatacactgtgactgcaacatcccgcctgtcctgtacagcgccttcacgtggctgggctatgtcaacagcgccgtgaaccccatcatctacaccaccttcaacattgagttccgcaaggccttcctgaagatcctccactgctgactctgctgcctgcccgcacagcagcctgcttcccacctccctgcccaggccggccagcctcacccttgcgaaccgtgagcaggaaggcctgggtggatcggcctcctcttcaccccggcaggccctgcagtgttcgcttggctccatgctcctca

SEQ ID NO: 6043 - DNA, 1386 bp, Homo sapiens
  source 1..1386: mol_type = unassigned DNA; mol_type = unassigned DNA
tgagtcctcaaaggagaagactggcgagcagacgagcctggccacccagtggctccaccgccctgatggatccactgaatctgtcctggtatgatgatgatctggagaggcagaactggagccggcccttcaacgggtcagacgggaaggcggacagaccccactacaactactatgccacactgctcaccctgctcatcgctgtcatcgtcttcggcaacgtgctggtgtgcatggctgtgtcccgcgagaaggcgctgcagaccaccaccaactacctgatcgtcagcctcgcagtggccgacctcctcgtcgccacactggtcatgccctgggttgtctacctggaggtggtaggtgagtggaaattcagcaggattcactgtgacatcttcgtcactctggacgtcatgatgtgcacggcgagcatcctgaacttgtgtgccatcagcatcgacaggtacacagctgtggccatgcccatgctgtacaatacgcgctacagctccaagcgccgggtcaccgtcatgatctccatcgtctgggtcctgtccttcaccatctcctgcccactcctcttcggactcaataacgcagaccagaacgagtgcatcattgccaacccggccttcgtggtctactcctccatcgtctccttctacgtgcccttcattgtcaccctgctggtctacatcaagatctacattgtcctccgcagacgccgcaagcgagtcaacaccaaacgcagcagccgagctttcagggcccacctgagggctccactaaagggcaactgtactcaccccgaggacatgaaactctgcaccgttatcatgaagtctaatgggagtttcccagtgaacaggcggagagtggtaagtgctcaggccagggacccagagccaggtctttctgcccctagggaagcccactggccatggttctgagacctcagaagctggccaatgggagaagcaccccagaaacccccaccttgcctcagctgaaggcagactcaccgtgcacacctccaagcaggcatgaagtgagacacctcggttctgcaaggcatggatgtgtacgagaaaatggttggccataccaacgtaataaaaatgataataatggctattcacatttctcaaacatctaccatatccctattatctcatcaaatcctcaccacgaccccgggaggtaagtctctttgatcgaaccgatcttcagttgacagaagaggaaacaggctcagaaagattaggcaactcacccgtctcaagagttggtgacactaagcccagacctgtgtgactctgaaatccacacctgtgttctttccactgacatgagctgccttatggatgggcaggttctggggtaggacgc

SEQ ID NO: 6044 - DNA, 529 bp, Homo sapiens
  source 1..529: mol_type = unassigned DNA; mol_type = unassigned DNA
gtcttcggcaacgtgctggtgtgcatggctgtgtcccgcgagaaggcgctgcagaccaccaccaactacctgatcgtcagcctcgcagtggccgacctcctcgtcgccacactggtcatgccctgggttgtctacctggaggtggtaggtgagtggaaattcagcaggattcactgtgacatcttcgtcactctggacgtcatgatgtgcacggcgagcatcctgaacttgtgtgccatcagcatcgacagaccagaacgagtgcatcattgccaacccggccttcgtggtctactcctccatcgtctccttctacgtgcccttcattgtcaccctgctggtctacatcaagatctacattgtcctccgcagacgccgcaagcgagtcaacaccaaacgcagcagccgagctttcagggcccacctgagggctccactaaagggcaactgtactcaccccgaggacatgaaactctgcaccgttatcatgaagtctaatgggagtttcccagtgaacaggcggagagtg

SEQ ID NO: 6045 - DNA, 546 bp, Homo sapiens
  source 1..546: mol_type = unassigned DNA; mol_type = unassigned DNA
tcagcaggattcactgtgacatcttcgtcactctggacgtcatgatgtgcacggcgagcatcctgaacttgtgtgccatcagcatcgacaggtacacagctgtggccatgcccatgctgtacaatacgcgctacagctccaagcgccgggtcaccgtcatgatctccatcgtctgggtcctgtccttcaccatctcctgcccactcctcttcggactcaataacgcagaccagaacgagtgcatcattgccaacccggccttcgtggtctactcctccatcgtctccttctacgtgcccttcattgtcaccctgctggtctacatcaagatctacattgtcctccgcagacgccgcaagcgagtcaacaccaaacgcagcagccgagctttcagggcccacctgagggctccactaaaggtctcaagacaccccccaaccaactccaagggtccccacctaaccattaccaagagggctcatcttatgctcaggtgggggcttgggaaacctcagcaagggttaggtctaggctaaaggaattccc

SEQ ID NO: 6046 - DNA, 714 bp, Homo sapiens
  source 1..714: mol_type = unassigned DNA; mol_type = unassigned DNA
gccagatgctgactgcctgtcagaattcagtccctacacaccccgccccatgtctgtctgtcttgcttcatggaccactcacaccccagagttccgcctgccttctctgttgcccaccaaacccgtgtgtgtttgttcgttcatatgcaagagcctggccacccagtggctccaccgccctgatggatccactgaatctgtcctggtatgatgatgatctggagaggcagaactggagccggcccttcaacgggtcagacgggaaggcggacagaccccactacaactactatgccacactgctcaccctgctcatcgctgtcatcgtcttcggcaacgtgctggtgtgcatggctgtgtcccgcgagaaggcgctgcagaccaccaccaactacctgatcgtcagcctcgcagtggccgacctcctcgtcgccacactggtcatgccctgggttgtctacctggaggtggtaggtgagtggaaattcagcaggattcactgtgacatcttcgtcactctggacgtcatgatgtgcacggcgagcatcctgaacttgtgtgccatcagcatcgacaggtacacagctgtggccatgcccatgctgtacaatacgcgctacagctccaagcgccgggtcaccgtcatgatctccatcgtctgggtcctgtccttcaccatctcctgcccactcctcttcggactcaataacgcag

SEQ ID NO: 6047 - DNA, 443 bp, Homo sapiens
  source 1..443: mol_type = unassigned DNA; mol_type = unassigned DNA
actgctccccgcgggccagagccggccgagctgctgcccgccggggctctgaacggcgcggcggggccgggagccagggaccggccgaggagagtggcggccccggacggctgccggaggggcggccgcgcgtggatgcggcgggagctggaagcctcaagcagccggcgccgtctctgcccccgggcgccctatggcttgaagtgcaggcgacggtggcggcagtagcggagggtgaccgcccggctctcggcccggctctatgatggaccgagagcccctctagggtggtatgcggagacaagagacacctctaagcaccagacagagcgcttccctatccctgtctgaggcgggcagcccttgagtgcttcctcttgaagagcagagagcctggccacccagtggctccaccgccctgatggatccactgaatctgtcct

SEQ ID NO: 6048 - DNA, 6099 bp, Homo sapiens
  source 1..6099: mol_type = unassigned DNA; mol_type = unassigned DNA
cctctttatggcatgtggctggtaactttcctcctgctcctggactctttacacaaagcccgccctgaagatgttggcaccagcctctactttgtaaatgactccttgcagcagctgccctgcaccgcctcgggctaccctatccccgccatccgctggctcaaggatggccggcccctcccggctgacagccgctggaccaagcgcatcacagggctgaccatcagcgacttgcggaccgaggacagcggcacctacatttgtgaggtcaccaacaccttcggttcggcagaggccacaggcatcctcatggtcattgatccccttcatgtgaccctgacaccaaagaagctgaagaccggcattggcagcacggtcatcctctcctgtgccctgacgggctccccagagttcaccatccgctggtatcgcaacacggagctggtgctgcctgacgaggccatctccatccgcgggctcagcaacgagacgctgctcatcacctcggcccagaagagccattccggggcctaccagtgcttcgctacccgcaaggcccagaccgcccaggactttgccatcattgcacttgaggatggcacgccccgcatcgtctcgtccttcagcgagaaggtggtcaaccccggggagcagttctcactgatgtgtgcggccaagggcgccccgccccccacggtcacctgggccctcgacgatgagcccatcgtgcgggatggcagccaccgcaccaaccagtacaccatgtcggacggcaccaccatcagccacatgaacgtcacaggcccccagatccgcgacgggggcgtgtaccggtgcacagcgcggaacttggtgggcagtgctgaatatcaggcgcgaataaacgtaagaggcccacccagcatccgggctatgcggaacatcacagcagtcgccgggcgggacacccttatcaactgcagggtcatcggctatccctactactccatcaagtggtacaaggatgccctgctgctgccagacaaccaccgccaggtggtgtttgagaatgggaccctcaagctgactgacgtgcagaagggcatggatgagggggagtacctgtgcagtgtcctcatccagccccagctctccatcagccagagcgttcacgtagccgtcaaagtgccccctctgatccagcccttcgaattcccacccgcctccatcggccagctgctctacattccctgtgtggtgtcctcgggggacatgcccatccgtatcacctggaggaaggacggacaggtgatcatctcaggctcgggcgtgaccatcgagagcaaggaattcatgagctccctgcagatctctagcgtctccctcaagcacaacggcaactatacatgcatcgccagcaacgcagccgccaccgtgagccgggagcgccagctcatcgtgcgtgtgccccctcgatttgtggtgcaacccaacaaccaggatggcatctacggcaaagctggtgtgctcaactgctcggtggacggctaccccccacccaaggtcatgtggaagcatgccaaggggagcgggaacccccagcagtaccaccctgtgcccctcactggccgcatccagatcctgcccaacagctcgctgctgatccgccacgtcctagaagaggacatcggctactacctctgccaggccagcaacggcgtaggcaccgacatcagcaagtccatgttcctcacagtcaagatcccggccatgatcacttcccaccccaacaccaccatcgccatcaagggccatgcgaaggagctaaactgcacggcacggggtgagcggcccatcatcatccgctgggagaagggggacacagtcatcgaccctgaccgcgtcatgcggtatgccatcgccaccaaggacaacggcgacgaggtcgtctccacactgaagctcaagcccgctgaccgtggggactctgtgttcttcagctgccatgccatcaactcgtatggggaggaccggggcttgatccaactcactgtgcaagagccccccgaccccccagagctggagatccgggaggtgaaggcccggagcatgaacctgcgctggacccagcgattcgacgggaacagcatcatcacgggcttcgacattgaatacaagaacaaatcagattcctgggacttcaagcagtccacacgcaacatctcccccaccatcaaccaggccaacattgtggacttgcacccggcatctgtgtacagcatccgcatgtactctttcaacaagattggccgcagtgaaccaagcaaggagctcaccatcagcactgaggaggccgctcccgatgggccccccatggatgttaccttgcagccagtgacctcacagagcatccaggtgacctggaaggcacccaagaaggagctgcagaacggtgtcatccggggctaccagattggctacagagagaacagccccggcagcaacgggcagtacagcatcgtggagatgaaggccacgggggacagcgaggtctacaccctggacaacctcaagaagttcgcccagtatggggtggtggtccaagccttcaatcgggctggcacggggccctcttccagcgagatcaatgccaccactctggaggatgtgcccagccagccccctgagaacgtccgggccctgtccatcacttctgacgtggccgtcatctcctggtcagagcccccgcgcagcaccctcaatggcgtcctcaaaggctatcgggtcatcttctggtccctctatgttgatggggagtggggcgagatgcagaacatcaccaccacgcgggagcgggtggagctgcggggcatggagaagttcaccaactacagcgtccaggtgctggcctacacccaggctggggacggcgtacgcagcagtgtgctctacatccagaccaaggaggacgttccaggtccccctgctggcatcaaagctgtcccttcatcagctagcagtgtggttgtgtcttggctcccccctaccaagcccaacggggtgatccgcaagtacaccatcttctgttccagccccgggtctggccagccggctcccagcgagtacgagacgagtccagagcagctcttctaccggatcgcccacctaaaccgcggtcagcagtatctgctgtgggtggccgccgtcacctctgccggccggggcaacagcagcgagaaggtgaccatcgagcctgctggcaaggccccagcaaagatcatctcctttgggggcaccgtgacaacaccttggatgaaagatgttcggctgccttgcaattcagtgggagatccagcccctgctgtgaagtggaccaaggacagtgaagactcggccattccagtgtccatggatgggcaccggctcatccacaccaatggcacactgctgctgcgtgcagtgaaggctgaggactctggctactacacgtgcacggccaccaacactggtggctttgacaccatcatcgtcaaccttctggtgcaagttcccccggaccagccccgcctcactgtctccaaaacctcagcttcgtccatcaccctgacctggattccaggtgacaatgggggcagctccatccgaggcttcgtgctacagtactcggtggacaacagcgaggagtggaaggatgtgttcatcagctccagcgagcgctccttcaagctggacagcctcaagtgtggcacgtggtacaaggtgaagctggcagccaagaacagcgtgggctctgggcgcatcagcgagatcatcgaggccaagacccacgggcgggagccctccttcagcaaagaccaacacctcttcacccacatcaactccacgcatgctcggcttaacctgcagggctggaacaatgggggctgccctatcacagccatcgttctggagtaccggcccaaggggacctgggcctggcagggcctccgggccaacagctccggggaggtgtttctgacggaactgcgagaggccacgtggtacgagctgcgcatgagggcttgcaacagtgcgggctgcggcaatgaaacagcccagttcgccaccctggactacgatggcagcaccattccacccatcaagtctgctcaaggtgaaggggatgatgtgaagaagctgttcaccatcggctgccctgtcatcctggccacactgggggtggcactgctcttcatcgtacgcaagaagaggaaggagaaacggctgaagcgactccgagatgcaaagagtttggcagaaatgttgataagcaagaacaatagaagctttgacacccctgtgaaagggccaccccagggcccacggctacacattgacatccccagggtccagctgctcatcgaggacaaagaaggcatcaagcaactgggagatgacaaggccaccatccctgtgacagatgctgagttcagccaagctgtcaacccacagagcttctgtactggcgtctccttgcaccacccaaccctcatccagagcacaggacccctcatcgacatgtctgacatccggccaggaaccaatccagtgtccaggaagaatgtgaagtcagcccacagcacccggaaccggtactcaagccagtggaccctgaccaagtgccaggcctccacacctgcccgcaccctcacctccgactggcgcaccgtgggctcccagcatggtgtcacggtcactgagagtgacagctacagtgccagcctgtcccaggacacagacaaaggaaggaacagcatggtgtccactgagagtgcctcttccacctacgaggagctggcccgggcctatgagcatgccaagctggaggagcagctgcagcacgccaagtttgagatcaccgagtgcttcatctctgacagttcctctgaccagatgaccacaggcaccaacgagaacgccgacagcatgacatccatgagcacaccctcagagcctggcatctgccgctttaccgcctcaccacccaagccccaggatgcggaccggggcaaaaacgtggctgtgcccatccctcaccgggccaacaagagtgactactgcaacctgcccctgtatgccaagtcagaggccttctttcgaaaggcagatggacgtgagccctgccccgtggtcccaccccgtgaggcctccatccggaacctggctcgaacctaccacacccaggctcgccacctgaccctggaccctgccagcaagtccttgggccttccccacccaggggcccccgctgccgcctccacagccaccttacctcagaggactctggccatgccagcccccccagccggcacagcccccccagcccccggccccacccctgctgagccacccaccgcccccagcgctgcccctccggcccccagcaccgagcctccacgagccgggggcccacacaccaaaatggggggctccagggactcgcttctcgagatgagcacatcgggggtagggaggtctcagaagcagggggccggggcctactccaaatcctacaccctggtgtagggcccgcaggaagagcagccacgcctggaccgcgccgcgccgcagccccacacgccagctcggctgtttttctgcattatttatattcaactgacagacaaaaaccaaccaacgacaaaacaaaaacccccaatcatgaacgcctgtacatagaactcttttgtacaaatgaaactattttcttcttctccatgaagccagggcacaaagaatttgacagtacaagtcaaatcccccaccccacaaaatatgtgtggagatatatatacatatatagacagacaggaacgcgtccacgagctatatatctatatatttctctcaccctattttgagacagaggcacaaagactcagcaatttttttccctcctcctcaccttccccccagtctaggtggttttgacaaagaccaaaatcccaactcagagacactgcatgcgattttactgttccaagaaaaccaggagttgcttcaatttgcagatgcttatgtgttaatacctttttctatgaaaaaagacccagcgccgtgtgcaataaaggttatgtttct

SEQ ID NO: 6049 - DNA, 6899 bp, Homo sapiens
  source 1..6899: mol_type = unassigned DNA; mol_type = unassigned DNA
ggatgacaggagccggggagccgaggagggaggagccgccgccgcagccgagcgctgggctgaggagcagagagagcggggcgccgagtgcgggcggctgggagcgcgctgagcgggggagaggcgctgccgcacggccggccacaggaccacctccccggagaatagggcctctttatggcatgtggctggtaactttcctcctgctcctggactctttacacaaagcccgccctgaagatgttggcaccagcctctactttgtaaatgactccttgcagcaggtgaccttttccagctccgtgggggtggtggtgccctgcccggccgcgggctcccccagcgcggcccttcgatggtacctggccacaggggacgacatctacgacgtgccgcacatccggcacgtccacgccaacgggacgctgcagctctaccccttctccccctccgccttcaatagctttatccacgacaatgactacttctgcaccgcggagaacgctgccggcaagatccggagccccaacatccgcgtcaaagcagttttcagggaaccctacaccgtccgggtggaggatcaaaggtcaatgcgtggcaacgtggccgtcttcaagtgcctcatcccctcttcagtgcaggaatatgttagcgttgtatcttgggagaaagacacagtctccatcatcccagaacacaggttttttattacctaccacggcgggctgtacatctctgacgtacagaaggaggacgccctctccacctatcgctgcatcaccaagcacaagtatagcggggagacccggcagagcaatggggcacgcctctctgtgacagaccctgctgagtcgatccccaccatcctggatggcttccactcccaggaagtgtgggccggccacaccgtggagctgccctgcaccgcctcgggctaccctatccccgccatccgctggctcaaggatggccggcccctcccggctgacagccgctggaccaagcgcatcacagggctgaccatcagcgacttgcggaccgaggacagcggcacctacatttgtgaggtcaccaacaccttcggttcggcagaggccacaggcatcctcatggtcattgatccccttcatgtgaccctgacaccaaagaagctgaagaccggcattggcagcacggtcatcctctcctgtgccctgacgggctccccagagttcaccatccgctggtatcgcaacacggagctggtgctgcctgacgaggccatctccatccgcgggctcagcaacgagacgctgctcatcacctcggcccagaagagccattccggggcctaccagtgcttcgctacccgcaaggcccagaccgcccaggactttgccatcattgcacttgaggatggcacgccccgcatcgtctcgtccttcagcgagaaggtggtcaaccccggggagcagttctcactgatgtgtgcggccaagggcgccccgccccccacggtcacctgggccctcgacgatgagcccatcgtgcgggatggcagccaccgcaccaaccagtacaccatgtcggacggcaccaccatcagccacatgaacgtcacaggcccccagatccgcgacgggggcgtgtaccggtgcacagcgcggaacttggtgggcagtgctgaatatcaggcgcgaataaacgtaagaggcccacccagcatccgggctatgcggaacatcacagcagtcgccgggcgggacacccttatcaactgcagggtcatcggctatccctactactccatcaagtggtacaaggatgccctgctgctgccagacaaccaccgccaggtggtgtttgagaatgggaccctcaagctgactgacgtgcagaagggcatggatgagggggagtacctgtgcagtgtcctcatccagccccagctctccatcagccagagcgttcacgtagccgtcaaagtgccccctctgatccagcccttcgaattcccacccgcctccatcggccagctgctctacattccctgtgtggtgtcctcgggggacatgcccatccgtatcacctggaggaaggacggacaggtgatcatctcaggctcgggcgtgaccatcgagagcaaggaattcatgagctccctgcagatctctagcgtctccctcaagcacaacggcaactatacatgcatcgccagcaacgcagccgccaccgtgagccgggagcgccagctcatcgtgcgtgtgccccctcgatttgtggtgcaacccaacaaccaggatggcatctacggcaaagctggtgtgctcaactgctcggtggacggctaccccccacccaaggtcatgtggaagcatgccaaggggagcgggaacccccagcagtaccaccctgtgcccctcactggccgcatccagatcctgcccaacagctcgctgctgatccgccacgtcctagaagaggacatcggctactacctctgccaggccagcaacggcgtaggcaccgacatcagcaagtccatgttcctcacagtcaagatcccggccatgatcacttcccaccccaacaccaccatcgccatcaagggccatgcgaaggagctaaactgcacggcacggggtgagcggcccatcatcatccgctgggagaagggggacacagtcatcgaccctgaccgcgtcatgcggtatgccatcgccaccaaggacaacggcgacgaggtcgtctccacactgaagctcaagcccgctgaccgtggggactctgtgttcttcagctgccatgccatcaactcgtatggggaggaccggggcttgatccaactcactgtgcaagagccccccgaccccccagagctggagatccgggaggtgaaggcccggagcatgaacctgcgctggacccagcgattcgacgggaacagcatcatcacgggcttcgacattgaatacaagaacaaatcagattcctgggacttcaagcagtccacacgcaacatctcccccaccatcaaccaggccaacattgtggacttgcacccggcatctgtgtacagcatccgcatgtactctttcaacaagattggccgcagtgaaccaagcaaggagctcaccatcagcactgaggaggccgctcccgatgggccccccatggatgttaccttgcagccagtgacctcacagagcatccaggtgacctggaaggcacccaagaaggagctgcagaacggtgtcatccggggctaccagattggctacagagagaacagccccggcagcaacgggcagtacagcatcgtggagatgaaggccacgggggacagcgaggtctacaccctggacaacctcaagaagttcgcccagtatggggtggtggtccaagccttcaatcgggctggcacggggccctcttccagcgagatcaatgccaccactctggaggatgtgcccagccagccccctgagaacgtccgggccctgtccatcacttctgacgtggccgtcatctcctggtcagagcccccgcgcagcaccctcaatggcgtcctcaaaggctatcgggtcatcttctggtccctctatgttgatggggagtggggcgagatgcagaacatcaccaccacgcgggagcgggtggagctgcggggcatggagaagttcaccaactacagcgtccaggtgctggcctacacccaggctggggacggcgtacgcagcagtgtgctctacatccagaccaaggaggacgttccaggtccccctgctggcatcaaagctgtcccttcatcagctagcagtgtggttgtgtcttggctcccccctaccaagcccaacggggtgatccgcaagtacaccatcttctgttccagccccgggtctggccagccggctcccagcgagtacgagacgagtccagagcagctcttctaccggatcgcccacctaaaccgcggtcagcagtatctgctgtgggtggccgccgtcacctctgccggccggggcaacagcagcgagaaggtgaccatcgagcctgctggcaaggccccagcaaagatcatctcctttgggggcaccgtgacaacaccttggatgaaagatgttcggctgccttgcaattcagtgggagatccagcccctgctgtgaagtggaccaaggacagtgaagactcggccattccagtgtccatggatgggcaccggctcatccacaccaatggcacactgctgctgcgtgcagtgaaggctgaggactctggctactacacgtgcacggccaccaacactggtggctttgacaccatcatcgtcaaccttctggtgcaagttcccccggaccagccccgcctcactgtctccaaaacctcagcttcgtccatcaccctgacctggattccaggtgacaatgggggcagctccatccgaggcttcgtgctacagtactcggtggacaacagcgaggagtggaaggatgtgttcatcagctccagcgagcgctccttcaagctggacagcctcaagtgtggcacgtggtacaaggtgaagctggcagccaagaacagcgtgggctctgggcgcatcagcgagatcatcgaggccaagacccacgggcgggagccctccttcagcaaagaccaacacctcttcacccacatcaactccacgcatgctcggcttaacctgcagggctggaacaatgggggctgccctatcacagccatcgttctggagtaccggcccaaggggacctgggcctggcagggcctccgggccaacagctccggggaggtgtttctgacggaactgcgagaggccacgtggtacgagctgcgcatgagggcttgcaacagtgcgggctgcggcaatgaaacagcccagttcgccaccctggactacgatggcagcaccattccacccatcaagtctgctcaaggtgaaggggatgatgtgaagaagctgttcaccatcggctgccctgtcatcctggccacactgggggtggcactgctcttcatcgtacgcaagaagaggaaggagaaacggctgaagcgactccgagatgcaaagagtttggcagaaatgttgataagcaagaacaatagaagctttgacacccctgtgaaagggccaccccagggcccacggctacacattgacatccccagggtccagctgctcatcgaggacaaagaaggcatcaagcaactgggagatgacaaggccaccatccctgtgacagatgctgagttcagccaagctgtcaacccacagagcttctgtactggcgtctccttgcaccacccaaccctcatccagagcacaggacccctcatcgacatgtctgacatccggccaggaaccaatccagtgtccaggaagaatgtgaagtcagcccacagcacccggaaccggtactcaagccagtggaccctgaccaagtgccaggcctccacacctgcccgcaccctcacctccgactggcgcaccgtgggctcccagcatggtgtcacggtcactgagagtgacagctacagtgccagcctgtcccaggacacagacaaaggaaggaacagcatggtgtccactgagagtgcctcttccacctacgaggagctggcccgggcctatgagcatgccaagctggaggagcagctgcagcacgccaagtttgagatcaccgagtgcttcatctctgacagttcctctgaccagatgaccacaggcaccaacgagaacgccgacagcatgacatccatgagcacaccctcagagcctggcatctgccgctttaccgcctcaccacccaagccccaggatgcggaccggggcaaaaacgtggctgtgcccatccctcaccgggccaacaagagtgactactgcaacctgcccctgtatgccaagtcagaggccttctttcgaaaggcagatggacgtgagccctgccccgtggtcccaccccgtgaggcctccatccggaacctggctcgaacctaccacacccaggctcgccacctgaccctggaccctgccagcaagtccttgggccttccccacccaggggcccccgctgccgcctccacagccaccttacctcagaggactctggccatgccagcccccccagccggcacagcccccccagcccccggccccacccctgctgagccacccaccgcccccagcgctgcccctccggcccccagcaccgagcctccacgagccgggggcccacacaccaaaatggggggctccagggactcgcttctcgagatgagcacatcgggggtagggaggtctcagaagcagggggccggggcctactccaaatcctacaccctggtgtagggcccgcaggaagagcagccacgcctggaccgcgccgcgccgcagccccacacgccagctcggctgtttttctgcattatttatattcaactgacagacaaaaaccaaccaacgacaaaacaaaaacccccaatcatgaacgcctgtacatagaactcttttgtacaaatgaaactattttcttcttctccatgaagccagggcacaaagaatttgacagtacaagtcaaatcccccaccccacaaaatatgtgtggagatatatatacatatatagacagacaggaacgcgtccacgagctatatatctatatatttctctcaccctattttgagacagaggcacaaagactcagcaatttttttccctcctcctcaccttccccccagtctaggtggttttgacaaagaccaaaatcccaactcagagacactgcatgcgattttactgttccaagaaaaccaggagttgcttcaatttgcagatgcttatgtgttaatacctttttctatgaaaaaagacccagcgccgtgtgcaataaaggttatgtttct

SEQ ID NO: 6050 - DNA, 583 bp, Homo sapiens
  source 1..583: mol_type = unassigned DNA; mol_type = unassigned DNA
aaagaggctttgcctcagtagctcttctcaaccccagctgccgtgagtctgattcaactgatggggcatcggtggttgttcagcctccccaggtgaactcgaagtggagcaaaaggtgacagtcacagcttagtagcccgccctgaagatgttggcaccagcctctactttgtaaatgactccttgcagcaggtgaccttttccagctccgtgggggtggtggtgccctgcccggccgcgggctcccccagcgcggcccttcgatggtacctggccacaggggacgacatctacgacgtgccgcacatccggcacgtccacgccaacgggacgctgcagctctaccccttctccccctccgccttcaatagctttatccacgacaatgactacttctgcaccgcggagaacgctgccggcaagatccggagccccaacatccgcgtcaaagcagttttcagggaaccctacaccgtccgggtggaggatcaaaggtcaatgcgtggcaacgtggccgtcttcaagtgcctcatcccctcttcagtgcaggaatatgttagcgttgtatcttgggagaaagaca

SEQ ID NO: 6051 - DNA, 1708 bp, Homo sapiens
  source 1..1708: mol_type = unassigned DNA; mol_type = unassigned DNA
tgcgtcttcctgactctagtacgttgaatctggccagaaaaaccacatttgctctctacgaactctccgcccagttcgccgcaactactacgacccctcctcggcccctgggaagggcgtggtgtgggagtgggagaacgacaatggctcctggacgccctacgacatggaagtgggcatcaccatccagcatgcctatgagaagcagcacccctggatcgacctcacttccattggctttagctacgtaattgacttcaacaccatgggccagatcaaccgtcagacccagcgccaacgccgcgtccgccggcgcctcgacctcatctaccccatggtcacagggaccttgcctaaggctcagtcctggccagtcagccctgggccagccacctcgccccccatgtccccctgctcctgtccccagtgtgtcttggtgatgagtgttaaggcagccgtggtcaatggcagcactgggcccctacagctgccagtgacccgcaagaacatgccgcctcctggagtggtcaagctacccccactgccaggctctggggccaagccactggacagcacaggcaccattcgaggcccactgaagaccgccccatcgcaggtgatccggagacaagcctccagcatgcccactgggacaaccatgggctctcctgccagtcccccaggacccaacagcaagaccggaagggtggccctggccaccttgaatcgtaccaacctgcagcgactggccattgcccagtcccgggtgctgatcgcctctggggtccccacagtcccagtgaagaacctaaatgggtccagtcctgtcaaccctgccttggcaggaatcactgggatcctcatgagtgcagcggggctgcctgtgtgtctcaccaggccaccaaagctggtcctacacccaccccccgtcagcaagagtgaaataaaatccatcccaggggtttccaacacaagccgcaagaccaccaaaaaacaagccaagaaaggtaaaaccccagaggaagtgctaaaaaaatatctacagaaagtccggcacccaccagatgaggactgcaccatctgtatggaacgcctcacggccccctcaggctacaagggcccgcagcctacggtaaaacctgacctggtagggaagctgtccagatgcggccacgtctaccacatctactgcttggttgccatgtacaacaatgggaacaaggatggaagtttgcagtgtccaacctgcaagaccatttatggggtgaagacaggcacccaacctccagggaagatggagtaccacctcatcccccactccttgcctggccacccagactgcaaaaccatccggatcatctacagcatcccccccggcattcagggaccggaacacccgaatcctgggaagagtttcagcgcccgaggcttcccacgacactgttaccttccggacagcgagaaagggagaaaagttctgaagctgctgctcgtggcctgggatcgccgcctcatttttgccattggcacctccagcaccacaggcgagtcagacaccgtcatctggaatgaggtccaccacaagacagagtttggctctaatctcactggccatggctacccagatgccaattacctggataatgtgctggctgaactggctgcccagggcatctctgaggacagcactgcccaggagaaggactga

SEQ ID NO: 6052 - DNA, 5642 bp, Homo sapiens
  source 1..5642: mol_type = unassigned DNA; mol_type = unassigned DNA
ggcgcggtcgaggcccggaggcggcggcgcaggaggaagcggaggaggtcgggcgctcggggcccgggaggcgggccgcgcagcgccgcagccccgggctcgccatgctcctggcctcggccgtggtggtctgggaatggctgaacgagcacggccgctggcgtccctacagcccagcggtgagccaccacatcgaggcggtggtccgcgccggcccccgcgcggggggcagcgtggtgctgggccaggtggacagccgtctcgcgccctacatcatcgacctgcagtccatgaaccagttccgccaagacacgggaactctccgcccagttcgccgcaactactacgacccctcctcggcccctgggaagggcgtggtgtgggagtgggagaacgacaatggctcctggacgccctacgacatggaagtgggcatcaccatccagcatgcctatgagaagcagcacccctggatcgacctcacttccattggctttagctacgtaattgacttcaacaccatgggccagatcaaccgtcagacccagcgccaacgccgcgtccgccggcgcctcgacctcatctaccccatggtcacagggaccttgcctaaggctcagtcctggccagtcagccctgggccagccacctcgccccccatgtccccctgctcctgtccccagtgtgtcttggtgatgagtgttaaggcagccgtggtcaatggcagcactgggcccctacagctgccagtgacccgcaagaacatgccgcctcctggagtggtcaagctacccccactgccaggctctggggccaagccactggacagcacaggcaccattcgaggcccactgaagaccgccccatcgcaggtgatccggagacaagcctccagcatgcccactgggacaaccatgggctctcctgccagtcccccaggacccaacagcaagaccggaagggtggccctggccaccttgaatcgtaccaacctgcagcgactggccattgcccagtcccgggtgctgatcgcctctggggtccccacagtcccagtgaagaacctaaatgggtccagtcctgtcaaccctgccttggcaggaatcactgggatcctcatgagtgcagcggggctgcctgtgtgtctcaccaggccaccaaagctggtcctacacccaccccccgtcagcaagagtgaaataaaatccatcccaggggtttccaacacaagccgcaagaccaccaaaaaacaagccaagaaaggtaaaaccccagaggaagtgctaaaaaaatatctacagaaagtccggcacccaccagatgaggactgcaccatctgtatggaacgcctcacggccccctcaggctacaagggcccgcagcctacggtaaaacctgacctggtagggaagctgtccagatgcggccacgtctaccacatctactgcttggttgccatgtacaacaatgggaacaaggatggaagtttgcagtgtccaacctgcaagaccatttatggggtgaagacaggcacccaacctccagggaagatggagtaccacctcatcccccactccttgcctggccacccagactgcaaaaccatccggatcatctacagcatcccccccggcattcagggaccggaacacccgaatcctgggaagagtttcagcgcccgaggcttcccacgacactgttaccttccggacagcgagaaagggagaaaagttctgaagctgctgctcgtggcctgggatcgccgcctcatttttgccattggcacctccagcaccacaggcgagtcagacaccgtcatctggaatgaggtccaccacaagacagagtttggctctaatctcactggccatggctacccagatgccaattacctggataatgtgctggctgaactggctgcccagggcatctctgaggacagcactgcccaggagaaggactgaggccagaaaagctttgaggtgggaggggccatggagactgcaggacaggaagtgaggagagtgagtcaatgtagaagaagttggtgtcctgccctcccaactttctatcctcccctcctgccctgtgtccatccctcatccctcccaaccacagtgggagccagactgaatatagcgacatcattcataaatctcatccaacacaaagggagatgggatgagggccatcctgggtctgttcccatggagtttttggtgctgggtaggcaggaatcccctccctaccccacctcccaagtaggggcatggtcagcacacctagggtatgggcagtgcttaggcactccatatcctggctttgggaagccggggtttcttgcctcagccggcttcttgctacttccactctgctttgagactggagtttctgctattctccctctgctggaggcagggagctctcactgtgcaaggttggggggtgggcaaaggggtgaatcactaaactgctgtgacatcagaaactgatgccttggtgtagagcaaggaagcacttcttcccaagagggtcggagaaggaaaagcctctgggagcacattctgctgtcatcacagtccttggcttctctgggccctcctctcctcctcacagctctcacctgtccaaagaggcatctggttctctcatgtggatggatggactctggggttcctctttggagtggcatcccatgatgctgtttctagaccctctctgatcaaaccagagcctgcatcccactgagcatctgaactgtcctcagggagaggagcccacagccttcttcccaactcattctagaccagctcaaagattccatgagtttcatcgagtcactgtgagtggagcccatgctgggctctgtgccctctgtgtctgtgcatgcgcgtgtgtgtgtgggcgtgtgtgcattgctgggccagcttgaagggaaggcccgtcatgtccctgcactctgttttgcaagatgccaaaccccagttctgatggggctccaacagccaggctgtggtcctttgacgttcctcacctgttgccaacctatcccgtagtgaactgaaaccccaatgaagacagaactgtgcctggggagatgcaatgaggtgagggctgaactcatccttttatatttcttttcaagattggatcagagctcatctccatccagtcttgtttctatgaaggcttcaatctgtttccatgcaaatttgctaatcagagcccagagctgctgggtccctcatctccctcatctattatagattgacttacagcagggagagaatctctttagctcattcctaatggagttgggatcacaatatggtctggtccaatctgcatcttgttgtgtcccaagaccctatctcctccccaacattcttattgcctttggctcccagtaaggaacgaattgggggccagggaggagaacaggggggatcaagaagggaaacccaattccccctttgaaagtgggttctttgaactatgtgtttgggggaagttcctctggatactaatttgaatttatatacctcatgttttgggggtttgacgtatatatatatatatatatatgcatatatatttcataatatttggaaggtttttgatgctagaaaaatggaaacaagagaaccttcaaaaatggtacttagatgggaactggaggccaatctttcataaagccagccccatagctgcttgctgttaggcctccagccattttgacattggggtggatagtcgattcacctgcctgtcagtcgattcacctgcctgtcacccagttctgtggatgtgctggtgctgagcctttgctctctttccaaatggttacagggatgttgatcagctccaccagagggagctctgatgggaggaattgctctgccatccttgtccctgtgtctcctgtcggcaggcagccattgtatctcaccagcagaccaggagactggtcccaaggttactgcaccacagggcaatttcctgccatagttaggaaggaaacacctgaactaaatggaagagacatccctgcggtgtttaatatcacacccatgccctttgtcaggttaccatgtacagagattacttggagagcctcatgccgtctctaccttcgcacactggtcaagtatctgctgagcttcttggccgcaaggatgcagaaataggctgagggtccatgggaagaaagacacaatgaggcagtaggaggtggggaagaaaagaagacagactttcaaaatggaattaggcactggggagagatcagtttccccacatcagggagaagaaggtataggtggggaagggggtggccaggagcagaaggaagaagactcaagatggaaagggagccgctgtgcctgtggcaataccacttggagaggtcgacttcataccttcaagccttttcccctgggcttttgattgtgtctgtgccccctttcttgtcctctctgcagatgcccagtaggggctacctcatcctcgtgctgttcttgtgtggctttctgggcagtagggatcttgaatttcctttctaacactgtgcccggcaaggcggggagcattcctctgccctttgtcttgtgccaacctggaaaggtgcagtctagatttcagtgagaaccctgccagctgagccctgtgcatctactaccttgacacagagtgttttcccactagaagctctgctctgctctcctggcccaagtaggggattccatgccttccctttcatggtcttagcaccagcagcctagtttctcccttccagagtctccagggatgacaaattggattggagacaaacctcgtcagatgctcatcccctaaaaggttaattgtgtatttgtggctgcgtgtgcctttgtgttttcattctcttcccatttttgtacattttggtcttctctgtggttttatacttggtcaaaagtactcgtcttggtattgcactgttgtgtgcatgagaaaactgggggaaggctcactggtacaagaaaggacccctgacccctttccttctctgtggtccccggcattagattgggggttctgggagaggcaggtgaatgtcctaagtgaattgttctgtttgtaactggaatgtttttgaagtctttggtgttgctccgtgaaaggacatcgccacctggtgctcatgaggtgtctttgcagaacaataaatggcaaatgaacaaccacaaaattgttactcttgttggccttctgctgtttgtagattagtgcacctatctgtgagggatttgggttacctccctgagtctgtaagcaaccacaagccctgccactgggtgggggaagtccctccccaaccacttaaaaacaaattttccacatattacccacccacacatttgacctggctagactttgtttgcctaaaggaacagaccacattgctgggaaaatgagtaagtgaacgtgtgggagaaaaacacttttagaatcacgaatattcacttttaaaggtctctttgcctggctgcaatatagtgtgtgtttaaattatttacaggctgttgtttctcaaataaatgtttaatattaatcattcccaaactgacaagaacacaaaaataaaatgcaaatacagagcc

SEQ ID NO: 6053 - DNA, 494 bp, Homo sapiens
  source 1..494: mol_type = unassigned DNA; mol_type = unassigned DNA
ggaggattcctggactggtgcataactccgagaaaaacactgcttctcatcatgggtccccacagtcccagtgaagaacctaaatgggtccagtcctgtcaaccctgccttggcaggaatcactgggatcctcatgagtgcagcggggctgcctgtgtgtctcaccaggccaccaaagctggtcctacacccaccccccgtcagcaagagtgaaataaaatccatcccaggggtttccaacacaagccgcaagaccaccaaaaaacaagccaagaaaggtaaaaccccagaggaagtgctaaaaaaatatctacagaaagtccggcacccaccagatgaggactgcaccatctgtatggaacgcctcacggccccctcaggctacaagggcccgcagcctacggtaaaacctgacctggtagggaagctgtccagatgcggccacgtctaccacatctactgcttggttgccatgtacaacaatgggaacaagg

SEQ ID NO: 6054 - DNA, 651 bp, Homo sapiens
  source 1..651: mol_type = unassigned DNA; mol_type = unassigned DNA
tactgagtggctgaataatgactccctgtgtaggctcctgccctagagagctggtcccctcctcagggacaggggcttctcttacatatccctcagcatggagcatgggaccagttgtggaatttacctcctattactttggagaaagcagaaatagcctaggtgactgggctgggagggaaaaactaagatctatcactcaccagggtgcattttgttcccctggcccttcatctctggtaccttttgggactgggtgggaaagttattaccaaaactgtttcccaatctggctcttctggccttggcccctcaggatggaagtttgcagtgtccaacctgcaagaccatttatggggtgaagacaggcacccaacctccagggaagatggagtaccacctcatcccccactccttgcctggccacccagactgcaaaaccatccggatcatctacagcatcccccccggcattcagggaccggaacacccgaatcctgggaagagtttcagcgcccgaggcttcccacgacactgttaccttccggacagcgagaaagggagaaaagttctgaagctgctgctcgtggcctgggatcgccgcctcatttttgccattggcacctccagcaccacaggcgagtcagacac

SEQ ID NO: 6055 - DNA, 833 bp, Homo sapiens
  source 1..833: mol_type = unassigned DNA
caaggagcagcggcactgggacatctcgtcgtccgagcgcctggacatcctgcgggacttcaccaactacggcctggagcactggggctcggacacgcagggcgtggagaagacccggcgctttctgctcgagtggctgtccttcctgtgccggtacgtgcccgtggggctgctggagcggctcccacagaggatcaacgagcggccgccctactacctgggccgcgactacctggagacgctgatggccagccagaaggcagccgactggatccgcatcaggtgcctgggtgggctggagttggggagctgcagtcgggggcccggggtcacggagggtactttgcaggtcctgggcctgacctcgctttccacctgctctcccacagcgagatgctccttgggccagtgccccccagcttcgccttcttgccgaagcacaaggccaacgcgtacaagtagcctcaggctttcccaggggcaccctggggcgaggagagtacaataaattttattcttttaaaatccaggcctttctgtgaccctgaagcagcccctcctcggcccccaccttccccaaacctcttagctgcctccatgggccctgccccaagctgggtgctgctggtgcccagagaggccttgacccccaagaaggtagcgggttgaggacccggggggcctcagcctgtgtgggtgtggatcagggcagcctgcctggaggaggcggcctcaaagctgttaggggggtgttgctggaagaggcaaaggcctggcccagaatcctccctcccatggtgatgaccatgtctgccaacgtctgcccctgcttg

SEQ ID NO: 6056 - DNA, 1355 bp, Homo sapiens
  source 1..1355: mol_type = unassigned DNA
agggaagacacgcgtgacccggaaggtcttcccgccacactccagagcggatgtgaggggcgccgatggcggagggaacggcggaggctcctctagagaatggtggtggtggcgactcgggagccggagctttggaacgaggagtggcgcccattaagcgtcaatacctcaccaccaaggagcagtttcaccaattcctggaagccaaagggcaggagaagacttgccgggaaaccgagctggacatccgtggcaaactttacctggcccccctcaccacgtgtgggaacctgcccttccgacggatctgcaagcgcttcggggcggatgtgacatgtggagagatggccgtctgcaccaacctgctgcagggccagatgtccgagtgggccctactcaaacgccaccagtgtgaggacatctttggcgtccagctggagggcgccttccccgacaccatgaccaagtgtgccgagctgctgagccgcaccgtggaggtggactttgtggacatcaacgtcggctgccccatcgacctcgtgtacaagaagggtgggggctgtgccctcatgaatcgctccaccaagttccagcagatcgtccgtggcatgaaccaggtgctggatgtgccgctgactgtgaagatccgcacaggcgtccaggagcgtgtgaacctggcgcaccgcctgctgcccgagctgcgggactggggcgtggcactcgtcacgctccacggccgctctcgggagcagcgctacaccaagctagccgactggcagtacatcgaggagtgcgtgcaggccgccagccccatgcccctgttcggaaatggggacatcttgtcatttgaggatgccaaccgcgccatgcagactggtgtcaccgggatcatgattgcccgtggcgccctgctcaagccgtggctcttcacggagatcaaggagcagcggcactgggacatctcgtcgtccgagcgcctggacatcctgcgggacttcaccaactacggcctggagcactggggctcggacacgcagggcgtggagaagacccggcgctttctgctcgagtggctgtccttcctgtgccggtacgtgcccgtggggctgctggagcggctcccacagaggatcaacgagcggccgccctactacctgggccgcgactacctggagacgctgatggccagccagaaggcagccgactggatccgcatcagcgagatgctccttgggccagtgccccccagcttcgccttcttgccgaagcacaaggccaacgcgtacaagtagcctcaggctttcccaggggcaccctggggcgaggagagtacaataaattttattcttttaaaa

SEQ ID NO: 6057 - DNA, 2301 bp, Homo sapiens
  source 1..2301: mol_type = unassigned DNA; mol_type = unassigned DNA
aatcagggaagacacgcgtgacccggaaggtcttcccgccacactccagagcggatgtgaggggcgccgatggcggagggaacggcggaggctcctctagagaatggtggtggtggcgactcgggagccggagctttggaacgaggagtggcgcccattaagcgtcaatacctcaccaccaaggagcagtttcaccaattcctggaagccaaagggcaggagaagacttgccgggaaaccgaggtaggagaccctgctggcaatgagctggctgagcctgaggctaagcggatccgactggaggatggacagacggcggacgggcagacggaggaggcagcagagcccggggagcagctacagactcagaagagggcccggggacaaaacaagggccggccccatgtgaagcccacgaactacgacaagaacaggctgtgtccctccctaatccaggcaatcggctgctaagtgtttcttcggtgatcgctgccgctttctgcacgacgtggggcgctacctggagaccaagccggccgacctgggcccccgctgcgtgctcttcgagaccttcggccggtgcccctacggcgtgacctgccgcttcgctggggcccacctgaggcccgagggacagaacctggtgcaggaggagttggcggcccgcgggacccagcccccgtccatccgcaacggcctggacaaagccctgcagcagcagctgcggaagcgcgaggtccgcttcgagcgagctgagcaggccctgcgccggttcagccagggccccacacccgctgccgctgtccccgagggcacggcagccgagggcgctcccaggcaggaaaactgtggtgcccagcaggtccccgcagggccgggcactagcacccctcccagcagccccgtgcggacctgcgggcccctgacggatgaggacgtggtcaggctgcggccctgtgagaagaagcggctggacatccgtggcaaactttacctggcccccctcaccacgtgtgggaacctgcccttccgacggatctgcaagcgcttcggggcggatgtgacatgtggagagatggccgtctgcaccaacctgctgcagggccagatgtccgagtgggccctactcaaacgccaccagtgtgaggacatctttggcgtccagctggagggcgccttccccgacaccatgaccaagtgtgccgagctgctgagccgcaccgtggaggtggactttgtggacatcaacgtcggctgccccatcgacctcgtgtacaagaagggtgggggctgtgccctcatgaatcgctccaccaagttccagcagatcgtccgtggcatgaaccaggtgctggatgtgccgctgactgtgaagatccgcacaggcgtccaggagcgtgtgaacctggcgcaccgcctgctgcccgagctgcgggactggggcgtggcactcgtcacggtgggtcttgggacgcctcgggcattggggcctcgcggtcgaccccgcgtcccttcctaatggctcctctcctcccatccctccctcttcacctccacacctccctctgtctccgcctgtgtctctctctgtctctctcagcctggctctcttggtctcttcctctctgcgtctcactctctgcctcctaccctgcgtggcggcttctcccccagctccacggccgctctcgggagcagcgctacaccaagctagccgactggcagtacatcgaggagtgcgtgcaggccgccagccccatgcccctgttcggaaatggggacatcttgtcatttgaggatgccaaccgcgccatgcagactggtgtcaccgggatcatgattgcccgtggcgccctgctcaagccgtggctcttcacggagatcaaggagcagcggcactgggacatctcgtcgtccgagcgcctggacatcctgcgggacttcaccaactacggcctggagcactggggctcggacacgcagggcgtggagaagacccggcgctttctgctcgagtggctgtccttcctgtgccggtacgtgcccgtggggctgctggagcggctcccacagaggatcaacgagcggccgccctactacctgggccgcgactacctggagacgctgatggccagccagaaggcagccgactggatccgcatcagcgagatgctccttgggccagtgccccccagcttcgccttcttgccgaagcacaaggccaacgcgtacaagtagcctcaggctttcccaggggcaccctggggcgaggagagtacaataaattttattcttttaaaa

SEQ ID NO: 6058 - DNA, 2113 bp, Homo sapiens
  source 1..2113: mol_type = unassigned DNA
gacatgagcatgcgcacttccccagcacaatcagggaagacacgcgtgacccggaaggtcttcccgccacactccagagcggatgtgaggggcgccgatggcggagggaacggcggaggctcctctagagaatggtggtggtggcgactcgggagccggagctttggaacgaggagtggcgcccattaagcgtcaatacctcaccaccaaggagcagtttcaccaattcctggaagccaaagggcaggagaagacttgccgggaaaccgaggtaggagaccctgctggcaatgagctggctgagcctgaggctaagcggatccgactggaggatggacagacggcggacgggcagacggaggaggcagcagagcccggggagcagctacagactcagaagagggcccggggacaaaacaagggccggccccatgtgaagcccacgaactacgacaagaacaggctgtgtccctccctaatccaggagtcggctgctaagtgtttcttcggtgatcgctgccgctttctgcacgacgtggggcgctacctggagaccaagccggccgacctgggcccccgctgcgtgctcttcgagaccttcggccggtgcccctacggcgtgacctgccgcttcgctggggcccacctgaggcccgagggacagaacctggtgcaggaggagttggcggcccgcgggacccagcccccgtccatccgcaacggcctggacaaagccctgcagcagcagctgcggaagcgcgaggtccgcttcgagcgagctgagcaggccctgcgccggttcagccagggccccacacccgctgccgctgtccccgagggcacggcagccgagggcgctcccaggcaggaaaactgtggtgcccagcaggtccccgcagggccgggcactagcacccctcccagcagccccgtgcggacctgcgggcccctgacggatgaggacgtggtcaggctgcggccctgtgagaagaagcggctggacatccgtggcaaactttacctggcccccctcaccacgtgtgggaacctgcccttccgacggatctgcaagcgcttcggggcggatgtgacatgtggagagatggccgtctgcaccaacctgctgcagggccagatgtccgagtgggccctactcaaacgccaccagtgtgaggacatctttggcgtccagctggagggcgccttccccgacaccatgaccaagtgtgccgagctgctgagccgcaccgtggaggtggactttgtggacatcaacgtcggctgccccatcgacctcgtgtacaagaagggtgggggctgtgccctcatgaatcgctccaccaagttccagcagatcgtccgtggcatgaaccaggtgctggatgtgccgctgactgtgaagatccgcacaggcgtccaggagcgtgtgaacctggcgcaccgcctgctgcccgagctgcgggactggggcgtggcactcgtcacgctccacggccgctctcgggagcagcgctacaccaagctagccgactggcagtacatcgaggagtgcgtgcaggccgccagccccatgcccctgttcggaaatggggacatcttgtcatttgaggatgccaaccgcgccatgcagactggtgtcaccgggatcatgattgcccgtggcgccctgctcaagccgtggctcttcacggagatcaaggagcagcggcactgggacatctcgtcgtccgagcgcctggacatcctgcgggacttcaccaactacggcctggagcactggggctcggacacgcagggcgtggagaagacccggcgctttctgctcgagtggctgtccttcctgtgccggtacgtgcccgtggggctgctggagcggctcccacagaggatcaacgagcggccgccctactacctgggccgcgactacctggagacgctgatggccagccagaaggcagccgactggatccgcatcagcgagatgctccttgggccagtgccccccagcttcgccttcttgccgaagcacaaggccaacgcgtacaagtagcctcaggctttcccaggggcaccctggggcgaggagagtacaataaattttattcttttaaaa

SEQ ID NO: 6059 - DNA, 453 bp, Homo sapiens
  source 1..453: mol_type = unassigned DNA
ccagcctgggcgacagagccagactccgtctcagaaaaaacaaaagaaagtcctgtgctttgaaggttgtgtgcatgcagctgggaggcttactaggcttgtaggttttgtggtctgggctccggctcaggccaggccatggaagcagaggccacacgatcccaggcaggctggtggctgggcccactgatcgtcacccgtcccacagtggcgccctgctcaagccgtggctcttcacggagatcaaggagcagcggcactgggacatctcgtcgtccgagcgcctggacatcctgcgggacttcaccaactacggcctggagcactggggctcggacacgcagggcgtggagaagacccggcgctttctgctcgagtggctgtccttcctgtgccggtacgtgcccgtggggctgctggagcggctcccacagaggatcaacgagcggccgc

SEQ ID NO: 6060 - DNA, 797 bp, Homo sapiens
  source 1..797: mol_type = unassigned DNA
ttggcgtccagctggagggcgccttccccgacaccatgaccaagtgtgccgagctgctgagccgcaccgtggaggtggactttgtggacatcaacgtcggctgccccatcgacctcgtgtacaagaagggtgggggctgtgccctcatgaatcgctccaccaagttccagcagatcgtccgtggcatgaaccaggtgctggatgtgccgctgactgtgaagatccgcacaggcgtccaggagcgtgtgaacctggcgcaccgcctgctgcccgagctgcgggactggggcgtggcactcgtcacgcctggctctcttggtctcttcctctctgcgtctcactctctgcctcctaccctgcgtggcggcttctcccccagctccacggccgctctcgggagcagcgctacaccaagctagccgactggcagtacatcgaggagtgcgtgcaggccgccagccccatgcccctgttcggaaatggggacatcttgtcatttgaggatgccaaccgcgccatgcagactggtgtcaccgggatcatgattgcccgtggcgccctgctcaagccgtggctcttcacggagatcaaggagcagcggcactgggacatctcgtcgtccgagcgcctggacatcctgcgggacttcaccaactacggcctggagcactggggctcggacacgcagggcgtggagaagacccggcgctttctgctcgagtggctgtccttcctgtgccggtacgtgcccgtggggctgctggagcggctcccacagaggatcaacgagcggccgc

SEQ ID NO: 6061 - DNA, 768 bp, Homo sapiens
  source 1..768: mol_type = unassigned DNA
tgtgggaacctgcccttccgacggatctgcaagcgcttcggggcggatgtgacatgtggagagatggccgtctgcaccaacctgctgcagggccagatgtccgagtgggccctactcaaacgccaccagtgtgaggacatctttggcgtccagctggagggcgccttccccgacaccatgaccaagtgtgccgagctgctgagccgcaccgtggaggtggactttgtggacatcaacgtcggctgccccatcgacctcgtgtacaagaagggtgggggctgtgccctcatgaatcgctccaccaagttccagcagatcgtccgtggcatgaaccaggtgctggatgtgccgctgactgtgaagatccgcacaggcgtccaggagcgtgtgaacctggcgcaccgcctgctgcccgagctgcgggactggggcgtggcactcgtcacggaaatggggacatcttgtcatttgaggatgccaaccgcgccatgcagactggtgtcaccgggatcatgattgcccgtggcgccctgctcaagccgtggctcttcacggagatcaaggagcagcggcactgggacatctcgtcgtccgagcgcctggacatcctgcgggacttcaccaactacggcctggagcactggggctcggacacgcagggcgtggagaagacccggcgctttctgctcgagtggctgtccttcctgtgccggtacgtgcccgtggggctgctggagcggctcccacagaggatcaacgagcggccgc

SEQ ID NO: 6062 - DNA, 701 bp, Homo sapiens
  source 1..701: mol_type = unassigned DNA
gtctctctcagcctggctctcttggtctcttcctctctgcgtctcactctctgcctcctaccctgcgtggcggcttctcccccagctccacggccgctctcgggagcagcgctacaccaagctagccgactggcagtacatcgaggagtgcgtgcaggccgccagccccatgcccctgttcggtgggtgttccgggaagccacctccctctcccctaccacccttggtcactcacacctctgggctgttcgccttcccacttgggaccccctcgtaccaccctgatgggagccactgggtcagccaaaactcctgaagggctggtgagcagaactccagggtcccacctgcccatgtctccctgagaccccagcctctgtctcctcaggaaatggggacatcttgtcatttgaggatgccaaccgcgccatgcagactggtgtcaccgggatcatgattgcccgtggcgccctgctcaagccgtggctcttcacggagatcaaggagcagcggcactgggacatctcgtcgtccgagcgcctggacatcctgcgggacttcaccaactacggcctggagcactggggctcggacacgcagggcgtggagaagacccggcgctttctgctcgagtggctgtccttcctgtgccggtacgtgcccgtggggctgctggagcggctcccacagaggatcaacga

SEQ ID NO: 6063 - DNA, 379 bp, Homo sapiens
  source 1..379: mol_type = unassigned DNA; mol_type = unassigned DNA
aacctgcccttccgacggatctgcaagcgcttcggggcggatgtgacatgtggagagatggccgtctgcaccaacctgctgcagggccagatgtccgagtgggccctactcaaacgccaccagtgtgaggacatctttggcgtccagctggagggcgccttccccgacaccatgaccaagtgtgccgagctgctgagccgcaccgtggaggtggactttgtggacatcaacgtcggctgccccatcgacctcgtgtacaagaagggtgggggctgtgccctcatgaatcgctccaccaagttccagcagatcgtccgtggcatgaaccaggtacggccagccacatcctcgcactggctcccaaacaactcccccgggc

SEQ ID NO: 6064 - DNA, 249 bp, Homo sapiens
  source 1..249: mol_type = unassigned DNA; mol_type = unassigned DNA
tgtggagagatggccgtctgcaccaacctgctgcagggccagatgtccgagtgggccctactcaaacgccaccagtgtgaggacatctttggcgtccagctggagggcgccttccccgacaccatgaccaagtgtgccgagctgctgagccgcaccgtggaggtggactttgtggacatcaacgtcggctgccccatcgacctcgtgtacaagaaggtagcggccctggacgtgtgcctcggtttcccc

SEQ ID NO: 6065 - DNA, 977 bp, Homo sapiens
  source 1..977: mol_type = unassigned DNA; mol_type = unassigned DNA
gcacttccccagcacaatcagggaagacacgcgtgacccggaaggtcttcccgccacactccagagcggatgtgaggggcgccgatggcggagggaacggcggaggctcctctagagaatggtggtggtggcgactcgggagccggagctttggaacgaggagtggcgcccattaagcgtcaatacctcaccaccaaggagcagtttcaccaattcctggaagccaaagggcaggagaagacttgccgggaaaccgaggtaggagaccctgctggcaatgagctggctgagcctgaggctaagcggatccgactggaggatggacagacggcggacgggcagacggaggaggcagcagagcccggggagcagctacagactcagaagagggcccggggacaaaacaagggccggccccatgtgaagcccacgaactacgacaagaacagaacctggtgcaggaggagttggcggcccgcgggacccagcccccgtccatccgcaacggcctggacaaagccctgcagcagcagctgcggaagcgcgaggtccgcttcgagcgagctgagcaggccctgcgccggttcagccagggccccacacccgctgccgctgtccccgagggcacggcagccgagggcgctcccaggcaggaaaactgtggtgcccagcaggtccccgcagggccgggcactagcacccctcccagcagccccgtgcggacctgcgggcccctgacggatgaggacgtggtcaggctgcggccctgtgagaagaagcggctggacatccgtggcaaactttacctggcccccctcaccacgtgtgggaacctgcccttccgacggatctgcaagcgcttcggggcggatgtgacatgtggagagatggccgtctgcaccaacctgctgcagggccagatgtccgagtgggccctactcaaacgccaccagtgtgaggacatctttggcgtccag

SEQ ID NO: 6066 - DNA, 806 bp, Homo sapiens
  source 1..806: mol_type = unassigned DNA; mol_type = unassigned DNA
accgaggtaggagaccctgctggcaatgagctggctgagcctgaggctaagcggatccgactggaggatggacagacggcggacgggcagacggaggaggcagcagagcccggggagcagctacagactcagaagagggcccggggacaaaacaagggccggccccatgtgaagcccacgaactacgacaagaacaggctgtgtccctccctaatccaggcaatcggctgctaagtgtttcttcggtgatcgctgccgctttctgcacgacgtggggcgctacctggagaccaagccggccgacctgggcccccgctgcgtgctcttcgagaccttcggccggtgcccctacggcgtgacctgccgcttcgctggggcccacctgaggcccgagggacagaacctggtgcaggaggagttggcggcccgcgggacccagcccccgtccatccgcaacggcctggacaaagccctgcagcagcagctgcggaagcgcgaggtccgcttcgagcgagctgagcaggccctgcgccggttcagccagggccccacacccgctgccgctgtccccgagggcacggcagccgagggcgctcccaggcaggaaaactgtggtgcccagcaggtccccgcagggccgggcactagcacccctcccagcagccccgtgcggacctgcgggcccctgacggatgaggacgtggtcaggctgcggccctgtgagaagaagcgggtacgtgttgaggacaacgtcagtagcagatctgtccatctggtgtgcgtctattaaataccagctgtgtcca

SEQ ID NO: 6067 - DNA, 895 bp, Homo sapiens
  source 1..895: mol_type = unassigned DNA; mol_type = unassigned DNA
ggctgagggcgagaagccaccggctcttcattccgggccgttcttccgcctgcagggtggtcagcggaggtacctgagatcgtgcacgttggggcctgtcacatgcgcgaaggacaccacgtgcatgctagggcagatacctcaccaccaaggagcagtttcaccaattcctggaagccaaagggcaggagaagacttgccgggaaaccgaggtaggagaccctgctggcaatgagctggctgagcctgaggctaagcggatccgactggaggatggacagacggcggacgggcagacggaggaggcagcagagcccggggagcagctacagactcagaagagggcccggggacaaaacaagggccggccccatgtgaagcccacgaactacgacaagaacaggctgtgtccctccctaatccaggcaatcggctgctaagtgtttcttcggtgatcgctgccgctttctgcacgacgtggggcgctacctggagaccaagccggccgacctgggcccccgctgcgtgctcttcgagaccttcggccggtgcccctacggcgtgacctgccgcttcgctggggcccacctgaggcccgagggacagaacctggtgcaggaggagttggcggcccgcgggacccagcccccgtccatccgcaacggcctggacaaagccctgcagcagcagctgcggaagcgcgaggtccgcttcgagcgagctgagcaggccctgcgccggttcagccagggccccacacccgctgccgctgtccccgagggcacggcagccgagggcgctcccaggcaggaaaactgtggtgcccagcaggtccccgcagggccgggcactagcacccctcccagcagccccgtgcggacctgcgggcccctga

SEQ ID NO: 6068 - DNA, 869 bp, Homo sapiens
  source 1..869: mol_type = unassigned DNA; mol_type = unassigned DNA
tcgccggggcaggagggaagctgaagggccttttccggcacccatagcgcggtccgagctgtgcatgccgggagattaggcagcggctgagggcgagaagccaccggctcttcattccgggccgttcttccgcctgcagggtggtcagcggagatacctcaccaccaaggagcagtttcaccaattcctggaagccaaagggcaggagaagacttgccgggaaaccgaggtaggagaccctgctggcaatgagctggctgagcctgaggctaagcggatccgactggaggatggacagacggcggacgggcagacggaggaggcagcagagcccggggagcagctacagactcagaagagggcccggggacaaaacaagggccggccccatgtgaagcccacgaactacgacaagaacaggctgtgtccctccctaatccaggcaatcggctgctaagtgtttcttcggtgatcgctgccgctttctgcacgacgtggggcgctacctggagaccaagccggccgacctgggcccccgctgcgtgctcttcgagaccttcggccggtgcccctacggcgtgacctgccgcttcgctggggcccacctgaggcccgagggacagaacctggtgcaggaggagttggcggcccgcgggacccagcccccgtccatccgcaacggcctggacaaagccctgcagcagcagctgcggaagcgcgaggtccgcttcgagcgagctgagcaggccctgcgccggttcagccagggccccacacccgctgccgctgtccccgagggcacggcagccgagggcgctcccaggcaggaaaactgtggtgcccagcaggtccccgcagggccgggcact

SEQ ID NO: 6069 - DNA, 566 bp, Homo sapiens
  source 1..566: mol_type = unassigned DNA; mol_type = unassigned DNA
aatcagggaagacacgcgtgacccggaaggtcttcccgccacactccagagcggatgtgaggggcgccgatggcggagggaacggcggaggctcctctagagaatggtggtggtggcgactcgggagccggagctttggaacgaggagtggcgcccattaagcgtcaatacctcaccaccaaggagcagtttcaccaattcctggaagccaaagggcaggagaagacttgccgggaaaccgaggtaggagaccctgctggcaatgagctggctgagcctgaggctaagcggatccgactggaggatggacagacggcggacgggcagacggaggaggcagcagagcccggggagcagctacagactcagaagagggcccggggacaaaacaagggccggccccatgtgaagcccacgaactacgacaagaacaggctgtgtccctccctaatccaggcaagtgcggccacgtgagcattcctgccggggcaggcaggagcagggtgtgtttcctggcagcgggtaattgttagaaagctcctgggccttcagcaacgagcagtgag

SEQ ID NO: 6070 - DNA, 2019 bp, Homo sapiens
  source 1..2019: mol_type = unassigned DNA; mol_type = unassigned DNA
gcgaaggacatttgggctgtgtgtgcgacgcgggtcggaggggcagtcgggggaaccgcgaagaagccgaggagcccggagccccgcgtgacgctcctctctcagtccaaaagcggcttttggttcggcgcagagagacccgggggtctagcttttcctcgaaaagcgccgccctgcccttggccccgagaacagacaaagagcaccgcagggccgatcacgctgggggcgctgaggccggccatggtcatggaagtgggcaccctggacgctggaggcctgcgggcgctgctgggggagcgagcggcgcaatgcctgctgctggactgccgctccttcttcgctttcaacgccggccacatcgccggctctgtcaacgtgcgcttcagcaccatcgtgcggcgccgggccaagggcgccatgggcctggagcacatcgtgcccaacgccgagctccgcggccgcctgctggccggcgcctaccacgccgtggtgttgctggacgagcgcagcgccgccctggacggcgccaagcgcgacggcaccctggccctggcggccggcgcgctctgccgcgaggcgcgcgccgcgcaagtcttcttcctcaaaggaggatacgaagcgttttcggcttcctgcccggagctgtgcagcaaacagtcgacccccatggggctcagccttcccctgagtactagcgtccctgacagcgcggaatctgggtgcagttcctgcagtaccccactctacgatcagggtggcccggtggaaatcctgccctttctgtacctgggcagtgcgtatcacgcttcccgcaaggacatgctggatgccttgggcatcactgccttgatcaacgtctcagccaattgtcccaaccattttgagggtcactaccagtacaagagcatccctgtggaggacaaccacaaggcagacatcagctcctggttcaacgaggccattgacttcatagactccatcaagaatgctggaggaagggtgtttgtccactgccaggcaggcatttcccggtcagccaccatctgccttgcttaccttatgaggactaatcgagtcaagctggacgaggcctttgagtttgtgaagcagaggcgaagcatcatctctcccaacttcagcttcatgggccagctgctgcagtttgagtcccaggtgctggctccgcactgttcggcagaggctgggagccccgccatggctgtgctcgaccgaggcacctccaccaccaccgtgttcaacttccccgtctccatccctgtccactccacgaacagtgcgctgagctaccttcagagccccattacgacctctcccagctgctgaaaggccacgggaggtgaggctcttcacatcccattgggactccatgctccttgagaggagaaatgcaataactctgggaggggctcgagagggctggtccttatttatttaacttcacccgagttcctctgggtttctaagcagttatggtgatgacttagcgtcaagacatttgctgaactcagcacattcgggaccaatatatagtgggtacatcaagtccatctgacaaaatggggcagaagagaaaggactcagtgtgtgatccggtttctttttgctcgcccctgttttttgtagaatctcttcatgcttgacatacctaccagtattattcccgacgacacatatacatatgagaatataccttatttatttttgtgtaggtgtctgccttcacaaatgtcattgtctactcctagaagaaccaaatacctcaatttttgtttttgagtactgtactatcctgtaaatatatcttaagcaggtttgttttcagcactgatggaaaataccagtgttgggtttttttttagttgccaacagttgtatgtttgctgattatttatgacctgaaataatatatttcttcttctaagaagacattttgttacataaggatgacttttttatacaatggaataaattatggcatttctattgaaatttcaa

SEQ ID NO: 6071 - DNA, 5253 bp, Homo sapiens
  source 1..5253: mol_type = unassigned DNA; mol_type = unassigned DNA
ggaagagaaagagtgaagaaaagttgcgagcgtctcctctcttcctaagcctcccgccccaacccacccctcagagaaggagaagataatatactgaaaagaagaggaggaggagagcgacgggacgggacgcgagcgggagcgcagccgccctctcggctccgcggcggcgcctcgcaagtccgggaggcgaggggggcccgaggggagacgccgtgacaactttcgtttccctctgagggaattgggaggtcggcggccccaaaagctttcagtccagtgtaaagctgttggagcgcgggagcaaaggtaaagaatgatgtaatgcgctggctgctccaaagcatcttttgttgtggaatggttattccagtcatctctttatgaatcaaatgtgaggggctgctttgtggacggagtcctttgcaagagcacatcaacgggaaagagaaagagacattcacttggagggctcttgctgaaaatgggtttaactctccttttgccagtcaccaccagcctgacctcatacacttttagtacaatggagtggctgagcctttgagcacaccaccattacatcatcgtggcaaattaaagaaggaggtgggaaaagaggacttattgttgtcatggcccatgagatgattggaactcaaattgttactgagaggttggtggctctgctggaaagtggaacggaaaaagtgctgctaattgatagccggccatttgtggaatacaatacatcccacattttggaagccattaatatcaactgctccaagcttatgaagcgaaggttgcaacaggacaaagtgttaattacagagctcatccagcattcagcgaaacataaggttgacattgattgcagtcagaaggttgtagtttacgatcaaagctcccaagatgttgcctctctctcttcagactgttttctcactgtacttctgggtaaactggagaagagcttcaactctgttcacctgcttgcaggtgggtttgctgagttctctcgttgtttccctggcctctgtgaaggaaaatccactctagtccctacctgcatttctcagccttgcttacctgttgccaacattgggccaacccgaattcttcccaatctttatcttggctgccagcgagatgtcctcaacaaggagctgatgcagcagaatgggattggttatgtgttaaatgccagcaatacctgtccaaagcctgactttatccccgagtctcatttcctgcgtgtgcctgtgaatgacagcttttgtgagaaaattttgccgtggttggacaaatcagtagatttcattgagaaagcaaaagcctccaatggatgtgttctagtgcactgtttagctgggatctcccgctccgccaccatcgctatcgcctacatcatgaagaggatggacatgtctttagatgaagcttacagatttgtgaaagaaaaaagacctactatatctccaaacttcaattttctgggccaactcctggactatgagaagaagattaagaaccagactggagcatcagggccaaagagcaaactcaagctgctgcacctggagaagccaaatgaacctgtccctgctgtctcagagggtggacagaaaagcgagacgcccctcagtccaccctgtgccgactctgctacctcagaggcagcaggacaaaggcccgtgcatcccgccagcgtgcccagcgtgcccagcgtgcagccgtcgctgttagaggacagcccgctggtacaggcgctcagtgggctgcacctgtccgcagacaggctggaagacagcaataagctcaagcgttccttctctctggatatcaaatcagtttcatattcagccagcatggcagcatccttacatggcttctcctcatcagaagatgctttggaatactacaaaccttccactactctggatgggaccaacaagctatgccagttctcccctgttcaggaactatcggagcagactcccgaaaccagtcctgataaggaggaagccagcatccccaagaagctgcagaccgccaggccttcagacagccagagcaagcgattgcattcggtcagaaccagcagcagtggcaccgcccagaggtcccttttatctccactgcatcgaagtgggagcgtggaggacaattaccacaccagcttccttttcggcctttccaccagccagcagcacctcacgaagtctgctggcctgggccttaagggctggcactcggatatcttggccccccagacctctaccccttccctgaccagcagctggtattttgccacagagtcctcacacttctactctgcctcagccatctacggaggcagtgccagttactctgcctacagctgcagccagctgcccacttgcggagaccaagtctattctgtgcgcaggcggcagaagccaagtgacagagctgactcgcggcggagctggcatgaagagagcccctttgaaaagcagtttaaacgcagaagctgccaaatggaatttggagagagcatcatgtcagagaacaggtcacgggaagagctggggaaagtgggcagtcagtctagcttttcgggcagcatggaaatcattgaggtctcctgagaagaaagacacttgtgacttctatagacaatttttttttcttgttcacaaaaaaattccctgtaaatctgaaatatatatatgtacatacatatatatttttggaaaatggagctatggtgtaaaagcaacaggtggatcaacccagttgttactctcttaacatctgcatttgagagatcagctaatacttctctcaacaaaaatggaagggcagatgctagaatcccccctagacggaggaaaaccattttattcagtgaattacacatcctcttgttcttaaaaaagcaagtgtctttggtgttggaggacaaaatcccctaccattttcacgttgtgctactaagagatctcaaatattagtctttgtccggacccttccatagtacaccttagcgctgagactgagccagcttgggggtcaggtaggtagaccctgttagggacagagcctagtggtaaatccaagagaaatgatcctatccaaagctgattcacaaacccacgctcacctgacagccgagggacacgagcatcactctgctggacggaccattaggggccttgccaaggtctaccttagagcaaacccagtacctcagacaggaaagtcggggctttgaccactaccatatctggtagcccattttctaggcattgtgaataggtaggtagctagtcacacttttcagaccaattcaaactgtctatgcacaaaattcccgtgggcctagatggagataatttttttttcttctcagctttatgaagagaagggaaactgtctaggattcagctgaaccaccaggaacctggcaacatcacgatttaagctaaggttgggaggctaacgagtctacctccctctttgtaaatcaaagaattgtttaaaatgggattgtcaatcctttaaataaagatgaacttggtttcaagccaaatgtgaatttatttgggttggtagcagagcagcagcaccttcaaattctcagccaaagcagatgtttttgccctttctgcttcactgcatggatacagttggtaaaatgtaataatatggcagaattttataggaaacttcctagggaggtaaattatgggaagattaagaaaggtacaaattgctgaggagaagcaggaaacctgtttccttagtggcttttatcccctcggcatgcgatggggctgatgtttctatgattgcctcagactttcacatttactagtagggctgagagaggctttagtgaggaaggaatattcagaataaaacggttgagaaagctgagaagaccattgagttttgatcagttgtgaatagagtgcaaagccatggccaagctgtttttggaaacgctggccggcgtgtcttcagtggaaaaagcaaatcaaaatggagcgagagcaaaggggcgtcctcagtcctcaacctacaatcactgtatggaatcggtcctggcagctgaacataggaggtcactggaacaagtgatagtgcagattggctttcaaacatcctcctggcttgagttttatcagctacaatgtgggtcctcttttgaagccttaattcacaacagcagctttttgggggtggggctgggcgggtgttgtcattgttctttcccttcctgtaagtgtcgctagttgctgcctcgtatctcaggtttttctctgtttttgagaaatggacagttttttgaccaggatgtgacttcatgtttcctatggtgacttctaaaaccagcacagaatgatatgactcaacacagaccgacttggttatggggatgatgagccgcacagacctcactagttgtgcacaaataatgtgctatgatggggtgtaaagtgaaggcagaagagggtcagccgcattgttatgatactgggaaagtgctggtcaacgatttgagttagtttttagatatacattgaaatctttaatcagacattctcaagtttcacacagtagtttttgatgttatgtacacacacaccaaatgtgtaacagttcaccacttccagagtgtggtcatgcccaaaacatgtttaagaaaggaaagcagtagctccttgctaacgatgtttcaggaggtttgggggacttggttttaatgagcttctgtcatttagggcttctcttggccatggtcccccttccttctggaactgtgatgtagtcacatcctacagcctttagtgctggttcactagtgtcagataatcagttcttggaatcgagactgccgtggcgaaggggtggcctcggaggcaggctctggagctgcttggatgtctttaggtggggtggtggctggctctcttcagcatgtaattggggaaaccctcgcgtctactaggggtgatacagatggtgattttaaagagcaaaactagacttctatgtgagaagtgctggaaaatgatttaggacatgtgtaaagttagatggaaagactgtaaatgtttaatatgaatatagtgttcttttgaagtaaggccagctgttgaacggttaaactgtgcatttctcattttgatgtgtcatgtatgttaatgtatgaaatgattaaataaaatcaaaactggtacctgtttatacataaatacgagaaaa

SEQ ID NO: 6072 - DNA, 554 bp, Homo sapiens
  source 1..554: mol_type = unassigned DNA; mol_type = unassigned DNA
agttagtttttagaggtccaagggaaatcaggcagtgtctcatctgttgttaattaatgaaacgaaactggagtcactagagtgcagcagtgaatgaaaggtgggtttgctgagttctctcgttgtttccctggcctctgtgaaggaaaatccactctagtccctacctgcatttctcagccttgcttacctgttgccaacattgggccaacccgaattcttcccaatctttatcttggctgccagcgagatgtcctcaacaaggagctgatgcagcagaatgggattggttatgtgttaaatgccagcaatacctgtccaaagcctgactttatccccgagtctcatttcctgcgtgtgcctgtgaatgacagcttttgtgagaaaattttgccgtggttggacaaatcagtagatttcattgatttgtgaaagaaaaaagacctactatatctccaaacttcaattttctgggccaactcctggactatgagaagaagattaagaaccagactggagcatcagggccaaagagcaaactcaagctgctgcac

SEQ ID NO: 6073 - DNA, 566 bp, Homo sapiens
  source 1..566: mol_type = unassigned DNA; mol_type = unassigned DNA
aaaactctctgaagtttttatttacccagcgctctggctcccacttctgttttaaaagattataagtaaatactctgctctttcaagtgaaccaaacctatcaaacctgtttagaaaataaaccaggctttcagtccagtgtaaagctgttggagcgcgggagcaaaggtaaagaatgatgtaatgcgctggctgctccaaagcatcttttgttgtggaatggttattccagtcatctctttatgaatcaaatgtgaggggctgctttgtggacggagtcctttgcaagagcacatcaacgggaaagagaaagagacattcacttggagggctcttgctgaaaatgggtttaactctccttttgccagtcaccaccagcctgacctcatacacttttagtacaatggagtggctgagcctttgagcacaccaccattacatcatcgtggcaaattaaagaaggaggtgggaaaagaggacttattgttgtcatggcccatgagatgattggaactcaaattgttactgagaggttggtggctctgctggaaagtggaacggaaaaa

SEQ ID NO: 6074 - DNA, 585 bp, Homo sapiens
  source 1..585: mol_type = unassigned DNA; mol_type = unassigned DNA
gttttaaaagattataagtaaatactctgctctttcaagtgaaccaaacctatcaaacctgtttagaaaataaaccaggcagaataaaatgatgcgaaatgttcattttaaaaaacttcaggatgggcacaaacacacagaagtgggaaatgaataaaagagtattgataaatttttgaaaattgttgaagctgagtaatgggctttcagtccagtgtaaagctgttggagcgcgggagcaaaggtaaagaatgatgtaatgcgctggctgctccaaagcatcttttgttgtggaatggttattccagtcatctctttatgaatcaaatgtgaggggctgctttgtggacggagtcctttgcaagagcacatcaacgggaaagagaaagagacattcacttggagggctcttgctgaaaatgggtttaactctccttttgccagtcaccaccagcctgacctcatacacttttagtacaatggagtggctgagcctttgagcacaccaccattacatcatcgtggcaaattaaagaaggaggtgggaaaagaggacttattgttgtcatggcccatgagatgatt

SEQ ID NO: 6075 - DNA, 258 bp, Homo sapiens
  source 1..258: mol_type = unassigned DNA; mol_type = unassigned DNA
aatgcctctttatgccactcaccttatggggctgatggagagtccacgtaaaggataaccgtttcctcaaaggatttatgctgtttcacctccatcaagaaaagggctttttaaagttaaggctttcagtccagtgtaaagctgttggagcgcgggagcaaaggtaaagaatgatgtaatgcgctggctgctccaaagcatcttttgttgtggaatggttattccagtcatctctttatgaatcaaatgtgaggggct

SEQ ID NO: 6076 - DNA, 3402 bp, Homo sapiens
  source 1..3402: mol_type = unassigned DNA; mol_type = unassigned DNA
ggaagagaaagagtgaagaaaagttgcgagcgtctcctctcttcctaagcctcccgccccaacccacccctcagagaaggagaagataatatactgaaaagaagaggaggaggagagcgacgggacgggacgcgagcgggagcgcagccgccctctcggctccgcggcggcgcctcgcaagtccgggaggcgaggggggcccgaggggagacgccgtgacaactttcgtttccctctgagggaattgggaggtcggcggccccaaaagctttcagtccagtgtaaagctgttggagcgcgggagcaaaggtaaagaatgatgtaatgcgctggctgctccaaagcatcttttgttgtggaatggttattccagtcatctctttatgaatcaaatgtgaggggctgctttgtggacggagtcctttgcaagagcacatcaacgggaaagagaaagagacattcacttggagggctcttgctgaaaatgggtttaactctccttttgccagtcaccaccagcctgacctcatacacttttagtacaatggagtggctgagcctttgagcacaccaccattacatcatcgtggcaaattaaagaaggaggtgggaaaagaggacttattgttgtcatggcccatgagatgattggaactcaaattgttactgagaggttggtggctctgctggaaagtggaacggaaaaagtgctgctaattgatagccggccatttgtggaatacaatacatcccacattttggaagccattaatatcaactgctccaagcttatgaagcgaaggttgcaacaggacaaagtgttaattacagagctcatccagcattcagcgaaacataaggttgacattgattgcagtcagaaggttgtagtttacgatcaaagctcccaagatgttgcctctctctcttcagactgttttctcactgtacttctgggtaaactggagaagagcttcaactctgttcacctgcttgcaggagctgatgcagcagaatgggattggttatgtgttaaatgccagcaatacctgtccaaagcctgactttatccccgagtctcatttcctgcgtgtgcctgtgaatgacagcttttgtgagaaaattttgccgtggttggacaaatcagtagatttcattgagaaagcaaaagcctccaatggatgtgttctagtgcactgtttagctgggatctcccgctccgccaccatcgctatcgcctacatcatgaagaggatggacatgtctttagatgaagcttacagatttgtgaaagaaaaaagacctactatatctccaaacttcaattttctgggccaactcctggactatgagaagaagattaagaaccagactggagcatcagggccaaagagcaaactcaagctgctgcacctggagaagccaaatgaacctgtccctgctgtctcagagggtggacagaaaagcgagacgcccctcagtccaccctgtgccgactctgctacctcagaggcagcaggacaaaggcccgtgcatcccgccagcgtgcccagcgtgcccagcgtgcagccgtcgctgttagaggacagcccgctggtacaggcgctcagtgggctgcacctgtccgcagacaggctggaagacagcaataagctcaagcgttccttctctctggatatcaaatcagtttcatattcagccagcatggcagcatccttacatggcttctcctcatcagaagatgctttggaatactacaaaccttccactactctggatgggaccaacaagctatgccagttctcccctgttcaggaactatcggagcagactcccgaaaccagtcctgataaggaggaagccagcatccccaagaagctgcagaccgccaggccttcagacagccagagcaagcgattgcattcggtcagaaccagcagcagtggcaccgcccagaggtcccttttatctccactgcatcgaagtgggagcgtggaggacaattaccacaccagcttccttttcggcctttccaccagccagcagcacctcacgaagtctgctggcctgggccttaagggctggcactcggatatcttggccccccagacctctaccccttccctgaccagcagctggtattttgccacagagtcctcacacttctactctgcctcagccatctacggaggcagtgccagttactctgcctacagctgcagccagctgcccacttgcggagaccaagtctattctgtgcgcaggcggcagaagccaagtgacagagctgactcgcggcggagctggcatgaagagagcccctttgaaaagcagtttaaacgcagaagctgccaaatggaatttggagagagcatcatgtcagagaacaggtcacgggaagagctggggaaagtgggcagtcagtctagcttttcgggcagcatggaaatcattgaggtctcctgagaagaaagacacttgtgacttctatagacaatttttttttcttgttcacaaaaaaattccctgtaaatctgaaatatatatatgtacatacatatatatttttggaaaatggagctatggtgtaaaagcaacaggtggatcaacccagttgttactctcttaacatctgcatttgagagatcagctaatacttctctcaacaaaaatggaagggcagatgctagaatcccccctagacggaggaaaaccattttattcagtgaattacacatcctcttgttcttaaaaaagcaagtgtctttggtgttggaggacaaaatcccctaccattttcacgttgtgctactaagagatctcaaatattagtctttgtccggacccttccatagtacaccttagcgctgagactgagccagcttgggggtcaggtaggtagaccctgttagggacagagcctagtggtaaatccaagagaaatgatcctatccaaagctgattcacaaacccacgctcacctgacagccgagggacacgagcatcactctgctggacggaccattaggggccttgccaaggtctaccttagagcaaacccagtacctcagacaggaaagtcggggctttgaccactaccatatctggtagcccattttctaggcattgtgaataggtaggtagctagtcacacttttcagaccaattcaaactgtctatgcacaaaattcccgtgggcctagatggagataatttttttttcttctcagctttatgaagagaagggaaactgtctaggattcagctgaaccaccaggaacctggcaacatcacgatttaagctaaggttgggaggctaacgagtctacctccctctttgtaaatcaaagaattgtttaaaatgggattgtcaatcctttaaataaagatgaacttggtttc

SEQ ID NO: 6077 - DNA, 5253 bp, Homo sapiens; identical to SEQ ID NO: 6071
  source 1..5253: mol_type = unassigned DNA; mol_type = unassigned DNA

SEQ ID NO: 6078 - DNA, 3402 bp, Homo sapiens; identical to SEQ ID NO: 6076
  source 1..3402: mol_type = unassigned DNA; mol_type = unassigned DNA

SEQ ID NO: 6079 - DNA, 554 bp, Homo sapiens; identical to SEQ ID NO: 6072
  source 1..554: mol_type = unassigned DNA; mol_type = unassigned DNA

SEQ ID NO: 6080 - DNA, 566 bp, Homo sapiens; identical to SEQ ID NO: 6073
  source 1..566: mol_type = unassigned DNA; mol_type = unassigned DNA

SEQ ID NO: 6081 - DNA, 585 bp, Homo sapiens; identical to SEQ ID NO: 6074
  source 1..585: mol_type = unassigned DNA; mol_type = unassigned DNA

SEQ ID NO: 6082 - DNA, 258 bp, Homo sapiens; identical to SEQ ID NO: 6075
  source 1..258: mol_type = unassigned DNA; mol_type = unassigned DNA

SEQ ID NO: 6083 - DNA, 405 bp, Homo sapiens
  source 1..405: mol_type = unassigned DNA; mol_type = unassigned DNA
aggccgtgaggtctgaggtcagagatccagccatctgctcccccagggtagggaggtcgggcctccccgggatcctgcccggcctgtacatcggcaacttcaaagatgccagagacgcggaacaattgagcaagaacaaggtgacacatattctgtctgtccacgatagtgccaggcctatgttggagggagttaaatacctgtgcatcccagcagcggattcaccatctcaaaacctgacaagacatttcaaagaaagtattaaattcattcacgagtgccggctccgcggtgagagctgccttgtacactgcctggccggggtctccaggagcgtgacactggtgatcgcatacatcatgaccgtcactgactttggctgggaggatgccctgcacaccgtgc

SEQ ID NO: 6084 - DNA, 1485 bp, Homo sapiens
  source 1..1485: mol_type = unassigned DNA; mol_type = unassigned DNA
gagcccgagcctagtgcctcccacgcccggcggccgcgagccggggtccgcgagggcggagtggggcgcggcagccaggaacccgactacgaatcccagggtgcgggcgggcggagcgaggagggacgctgggcctgcccggtgcgcacgggggcggggaccggcaaggcgggaccatttcccggcataggctccggtgcccctgcccggctcccgccgggaagttctaggccgccgcacagaaagccctgccctccacgccgggtctctggagcgccctgggttgcccggccggtccctgccgctgacttgttgacactgcgagcactcagtccctcccgcgcgcctcctccccgcccgccccgccgctcctcctccctgtaacatgccatagtgcgcctgcgaccacacggccggggcgctagcgttcgccttcagccaccatggggaatgggatgaacaagatcctgcccggcctgtacatcggcaacttcaaagatgccagagacgcggaacaattgagcaagaacaaggtgacacatattctgtctgtccacgatagtgccaggcctatgttggagggagttaaatacctgtgcatcccagcagcggattcaccatctcaaaacctgacaagacatttcaaagaaagtattaaattcattcacgagtgccggctccgcggtgagagctgccttgtacactgcctggccggggtctccaggagcgtgacactggtgatcgcatacatcatgaccgtcactgactttggctgggaggatgccctgcacaccgtgcgtgctgggagatcctgtgccaaccccaacgtgggcttccagagacagctccaggagtttgagaagcatgaggtccatcagtatcggcagtggctgaaggaagaatatggagagagccctttgcaggatgcagaagaagccaaaaacattctggccgctccgggaattctgaagttctgggcctttctcagaagactgtaatgtacctgaagtttctgaaatattgcaaacccacagagtttaggctggtgctgccaaaaagaaaagcaacatagagtttaagtatccagtagtgatttgtaaacttgtttttcatttgaagctgaatatatacgtagtcatgtttatgttgagaactaaggatattctttagcaagagaaaatattttccccttatccccactgctgtggaggtttctgtacctcgcttggatgcctgtaaggatcccgggagccttgccgcactgccttgtgggtggcttggcgctcgtgattgcttcctgtgaacgcctcccaaggacgagcccagtgtagttgtgtggcgtgaactctgcccgtgtgttctcaaattccccagcttgggaaatagcccttggtgtgggttttatctctggtttgtgttctccgtggtggaattgaccgaaagctctatgttttcgttaataaagggcaacttagccaagtttaa

SEQ ID NO: 6085 - DNA, 804 bp, Homo sapiens
  source 1..804: mol_type = unassigned DNA; mol_type = unassigned DNA
tttcccggcataggctccggtgcccctgcccggctcccgccgggaagttctaggccgccgcacagaaagccctgccctccacgccgggtctctggagcgccctgggttgcccggccggtccctgccgctgacttgttgacactgcgagcactcagtccctcccgcgcgcctcctccccgcccgccccgccgctcctcctccctgtaacatgccatagtgcgcctgcgaccacacggccggggcgctagcgttcgccttcagccaccatggggaatgggatgaacaagatcctgcccggcctgtacatcggcaacttcaaagggagttaaatacctgtgcatcccagcagcggattcaccatctcaaaacctgacaagacatttcaaagaaagtattaaattcattcacgagtgccggctccgcggtgagagctgccttgtacactgcctggccggggtctccaggagcgtgacactggtgatcgcatacatcatgaccgtcactgactttggctgggaggatgccctgcacaccgtgcgtgctgggagatcctgtgccaaccccaacgtgggcttccagagacagctccaggagtttgagaagcatgaggtccatcagtatcggcagtggctgaaggaagaatatggagagagccctttgcaggatgcagaagaagccaaaaacattctgggtaaatataaggagcaagggcgcacagagccccagcccggcgccaggcggtggagcagttttccggcactggctccgctgacctacgataattatacgacggagacctaacgc

SEQ ID NO: 6086 - DNA, 867 bp, Homo sapiens
  source 1..867: mol_type = unassigned DNA; mol_type = unassigned DNA
ttcccggcataggctccggtgcccctgcccggctcccgccgggaagttctaggccgccgcacagaaagccctgccctccacgccgggtctctggagcgccctgggttgcccggccggtccctgccgctgacttgttgacactgcgagcactcagtccctcccgcgcgcctcctccccgcccgccccgccgctcctcctccctgtaacatgccatagtgcgcctgcgaccacacggccggggcgctagcgttcgccttcagccaccatggggaatgggatgaacaaggacaagacatttcaaagaaagtattaaattcattcacgagtgccggctccgcggtgagagctgccttgtacactgcctggccggggtctccaggagcgtgacactggtgatcgcatacatcatgaccgtcactgactttggctgggaggatgccctgcacaccgtgcgtgctgggagatcctgtgccaaccccaacgtgggcttccagagacagctccaggagtttgagaagcatgaggtccatcagtatcggcagtggctgaaggaagaatatggagagagccctttgcaggatgcagaagaagccaaaaacattctgggtaaatataaggagcaagggcgcacagagccccagcccggcgccaggcggtggagcagttttccggcactggctccgctgacctacgataattatacgacggagacctaacgcaagcgacctgctgccttccttcccactgcttgtcttcagtgtgcccggctgggcaggggtgcggtggtggtggccgatgaggacaggaaagggagatagccagggcgaggtggggcgagggctccttcccccaagcaacaccgcccag

SEQ ID NO: 6087 - DNA, 465 bp, Homo sapiens
  source 1..465: mol_type = unassigned DNA; mol_type = unassigned DNA
ccggccggtccctgccgctgacttgttgacactgcgagcactcagtccctcccgcgcgcctcctccccgcccgccccgccgctcctcctccctgtaacatgccatagtgcgcctgcgaccacacggccggggcgctagcgttcgccttcagccaccatggggaatgggatgaacaagatgccagagacgcggaacaattgagcaagaacaaggtgacacatattctgtctgtccacgatagtgccaggcctatgttggaggacaagacatttcaaagaaagtattaaattcattcacgagtgccggctccgcggtgagagctgccttgtacactgcctggccggggtctccaggagcgtgacactggtgatcgcatacatcatgaccgtcactgactttggctgggaggatgccctgcacaccgtgcgtgctgggagatcctgtgccaaccccaacgtgggcttc

SEQ ID NO: 6088 - DNA, 1166 bp, Homo sapiens
  source 1..1166: mol_type = unassigned DNA; mol_type = unassigned DNA
ccgctcctcctccctgtaacatgccatagtgcgcctgcgaccacacggccggggcgctagcgttcgccttcagccaccatggggaatgggatgaacaagatcctgcccggcctgtacatcggcaacttcaaagatgccagagacgcggaacaattgagcaagaacaaggtgacacatattctgtctgtccacgatagtgccaggcctatgttggaggacaagacatttcaaagaaagtattaaattcattcacgagtgccggctccgcggtgagagctgccttgtacactgcctggccggggtctccaggagcgtgacactggtgatcgcatacatcatgaccgtcactgactttggctgggaggatgccctgcacaccgtgcgtgctgggagatcctgtgccaaccccaacgtgggcttccagagacagctccaggagtttgagaagcatgaggtccatcagtatcggcagtggctgaaggaagaatatggagagagccctttgcaggatgcagaagaagccaaaaacattctgggtaaatataaggagcaagggcgcacagagccccagcccggcgccaggcggtggagcagttttccggcactggctccgctgacctacgataattatacgacggagacctaacgcaagcgacctgctgccttccttcccactgcttgtcttcagtgtgcccggctgggcaggggtgcggtggtggtggccgatgaggacaggaaagggagatagccagggcgaggtggggcgagggctccttcccccaagcaacaccgcccagccctgctccaggcccctgcactccgcccacccctaccctggctgcacctgagcttgctgcccctggggatgttgcccagtggctgtgcactgctctgtgcacgtgcgtgtgtgtgagtgcacttgtgtgtgggtgactaagtggatgcatgtgtgtgcctgtgtgagtgagggtatgtgcacctaagtgtgtacatgtgtgtatgttgtgaaagtgtctgtgcacatgaatgtttgtgtgtgtgtgaactctttcttactgctggaagtcacagaattcatattgctgcccgggttggtgtggccacctttccctttgtccaagactccacatggaaggcatttgagctcgacctccgaaaagctaccc

SEQ ID NO: 6089 - DNA, 3098 bp, Homo sapiens
  source 1..3098: mol_type = unassigned DNA; mol_type = unassigned DNA
ccgctcctcctccctgtaacatgccatagtgcgcctgcgaccacacggccggggcgctagcgttcgccttcagccaccatggggaatgggatgaacaagatcctgcccggcctgtacatcggcaacttcaaagatgccagagacgcggaacaattgagcaagaacaaggtgacacatattctgtctgtccacgatagtgccaggcctatgttggagggagttaaatacctgtgcatcccagcagcggattcaccatctcaaaacctgacaagacatttcaaagaaagtattaaattcattcacgagtgccggctccgcggtgagagctgccttgtacactgcctggccggggtctccaggagcgtgacactggtgatcgcatacatcatgaccgtcactgactttggctgggaggatgccctgcacaccgtgcgtgctgggagatcctgtgccaaccccaacgtgggcttccagagacagctccaggagtttgagaagcatgaggtccatcagtatcggcagtggctgaaggaagaatatggagagagccctttgcaggatgcagaagaagccaaaaacattctgggtaaatataaggagcaagggcgcacagagccccagcccggcgccaggcggtggagcagttttccggcactggctccgctgacctacgataattatacgacggagacctaacgcaagcgacctgctgccttccttcccactgcttgtcttcagtgtgcccggctgggcaggggtgcggtggtggtggccgatgaggacaggaaagggagatagccagggcgaggtggggcgagggctccttcccccaagcaacaccgcccagccctgctccaggcccctgcactccgcccacccctaccctggctgcacctgagcttgctgcccctggggatgttgcccagtggctgtgcactgctctgtgcacgtgcgtgtgtgtgagtgcacttgtgtgtgggtgactaagtggatgcatgtgtgtgcctgtgtgagtgagggtatgtgcacctaagtgtgtacatgtgtgtatgttgtgaaagtgtctgtgcacatgaatgtttgtgtgtgtgtgaactctttcttactgctggaagtcacagaattcatattgctgcccgggttggtgtggccacctttccctttgtccaagactccacatggaaggcatttgagctcgacctccgaaaagctacccagcaaagagcagtctgtgcctctgagcagaccgtgagaactcaggggacgagtggctaagagcatggcctctcccagaacccacccagggtggtgtggtgggggcaacaggggccagactcctctagagggagggtggctctggggccctggaaaacgtgagagactgccctgagctggtccagtgggccagcactttataccaactcagcatttaagggaagtatcttagattgcctccatctcaatgtgaatgcaccaggctgagggttccctagcgccttgagtcaaggccacttttcagcccatcgagccctgagttctacttggtgtttgttctctggagctgattgcacttgagctctgtggtgggcaggcgcactttagcctaagttgggtgccccagggcaccccctcctctctgctccttgccagcttcattcactcccagcctctcgctgtcctcactttgcaggggctcctcctcaacatttgcatgcacctgcaagaattgggaagaaagagcatttattaggcactgtagcaatttgcattttaaaatgcctgagcatttattaagcttcttggtattcacttgggtttgataattgatctgagctacctcattgaatgtttttggaaaggtgttttttggtatgcaagtcagctttgcctcacagttgaaaatgttcggtcatgattgcttttgaaaccaaaggggaaggtaccgatatcattgagctatttaaagttgccagtttgggctccagtaatgctttctggtgggtaaaattccacattcaggccacgagagcatctacagtttgtactctggggctgcaggcatcctgggacgctgtacgcaattcagtggtctagtcctttataccgactcagattccttaagcatgcagagtcactcgaatgaaaaaacatactcgacctctccctaaaaagatgttgcaacccagtttctctgaattccaccacaaaaagagaccctgaataagaagagcagttttcctgtgcatatagagggtgtgtcaaaggtgagctttttggggaccgggaaaaacaaagttgcctgattccgcgcaggtgcacaggccccggatgtacacccggaaaggggagtgtggctgtagaatcatccatccgtctacagctaaaacaatttgccaataaagtacatgtttttcctaagccaaaaataaatacgttaacagaaaaatgatttaggatatagcttgaatgcttaaatatgtgcacctttacaaacctctcagtgtattcttggagttcttgaaatgttgttttaatatttgttgccagtaatgttctttcttcacagccgctccgggaattctgaagttctgggcctttctcagaagactgtaatgtacctgaagtttctgaaatattgcaaacccacagagtttaggctggtgctgccaaaaagaaaagcaacatagagtttaagtatccagtagtgatttgtaaacttgtttttcatttgaagctgaatatatacgtagtcatgtttatgttgagaactaaggatattctttagcaagagaaaatattttccccttatccccactgctgtggaggtttctgtacctcgcttggatgcctgtaaggatcccgggagccttgccgcactgccttgtgggtggcttggcgctcgtgattgcttcctgtgaacgcctcccaaggacgagcccagtgtagttgtgtggcgtgaactctgcccgtgtgttctcaaattccccagcttgggaaatagcccttggtgtgggttttatctctggtttgtgttctccgtggtggaattgaccgaaagctctatgttttcgttaataaagggcaacttagccaagttt

SEQ ID NO: 6090 - DNA, 1231 bp, Homo sapiens
  source 1..1231: mol_type = unassigned DNA; mol_type = unassigned DNA
gtaacatgccatagtgcgcctgcgaccacacggccggggcgctagcgttcgccttcagccaccatggggaatgggatgaacaagatcctgcccggcctgtacatcggcaacttcaaagatgccagagacgcggaacaattgagcaagaacaaggtgacacatattctgtctgtccacgatagtgccaggcctatgttggaggacaagacatttcaaagaaagtattaaattcattcacgagtgccggctccgcggtgagagctgccttgtacactgcctggccggggtctccaggagcgtgacactggtgatcgcatacatcatgaccgtcactgactttggctgggaggatgccctgcacaccgtgcgtgctgggagatcctgtgccaaccccaacgtgggcttccagagacagctccaggagtttgagaagcatgaggtccatcaggtaagcagttcttaggggacatcagagatgcaggcaggtgcccctgaacggtgcccacagtctttccgtacacagccagcatcatggcgtttggagttgaaaggcccacagaggacatcggctcccagggcgcccagctgcaccccttcagaagtcgtcacgatccctcgtgcacctgttgaagccacaggcgcctaccctttgtcattctccttgtgcctggtactccctactagtttgtttctctccctttgggtgacgtaccatttccttggtctggcctattttcatgtcctaggccagcaccttgaaggagcagttccttctcttgcttgaccctggctggccaaccacagagctctgatttcccactgctgtttgtttccctggttatgtgtggcaccatctctgtggtgaagtcacaggtgcaagcccacgtggatgcagacgtgcacatgtgtgtgacgtttcgggtttgtttccatcctctccagtatcggcagtggctgaaggaagaatatggagagagccctttgcaggatgcagaagaagccaaaaacattctgggtaaatataaggagcaagggcgcacagagccccagcccggcgccaggcggtggagcagttttccggcactggctccgctgacctacgataattatacgacggagacctaacgcaagcgacctgctgccttccttcccactgcttgtcttcagtgtgcccggctgggcaggggtgcggtggtggtggccgatgaggacaggaaagggagatagccag

SEQ ID NO: 6091 - DNA, 551 bp, Homo sapiens
  source 1..551: mol_type = unassigned DNA; mol_type = unassigned DNA
aacatgccatagtgcgcctgcgaccacacggccggggcgctagcgttcgccttcagccaccatggggaatgggatgaacaaggacaagacatttcaaagaaagtattaaattcattcacgagtgccggctccgcggtgagagctgccttgtacactgcctggccggggtctccaggagcgtgacactggtgatcgcatacatcatgaccgtcactgactttggctgggaggatgccctgcacaccgtgcgtgctgggagatcctgtgccaaccccaacgtgggcttccagagacagctccaggagtttgagaagcatgaggtccatcaggtaagcagttcttaggggacatcagagatgcaggcaggtgcccctgaacggtgcccacagtctttccgtacacagccagcatcatggcgtttggagttgaaaggcccacagaggacatcggctcccagggcgcccagctgcaccccttcagaagtcgtcacgatccctcgtgcacctgttgaagccacaggcgcctaccctttgtcattctccttgtgcctg

SEQ ID NO: 6092 - DNA, 352 bp, Homo sapiens
  source 1..352: mol_type = unassigned DNA; mol_type = unassigned DNA
agcgttcgccttcagccaccatggggaatgggatgaacaagatcctgcccggcctgtacatcggcaacttcaaagatgccagagacgcggaacaattgagcaagaacaaggacaagacatttcaaagaaagtattaaattcattcacgagtgccggctccgcggtgagagctgccttgtacactgcctggccggggtctccaggagcgtgacactggtgatcgcatacatcatgaccgtcactgactttggctgggaggatgccctgcacaccgtgcgtgctgggagatcctgtgccaaccccaacgtgggcttccagagacagctccaggagtttgagaagcatgaggtcc

SEQ ID NO: 6093 - DNA, 587 bp, Homo sapiens
  source 1..587: mol_type = unassigned DNA; mol_type = unassigned DNA
atggggaatgggatgaacaagatcctgcccggcctgtacatcggcaacttcaaagatgccagagacgcggaacaattgagcaagaacaaggtgacacatattctgtctgtccacgatagtgccaggcctatgttggaggacaagacatttcaaagaaagtattaaattcattcacgagtgccggctccgcggtgagagctgccttgtacactgcctggccggggtctccaggagcgtgacactggtgatcgcatacatcatgaccgtcactgactttggctgggaggatgccctgcacaccgtgcgtgctgggagatcctgtgccaaccccaacgtgggcttccagagacagctccaggagtttgagaagcatgaggtccatcagtatcggcagtggctgaaggaagaatatggagagagccctttgcaggatgcagaagaagccaaaaacattctggccgctccgggaattctgaagttctgggcctttctcagaagactgtaatgtacctgaagtttctgaaatattgcaaacccacagagtttaggctggtgctgccaaaaagaaaagcaacatagagtttaag

SEQ ID NO: 6094 - DNA, 548 bp, Homo sapiens
  source 1..548: mol_type = unassigned DNA; mol_type = unassigned DNA
atagcagggatcgaaaactgtctagtaatcgctctttcttgaagcaagctgtatctaggtttctcgtgtggcagtcgggtgtgtaagagcggcccctccactggctggtcctgctaccacagactcacttgcaaatggagccctagaactcctgcatggctggactcagagggcttgagatcttccagtacttaactgagtctagggaggacatggttttttaaacttctaaatcaaagaactcttttggcctggcttcctagaggtaccctgtccttcagctggggaccttctctctagggctcgtgctcactgaccagcctctccttacaactgaagacttttgcaggacactcttcctagatgttgccttcatgttgagtcccggtgtctgagcatttcctcctgacggctgtacttgagcagtcacctggcacagggagttaaatacctgtgcatcccagcagcggattcaccatctcaaaacctgacaagacatttcaaagaaagtattaaattcattcacgagtgccggctccgcggtgaga

SEQ ID NO: 6095 - DNA, 547 bp, Homo sapiens
  source 1..547: mol_type = unassigned DNA; mol_type = unassigned DNA
aatcgctctttcttgaagcaagctgtatctaggtttctcgtgtggcagtcgggtgtgtaagagcggcccctccactggctggtcctgctaccacagactcacttgcaaatggagccctagaactcctgcatggctggactcagagggcttgagatcttccagtacttaactgagtctagggaggacatggttttttaaacttctaaatcaaagaactcttttggcctggcttcctagaggtaccctgtccttcagctggggaccttctctctagggctcgtgctcactgaccagcctctccttacaactgaagacttttgcaggacactcttcctagatgttgccttcatgttgagtcccggtgtctgagcatttcctcctgacggctgtacttgagcagtcacctggcacaggacaagacatttcaaagaaagtattaaattcattcacgagtgccggctccgcggtgagagctgccttgtacactgcctggccggggtctccaggagcgtgacactggtgatcgcatacatcatgaccgtcactg

SEQ ID NO: 6096 - DNA, 3824 bp, Homo sapiens
  source 1..3824: mol_type = unassigned DNA; mol_type = unassigned DNA
agtgctgtatctgctggtgcctggagagtcatctgccctgggcttccgcgtcctggtgtgtgcagtgctatatctgctggtgcctggagagtcatctgccctgggcttccgcgtcctggtgtgtgcaatgctgtatctgcgggtgcctggagagtcatctgccctgggcttctgcatcctggtgtgtgcagtgctgtatctgctggtgcctggagtcatctgccctgggcttctgcgtcctggtgtgtgcagtgctgtacctgctggtgcctggagagtcatctgccctgggcttccgtatcctggtgtgtgcagtgctgtatctgctggtgcctggagagtcatctgccctgggcttccgcgtcctggtgtgtgcaatgctgtatctgcgggtgcctggagagtcatctgccctgggcttctgcatcctggtgtgtgcaatgctgtatctgctggtgcctggagtcatctgccctgggcttctgcatcctcgtgtgtgcagtgctgtacctgctggtgcctggagtcatctgccctgggcttccgcatcctcgtgtgtgcagtgctgtacctgctggtgcctggagagtcatctgccctgggcttctgcgttctggtgtgtgcagtgctgtatctgctggtgcctggagagtcatctgccctgggcttccgcgtcctggtgtgtgcaatgctgtatctgctggtgtctggagtcatcttccctgggcttctgcgtcctggtgtgtgcagtgctgtatctgctggtgcctggagagtcatctgcgctgggcttctgcgtcctggtgtgtgcaatgctgtatctgctggtgcctggagagtcatctgccctgggcttctgcgttctggtgtgtgcagtgctgtatctgctggtgcctggagagtcatctgccctgggcttccccgtcctggtgtgtgcaatgctgtatctgctggtgcctggagagtcgtcttccctcggcttctgtgtcctggacaagacatttcaaagaaagtattaaattcattcacgagtgccggctccgcggtgagagctgccttgtacactgcctggccggggtctccaggagcgtgacactggtgatcgcatacatcatgaccgtcactgactttggctgggaggatgccctgcacaccgtgcgtgctgggagatcctgtgccaaccccaacgtgggcttccagagacagctccaggagtttgagaagcatgaggtccatcagtatcggcagtggctgaaggaagaatatggagagagccctttgcaggatgcagaagaagccaaaaacattctgggtaaatataaggagcaagggcgcacagagccccagcccggcgccaggcggtggagcagttttccggcactggctccgctgacctacgataattatacgacggagacctaacgcaagcgacctgctgccttccttcccactgcttgtcttcagtgtgcccggctgggcaggggtgcggtggtggtggccgatgaggacaggaaagggagatagccagggcgaggtggggcgagggctccttcccccaagcaacaccgcccagccctgctccaggcccctgcactccgcccacccctaccctggctgcacctgagcttgctgcccctggggatgttgcccagtggctgtgcactgctctgtgcacgtgcgtgtgtgtgagtgcacttgtgtgtgggtgactaagtggatgcatgtgtgtgcctgtgtgagtgagggtatgtgcacctaagtgtgtacatgtgtgtatgttgtgaaagtgtctgtgcacatgaatgtttgtgtgtgtgtgaactctttcttactgctggaagtcacagaattcatattgctgcccgggttggtgtggccacctttccctttgtccaagactccacatggaaggcatttgagctcgacctccgaaaagctacccagcaaagagcagtctgtgcctctgagcagaccgtgagaactcaggggacgagtggctaagagcatggcctctcccagaacccacccagggtggtgtggtgggggcaacaggggccagactcctctagagggagggtggctctggggccctggaaaacgtgagagactgccctgagctggtccagtgggccagcactttataccaactcagcatttaagggaagtatcttagattgcctccatctcaatgtgaatgcaccaggctgagggttccctagcgccttgagtcaaggccacttttcagcccatcgagccctgagttctacttggtgtttgttctctggagctgattgcacttgagctctgtggtgggcaggcgcactttagcctaagttgggtgccccagggcaccccctcctctctgctccttgccagcttcattcactcccagcctctcgctgtcctcactttgcaggggctcctcctcaacatttgcatgcacctgcaagaattgggaagaaagagcatttattaggcactgtagcaatttgcattttaaaatgcctgagcatttattaagcttcttggtattcacttgggtttgataattgatctgagctacctcattgaatgtttttggaaaggtgttttttggtatgcaagtcagctttgcctcacagttgaaaatgttcggtcatgattgcttttgaaaccaaaggggaaggtaccgatatcattgagctatttaaagttgccagtttgggctccagtaatgctttctggtgggtaaaattccacattcaggccacgagagcatctacagtttgtactctggggctgcaggcatcctgggacgctgtacgcaattcagtggtctagtcctttataccgactcagattccttaagcatgcagagtcactcgaatgaaaaaacatactcgacctctccctaaaaagatgttgcaacccagtttctctgaattccaccacaaaaagagaccctgaataagaagagcagttttcctgtgcatatagagggtgtgtcaaaggtgagctttttggggaccgggaaaaacaaagttgcctgattccgcgcaggtgcacaggccccggatgtacacccggaaaggggagtgtggctgtagaatcatccatccgtctacagctaaaacaatttgccaataaagtacatgtttttcctaagccaaaaataaatacgttaacagaaaaatgatttaggatatagcttgaatgcttaaatatgtgcacctttacaaacctctcagtgtattcttggagttcttgaaatgttgttttaatatttgttgccagtaatgttctttcttcacagccgctccgggaattctgaagttctgggcctttctcagaagactgtaatgtacctgaagtttctgaaatattgcaaacccacagagtttaggctggtgctgccaaaaagaaaagcaacatagagtttaagtatccagtagtgatttgtaaacttgtttttcatttgaagctgaatatatacgtagtcatgtttatgttgagaactaaggatattctttagcaagagaaaatattttccccttatccccactgctgtggaggtttctgtacctcgcttggatgcctgtaaggatcccgggagccttgccgcactgccttgtgggtggcttggcgctcgtgattgcttcctgtgaacgcctcccaaggacgagcccagtgtagttgtgtggcgtgaactctgcccgtgtgttctcaaattccccagcttgggaaatagcccttggtgtgggttttatctctggtttgtgttctccgtggtggaattgaccgaaagctctatgttttcgttaataaagggcaacttagccaagttt

SEQ ID NO: 6097 - DNA, 536 bp, Homo sapiens
  source 1..536: mol_type = unassigned DNA; mol_type = unassigned DNA
ctgggctctggacatctgctgtcagtgcaggtggctacctgtccttgagctgtccccagtgcttctcagctttgctaggagctgagtgctctcttgtctgtgacagtgacctgatttaagcgtggagtgaccccttgcactatagacaagacaagacatttcaaagaaagtattaaattcattcacgagtgccggctccgcggtgagagctgccttgtacactgcctggccggggtctccaggagcgtgacactggtgatcgcatacatcatgaccgtcactgactttggctgggaggatgccctgcacaccgtgcgtgctgggagatcctgtgccaaccccaacgtgggcttccagagacagctccaggagtttgagaagcatgaggtccatcagtatcggcagtggctgaaggaagaatatggagagagccctttgcaggatgcagaagaagccaaaaacattctgggtaaatataaggagcaagggcgcacagagccccagcccggcgccaggcggtggagcagttttccggc

SEQ ID NO: 6098 - DNA, 503 bp, Homo sapiens
  source 1..503: mol_type = unassigned DNA; mol_type = unassigned DNA
actctccagtgaagctacgacagtaagacttctgtttcagctgaaaaaggaagtcaggaccgtagctcatgaaaaggacaagacatttcaaagaaagtattaaattcattcacgagtgccggctccgcggtgagagctgccttgtacactgcctggccggggtctccaggagcgtgacactggtgatcgcatacatcatgaccgtcactgactttggctgggaggatgccctgcacaccgtgcgtgctgggagatcctgtgccaaccccaacgtgggcttccagagacagctccaggagtttgagaagcatgaggtccatcagtatcggcagtggctgaaggaagaatatggagagagccctttgcaggatgcagaagaagccaaaaacattctggccgctccgggaattctgaagttctgggcctttctcagaagactgtaatgtacctgaagtttctgaaatattgcaaacccacagagtttaggctggtgctgccaaaaa

SEQ ID NO: 6099 - DNA, 1835 bp, Homo sapiens
  source 1..1835: mol_type = unassigned DNA; mol_type = unassigned DNA
agttaattctgtctgggaggagtgtgtgtgtttaagacagtgcctgggatgacttataatgtaatctttaggcaaaacgctttgtaattggtgcagctctgagaacacacgcatgcattccaggcggtgctgctggggctcggcggggccgtgtctggtctgcaaggcgcgcgggctcgtggggggttggctggggagcccacgctgcctggcgactcgggccaccgaatgtgagaccgagtccctttatgtcaccagcgcacacgctgatttgaaccctgcttcgacgtgtgtgtcatggcttaaaaatagctgctaatctgtcaacctgtcttgggcagaaacagcggcggcgacagcagcaggagcgtcatggccgtggcgctgtctgcgccggcgatccgcctttcggactgaggcccagcgcagcgcttgcaaagagcagcagctacctggcaactgaacccatcatcaccacagccactcctgcagctgccacggtttctgccacctctaagatgtgccctggtaactggctttgggcttctatgacttttatggcccgcttctcccggagtagctcaaggtctcctgttcgaactcgagggaccctggaggagatgccaaccgttcaacatcctttcctcaatgtcttcgagttggagcggctcctctacacaggcaagacagcctgtaaccatgccgacgaggtctggccaggcctctatctcggagaccaggacatggctaacaaccgccgggagcttcgccgcctgggcatcacgcacgtcctcaatgcctcacacagccggtggcgaggcacgcccgaggcctatgaggggctgggcatccgctacctgggtgttgaggcccacgactcgccagcctttgacatgagcatccacttccagacggctgccgacttcatccaccgggcgctgagccagccaggagggaagatcctggtgcattgtgctgtgggcgtgagccgatccgccaccctggtactggcctacctcatgctgtaccaccaccttaccctcgtggaggccatcaagaaagtcaaagaccaccgaggcatcatccccaaccggggcttcctgaggcagctcctggccctggaccgcaggctgcggcagggtctggaagcatgaggggagggggagagaggtcaggccaggcccgtgggtaggtccctggctcccagctggagataggaggcccaggtggcaggtagcaggaggcccagatcacccatcctcccctggggtcaggagaggccgagccccaggccactgtcactctttgtgggaggggacggggagtgaggttgggcagtgtggtggatgggcacccaggaagggttgaccagggaaggaggcagctaggctgtagatggaagatggtcctgggattcgaacaccgctgggatctggccagggtgctccctgggattcacagtcccttcccctctttgtgcccaagtgtttccctctctccctcaccaaaacaaaagggccatctctgccctgcacttgtgcagaaagtcagggatacggcaagcatgaatgcaatggtgtagagttgtgtgaaacccctagcatagagacagacagcgaagagatggtgtgaaaagcttgcagaaccagacagagaaccccacagactttccactccaagcacaggaggaggtagctagcgtgtgagggttggcactaggcccacggctgctgcttgggccaaaaacatacagaggtgcatggctggcagtcttgaaattgtcactcgcttactggatccaagcgtctcgaggataaataaagatcatgaaaaag

SEQ ID NO: 6100 - DNA, 1373 bp, Homo sapiens
  source 1..1373: mol_type = unassigned DNA; mol_type = unassigned DNA
gctgctggggctcggcggggccgtgtctggtctgcaaggcgcgcgggctcgtggggggttggctggggagcccacgctgcctggcgactcgggccaccgaatgtgagaccgagtccctttatgtcaccagcgcacacgctgatttgaaccctgcttcgacgtgtgtgtcatggcttaaaaatagctgctaatctgtcaacctgtcttgggcagaaacagcggcggcgacagcagcaggagcgtcatggccgtggcgctgtctgcgccggcgatccgcctttcggactgaggcccagcgcagcgcttgcaaagagagccaaagagctgagcaaaaggagctgctgcagcttgaagaaaaagccacccctgaaggctcctgccagagccaggcttaccttctctccctcgagaatcttctcccgaaggaccagcccagggaagggaagcagctgctctggactcactcaagtgtgtctcacaccccttcctcttccagcagcagctacctggcaactgaacccatcatcaccacagccactcctgcagctgccacggtttctgccacctctaagatgtgccctggtaactggctttgggcttctatgacttttatggcccgcttctcccggagtagctcaaggtctcctgttcgaactcgagggaccctggaggagatgccaaccgttcaacatcctttcctcaatgtcttcgagttggagcggctcctctacacaggcaagacagcctgtaaccatgccgacgaggtctggccaggcctctatctcggagaccaggacatggctaacaaccgccgggagcttcgccgcctgggcatcacgcacgtcctcaatgcctcacacagccggtggcgaggcacgcccgaggcctatgaggggctgggcatccgctacctgggtgttgaggcccacgactcgccagcctttgacatgagcatccacttccagacggctgccgacttcatccaccgggcgctgagccagccaggagggaagatcctggtgcattgtgctgtgggcgtgagccgatccgccaccctggtactggcctacctcatgctgtaccaccaccttaccctcgtggaggccatcaagaaagtcaaagaccaccgaggcatcatccccaaccggggcttcctgaggcagctcctggccctggaccgcaggctgcggcagggtctggaagcatgaggggagggggagagaggtcaggccaggcccgtgggtaggtccctggctcccagctggagataggaggcccaggtggcaggtagcaggaggcccagatcacccatcctcccctggggtcaggagaggccgagccccaggccactgtcactctttgtgggaggggac

SEQ ID NO: 6101 - DNA, 729 bp, Homo sapiens
  source 1..729: mol_type = unassigned DNA; mol_type = unassigned DNA
ggacatgtgactctcccacctcgtttcgtggcagagccaaagagctgagcaaaaggagctgctgcagcttgaagaaaaagccacccctgaaggctcctgccagagccaggcttaccttctctccctcgagaatcttctcccgaaggaccagcccagggaagggaagcagctgctctggactcactcaagtgtgtctcacaccccttcctcttccagcagcagctacctggcaactgaacccatcatcaccacagccactcctgcagctgccacggtttctgccacctctaagatgtgccctggtaactggctttgggcttctatgacttttatggcccgcttctcccggagtagctcaaggtctcctgttcgaactcgagggaccctggaggagatgccaaccgttcaacatcctttcctcaatgtcttcgagttggagcggctcctctacacaggcaagacagcctgtaaccatgccgacgaggtctggccaggcctctatctcggagaccaggacatggctaacaaccgccgggagcttcgccgcctgggcatcacgcacgtcctcaatgcctcacacagccggtggcgaggcacgcccgaggcctatgaggggctgggcatccgctacctgggtgttgaggcccacgactcgccagcctttgacatgagcatccacttccagacggctgccgacttcatccaccgggcgctgagccagccaggagg

SEQ ID NO: 6102 - DNA, 2557 bp, Homo sapiens
  source 1..2557: mol_type = unassigned DNA; mol_type = unassigned DNA
cttatatgggcagccgcgtcacggacggcactcattcacataaaacgctgcgcggccggcggaatccccggcttctagggcggcgagcggccgggctggctatcgagcgagcggggcgggaacgcggagttgcgccgccgctcgggcgccgggctccgtcgcggccgcagccccgcgggtcgccctcccgtgcctcgcccgcggacaccctggccgtggacaccctggccgtgggcacccgcggggcgcgcggcgcggggccgctggccggcggcggcggcggcatgaaggtcacgtcgctcgacgggcgccagctgcgcaagatgctccgcaaggaggcggcggcgcgctgcgtggtgctcgactgccggccctatctggccttcgctgcctcgaacgtgcgcggctcgctcaacgtcaacctcaactcggtggtgctgcggcgggcccggggcggcgcggtgtcggcgcgctacgtgctgcccgacgaggcggcgcgcgcgcggctcctgcaggagggcggcggcggcgtcgcggccgtggtggtgctggaccagggcagccgccactggcagaagctgcgagaggagagcgccgcgcgtgtcgtcctcacctcgctactcgcttgcctacccgccggcccgcgggtctacttcctcaaagggggatatgagactttctactcggaatatcctgagtgttgcgtggatgtaaaacccatttcacaagagaagattgagagtgagagagccctcatcagccagtgtggaaaaccagtggtaaatgtcagctacaggccagcttatgaccagggtggcccagttgaaatccttcccttcctctaccttggaagtgcctaccatgcatccaagtgcgagttcctcgccaacctgcacatcacagccctgctgaatgtctcccgacggacctccgaggcctgcgcgacccacctacactacaaatggatccctgtggaagacagccacacggctgacattagctcccactttcaagaagcaatagacttcattgactgtgtcagggaaaagggaggcaaggtcctggtccactgtgaggctgggatctcccgttcacccaccatctgcatggcttaccttatgaagaccaagcagttccgcctgaaggaggccttcgattacatcaagcagaggaggagcatggtctcgcccaactttggcttcatgggccagctcctgcagtacgaatctgagatcctgccctccacgcccaacccccagcctccctcctgccaaggggaggcagcaggctcttcactgataggccatttgcagacactgagccctgacatgcagggtgcctactgcacattccctgcctcggtgctggcaccggtgcctacccactcaacagtctcagagctcagcagaagccctgtggcaacggccacatcctgctaaaactgggatggaggaatcggcccagccccaagagcaactgtgatttttgtttttaagactcatggacatttcatacctgtgcaatactgaagacctcattctgtcatgctgccccagtgagatagtgagtggtcaccaggcttgcaaatgaacttcagacggacctcagggtaggttctcgggactgaaggaaggccaagccattacgggagcacagcatgtgctgactactgtacttccagacccctgccctcttgggactgcccagtccttgcacctcagagttcgccttttcatttcaagcataaggcaataaatacctgcagcaacgtgggagaaagaagttgctggaccaggagaaaaggcagttatgaagccaattcattttgaaggaagcacaatttccaccttattttttgaactttggcagtttcaatgtctgtctctgttgcttcggggcataagctgatcaccgtctagttgggaaagtaaccctacagggtttgtagggacatgatcagcatcctgatttgaaccctgaaatgttgtgtagacaccctcttgggtccaatgaggtagttggttgaagtagcaagatgttggcttttctggattttttttgccatgggttcttcactgaccttggactttggcatgattcttagtcatacttgaacttgtctcattccacctcttctcagagcaactcttcctttgggaaaagagttcttcagatcatagaccaaaaaagtcataccttcgaggtggtagcagtagattccaggaggagaagggtacttgctaggtatcctgggtcagtggcggtgcaaactggtttcctcagctgcctgtccttctgtgtgcttatgtctcttgtgacaattgttttcctccctgcccctggaggttgtcttcaagctgtggacttctgggatttgcagattttgcaacgtggtactactttttttttctttttgtctgttagttatttctccaggggaaaaggcaataattttctaagacccgtgtgaatgtgaagaaaagcagtatgttactggttgttgttgttgttcttgttttttatagtgtaaaataaaaatagtaaaaggagaaaagca

SEQ ID NO: 6103 - DNA, 819 bp, Homo sapiens
  source 1..819: mol_type = unassigned DNA; mol_type = unassigned DNA
tatcctgagtgttgcgtggatgtaaaacccatttcacaagagaagattgagagtgagagagccctcatcagccagtgtggaaaaccagtggtaaatgtcagctacaggccagcttatgaccagataactgaaaccagaggaaatcaaaagatactagagggcttcatgtttctgtaaactaggtggcccagttgaaatccttcccttcctctaccttggaagtgcctaccatgcatccaagtgcgagttcctcgccaacctgcacatcacagccctgctgaatgtctcccgacggacctccgaggcctgcgcgacccacctacactacaaatggatccctgtggaagacagccacacggctgacattagctcccactttcaagaagcaatagacttcattgactgtgtcagggaaaagggaggcaaggtcctggtccactgtgaggctgggatctcccgttcacccaccatctgcatggcttaccttatgaagaccaagcagttccgcctgaaggaggccttcgattacatcaagcagaggaggagcatggtctcgcccaactttggcttcatgggccagctcctgcagtacgaatctgagatcctgccctccacgcccaacccccagcctccctcctgccaaggggaggcagcaggctcttcactgataggccatttgcagacactgagccctgacatgcagggtgcctactgcacattccctgcctcggtgctggcaccggtgcctacccactcaacagtctcagagctcagcagaagccctgtggcaacggccacatcctgctaaaactgggatgg

SEQ ID NO: 6104 - DNA, 920 bp, Homo sapiens
  source 1..920: mol_type = unassigned DNA; mol_type = unassigned DNA
taccatggaggagtaccatcgccactgcgacgaggttggcttcaatgctgaggaagcccacaatattgtcaaagagtgtgtagatggggttttaggtggtgaagattataatcacaacaacatcaaccagtggactgcaagcatagtggaacaatccttaacacacctggttaagttgggaaaagcctataaatatattgtgacctgtgcagtggtccagaagagcgcatatggctttcacacagccagctcctgtttttgggataccacatctgatggaacctgtaccgtaagatgggagaaccggaccatgaactgtggagtcttgctctgtcgcccaggctggagtgcagtgatgcaatttcggctcactgcaacctctgcctcccaggttcaagtgattcttctgcctcagcctcccgagtacctggaactacaggcacacgccataacgcctggctaatttttatatttttagtagagatggggttttgccatgttggccaggatggtctcgaactcctgacctcaagtgatccacccacctcggcctctcaaaatgctgggattacaagcgcgagccaccctgcccggccgaaaagatctcaaacattcatctcttacaagatttagatgactatcatcaatatgccttaacatcagtagtttaggagactctagcccactttgtctagttgcaaactgtaattctccctgtggtcccactgaatatcattccacagcattcttggatatatatgatgtattgacaattcaggtctagatagaaatggcccctattgcttcatgaagaatatcctttccccaaatgtcttctgaggagctcaagattaaagctagtatcctgtacagacacttgcaggactgctagtatgatatatattgaccctatgggagac

SEQ ID NO: 6105 - DNA, 2217 bp, Homo sapiens
  source 1..2217: mol_type = unassigned DNA; mol_type = unassigned DNA
caaaggcggggattgcgtagggaaaggccctaggccataaacgggggtggggcctccccggaggccagtgcgcggccgcggtgctctaccggcgtgtcgctccgccccagggagagccggcgctaccatggaggagtaccatcgccactgcgacgaggttggcttcaatgctgaggaagcccacaatattgtcaaagagtgtgtagatggggttttaggtggtgaagattataatcacaacaacatcaaccagtggactgcaagcatagtggaacaatccttaacacacctggttaagttgggaaaagcctataaatatattgtgacctgtgcagtggtccagaagagcgcatatggctttcacacagccagctcctgtttttgggataccacatctgatggaacctgtaccgtaagatgggagaaccggaccatgaactgtattgtcaacgtttttgccattgctattgttctttaactgactaaaaatgttgggctaaagccattaacttaagaatttgtcagtgtatcctttccaaaaagagtaatagttgtttactagtgtgctagatgaaaagcgtgcaatatgctttaaagctatcaacaaaaactgaatattataagcaagcaatatcatagtaattggcagattagctcatattctatacagcatcgtttaaataggaaaaatttaatgctagcaaaaaataaatttagaaatatggcatgacatgaaaatacaatcttatatttacaccagcttttcactaatattttgtacctaaggtgatggggaactccattcagataataaaattctctttcagctagagaagttaacaggaataaatatatgaacaaaaaagctgcaaggataaatgtggagaaaatgatgagaattagctaacatttttaagtttttttaaactttcttcccctcagttgtacttaatatttagtggaaagtaataatttttttaattttctatcaactaatagtatagtaacaactatgattaacttgtttactttttctgaggattagtaaatcaattttttttaatttcaaatttttggatttacacttgagggtaaattaaatctggtaaactgaatttcctagttaaataaaattagttgcagtatatgatgaacagtgtatgactcaaacagctgccttacaattcactcattccatgtggaacaaacatttatcagatgcctattatgggcatatgtctctgctaagcaccatagttgtcaatgtgctgtgcaaatgctaagttccttttagcaattgttcagttggaagacgtattaatatttggggaaggaaaagaaagtagttgttttacaagggaggaaaaaagtgaatctggttacacatatggaagtaagcaaaatgaaaagcacttattgctttctgacagaattatagatgtaattttaagagttgctcctagcaagttaaaagtgcatataaaatatgcaactcttagttaaaggccttattatcagtcttacctatacaagtagtaaattttgtcattgctttagttacaaccatctgtaaataacttaaaagacttattatgtggggttcaaattgagtggaataaagtatagattaaaagtatacaatccttagcacgttatctcagggcttatgaaatgtaattaaatttattaagaaaatagatgaaaaattagggtacacagctggccaccaaatgcgaagtcaatctgctacttaaccctgaaaacaaaatcagttttgcatattaccactaacactaatacatatagagagcggaaccataactcattgaattttggagaggaataagcttagcgttaatattgacaatattaaggcaatattcttgtaggaatactatgtgcatgtttgatattttgccaaataacaataattaataattgttcaatgtttaagaataatattaacaaaataaaggagtttaatgcagtgatctttgtttttggcacatcaaaaattctcagtcattattcatgtttctttatgctgctggcttttgtgccctggaagatcataatagtgaccaaaatatacatgcagacttgttttttattattgttgtttaagcataatttaagaaaaaaaatttttacctggtgaacttgctatctgctctgtttctagttaaaatataataaatattatcttcctgtgctgta

SEQ ID NO: 6106 - DNA, 719 bp, Homo sapiens
  source 1..719: mol_type = unassigned DNA; mol_type = unassigned DNA
ctcccagcgagggcggtcccaagagttggggtgcggcgtcctccgagcccgggtcctctcccctgggcccgggatccgccccgcccgacccgttctccccaccccaaagtcctgagattcggggtgggaggggtggccaggagcgcgcggatcagacggtggggtcggggcagggttgggaggacgaggcctgacttgggtgcgaggagtgggcatggggtgacgggcgccgccctcctaccgggcgggcctcgaaaacgggtcttcccgctgctgcctccgtcccttggcttcctcagcgcgggtgctgcagcccccatggctcggagtctcggggtcctggtggcactgccattcccgctcccggttggcttcaatgctgaggaagcccacaatattgtcaaagagtgtgtagatggggttttaggtggtgaagattataatcacaacaacatcaaccagtggactgcaagcatagtggaacaatccttaacacacctggttaagttgggaaaagcctataaatatattgtgacctgtgcagtggtccagaagagcgcatatggctttcacacagccagctcctgtttttgggataccacatctgatggaacctgtaccgtaagatgggagaaccggaccatgaactgtattgtcaacgtttttgccattgctattgttctttaactgactaaaaatgttgggctaaagccattaac

SEQ ID NO: 6107 - DNA, 2724 bp, Homo sapiens
  source 1..2724: mol_type = unassigned DNA; mol_type = unassigned DNA
ttccggtctcagcaggcccaggagggcctcctgggtggggggcgggacgccgggtccctaggggctggtggtcactcagggtggggcgtgtcgcccctcccccgtccacctgctctactcttcccccgcgtgccctgggctgacccttgtcccctcctctccccgcccccggtggcagtggcggctgctgttgtcacccaccgggcctcctgtcccgcttgccctccccgccgcggggccggccgggccagagacaggcggtcgccttttcagcgccgccaccgccgccatgctggccgctcgcccaccccactgggggccccaccgcgccccagccccccgtgggccccgcgccagccctgacccgggtctcagcggcggtggcagccgaggtgcaggatgcaagaaggcgccccccggccgggctcccgctccaggcctcgctcccctgcggccctctgagcccaccatggccgtcccaccgggccatggtcccttctctggcttcccagggccccaggagcacacgcaggtattgcctgatgtgcggctactgcctcggaggctgcccctggccttccgggatgcaacctcagccccgctgcgtaagctctctgtggacctcatcaagacctacaagcacatcaatgaggtatactatgcgaagaagaagcggcgggcccagcaggcgccaccccaggattcgagcaacaagaaggagaagaaggtcctgaaccatggttatgatgacgacaaccatgactacatcgtgcgcagtggcgagcgctggctggagcgctacgaaattgactcgctcattggcaaaggctcctttggccaggtggtgaaagcctatgatcatcagacccaggagcttgtggccatcaagatcatcaagaacaaaaaggctttcctgaaccaggcccagattgagctgcggctgctggagctgatgaaccagcatgacacggagatgaagtactatatagtacacctgaagcggcacttcatgttccggaaccacctgtgcctggtatttgagctgctgtcctacaacctgtacgacctcctgcgcaacacccacttccgcggcgtctcgctgaacctgacccggaagctggcgcagcagctctgcacggcactgctctttctggccacgcctgagctcagcatcattcactgcgacctcaagcccgaaaacatcttgctgtgcaaccccaagcgcagcgccatcaagattgtggacttcggcagctcctgccagcttggccagaggatctaccagtatatccagagccgcttctaccgctcacctgaggtgctcctgggcacaccctacgacctggccattgacatgtggtccctgggctgcatccttgtggagatgcacaccggagagcccctcttcagtggctccaatgaggtcgaccagatgaaccgcattgtggaggtgctgggcatcccaccggccgccatgctggaccaggcgcccaaggctcgcaagtactttgaacggctgcctgggggtggctggaccctacgaaggacgaaagaactcaggaaggattaccagggccccgggacacggcggctgcaggaggtgctgggcgtgcagacgggcgggcccgggggccggcgggcgggggagccgggccacagccccgccgactacctccgcttccaggacctggtgctgcgcatgctggagtatgagcccgccgcccgcatcagccccctgggggctctgcagcacggcttcttccgccgcacggccgacgaggccaccaacacgggcccggcaggcagcagtgcctccacctcgcccgcgcccctcgacacctgcccctcttccagcaccgccagctccatctccagttctggaggctccagtggctcctccagtgacaaccggacctaccgctacagcaaccgatattgtgggggccctgggccccctatcacagactgtgagatgaacagcccccaggtcccaccctcccagccgctgcggccctgggcagggggtgatgtgccccacaagacacatcaagcccctgcctctgcctcgtcactgcctgggaccggggcccagttacccccccagccccgataccttggtcgtcccccatcaccaacctcaccaccacccccggagctgatggatgtgagcctggtgggcggccctgctgactgctccccacctcacccagcgcctgccccccagcacccggctgcctcagccctccggactcggatgactggaggtcgtccacccctcccgcctcctgatgaccctgccactctggggcctcacctgggcctccgtggtgtaccccagagcacagcagccagctcgtgaccctgccccctccctggggcccctcctgaagccataccctcccccatctgggggccctgggctcccatcctcatctctctccttgactggaattgctgctacccagctggggtgggtgaggcctgcactgattggggcctggggcaggggggtcaaggagagggttttggccgctccctccccactaaggactggacccttgggcccctctccccctttttttctatttattgtaccaaagacagtggtggtccggtggagggaagaccccccctcaccccaggaccctaggagggggtgggggcaggtagggggagatggccttgctcctcctcgctgtacccccagtaaagagctttctcaca

SEQ ID NO: 6108 - DNA, 2535 bp, Homo sapiens
  source 1..2535: mol_type = unassigned DNA; mol_type = unassigned DNA
gggatgggggcggagtccagggcgtgggggggccggtttgttgtggtcgccattttgctggttgcattactgggtaatcggggccctggcttgccgcgtccgccggataccctcagccagtgggcaggtctgagctcgggctccccgagcagtttgagtccccttgcccgctccttcaggtctcagcggcggtggcagccgaggtgcaggatgcaagaaggcgccccccggccgggctcccgctccaggcctcgctcccctgcggccctctgagcccaccatggccgtcccaccgggccatggtcccttctctggcttcccagggccccaggagcacacgcaggtattgcctgatgtgcggctactgcctcggaggctgcccctggccttccgggatgcaacctcagccccgctgcgtaagctctctgtggacctcatcaagacctacaagcacatcaatgaggtatactatgcgaagaagaagcggcgggcccagcaggcgccaccccaggattcgagcaacaagaaggagaagaaggtcctgaaccatggttatgatgacgacaaccatgactacatcgtgcgcagtggcgagcgctggctggagcgctacgaaattgactcgctcattggcaaaggctcctttggccaggtggtgaaagcctatgatcatcagacccaggagcttgtggccatcaagatcatcaagaacaaaaaggctttcctgaaccaggcccagattgagctgcggctgctggagctgatgaaccagcatgacacggagatgaagtactatatagtacacctgaagcggcacttcatgttccggaaccacctgtgcctggtatttgagctgctgtcctacaacctgtacgacctcctgcgcaacacccacttccgcggcgtctcgctgaacctgacccggaagctggcgcagcagctctgcacggcactgctctttctggccacgcctgagctcagcatcattcactgcgacctcaagcccgaaaacatcttgctgtgcaaccccaagcgcagcgccatcaagattgtggacttcggcagctcctgccagcttggccagaggatctaccagtatatccagagccgcttctaccgctcacctgaggtgctcctgggcacaccctacgacctggccattgacatgtggtccctgggctgcatccttgtggagatgcacaccggagagcccctcttcagtggctccaatgaggtcgaccagatgaaccgcattgtggaggtgctgggcatcccaccggccgccatgctggaccaggcgcccaaggctcgcaagtactttgaacggctgcctgggggtggctggaccctacgaaggacgaaagaactcaggaaggattaccagggccccgggacacggcggctgcaggaggtgctgggcgtgcagacgggcgggcccgggggccggcgggcgggggagccgggccacagccccgccgactacctccgcttccaggacctggtgctgcgcatgctggagtatgagcccgccgcccgcatcagccccctgggggctctgcagcacggcttcttccgccgcacggccgacgaggccaccaacacgggcccggcaggcagcagtgcctccacctcgcccgcgcccctcgacacctgcccctcttccagcaccgccagctccatctccagttctggaggctccagtggctcctccagtgacaaccggacctaccgctacagcaaccgatattgtgggggccctgggccccctatcacagactgtgagatgaacagcccccaggtcccaccctcccagccgctgcggccctgggcagggggtgatgtgccccacaagacacatcaagcccctgcctctgcctcgtcactgcctgggaccggggcccagttacccccccagccccgataccttggtcgtcccccatcaccaacctcaccaccacccccggagctgatggatgtgagcctggtgggcggccctgctgactgctccccacctcacccagcgcctgccccccagcacccggctgcctcagccctccggactcggatgactggaggtcgtccacccctcccgcctcctgatgaccctgccactctggggcctcacctgggcctccgtggtgtaccccagagcacagcagccagctcgtgaccctgccccctccctggggcccctcctgaagccataccctcccccatctgggggccctgggctcccatcctcatctctctccttgactggaattgctgctacccagctggggtgggtgaggcctgcactgattggggcctggggcaggggggtcaaggagagggttttggccgctccctccccactaaggactggacccttgggcccctctccccctttttttctatttattgtaccaaagacagtggtggtccggtggagggaagaccccccctcaccccaggaccctaggagggggtgggggcaggtagggggagatggccttgctcctcctcgctgtacccccagtaaagagctttctcaca

SEQ ID NO: 6109 - DNA, 1806 bp, Homo sapiens
  source 1..1806: mol_type = unassigned DNA; mol_type = unassigned DNA
atggccgtcccaccgggccatggtcccttctctggcttcccagggccccaggagcacacgcaggtattgcctgatgtgcggctactgcctcggaggctgcccctggccttccgggatgcaacctcagccccgctgcgtaagctctctgtggacctcatcaagacctacaagcacatcaatgaggtatactatgcgaagaagaagcggcgggcccagcaggcgccaccccaggattcgagcaacaagaaggagaagaaggtcctgaaccatggttatgatgacgacaaccatgactacatcgtgcgcagtggcgagcgctggctggagcgctacgaaattgactcgctcattggcaaaggctcctttggccaggtggtgaaagcctatgatcatcagacccaggagcttgtggccatcaagatcatcaagaacaaaaaggctttcctgaaccaggcccagattgagctgcggctgctggagctgatgaaccagcatgacacggagatgaagtactatatagtacacctgaagcggcacttcatgttccggaaccacctgtgcctggtatttgagctgctgtcctacaacctgtacgacctcctgcgcaacacccacttccgcggcgtctcgctgaacctgacccggaagctggcgcagcagctctgcacggcactgctctttctggccacgcctgagctcagcatcattcactgcgacctcaagcccgaaaacatcttgctgtgcaaccccaagcgcagcgccatcaagattgtggacttcggcagctcctgccagcttggccagaggatctaccagtatatccagagccgcttctaccgctcacctgaggtgctcctgggcacaccctacgacctggccattgacatgtggtccctgggctgcatccttgtggagatgcacaccggagagcccctcttcagtggctccaatgaggtcgaccagatgaaccgcattgtggaggtgctgggcatcccaccggccgccatgctggaccaggcgcccaaggctcgcaagtactttgaacggctgcctgggggtggctggaccctacgaaggacgaaagaactcaggaaggattaccagggccccgggacacggcggctgcaggaggacctggtgctgcgcatgctggagtatgagcccgccgcccgcatcagccccctgggggctctgcagcacggcttcttccgccgcacggccgacgaggccaccaacacgggcccggcaggcagcagtgcctccacctcgcccgcgcccctcgacacctgcccctcttccagcaccgccagctccatctccagttctggaggctccagtggctcctccagtgacaaccggacctaccgctacagcaaccgatattgtgggggccctgggccccctatcacagactgtgagatgaacagcccccaggtcccaccctcccagccgctgcggccctgggcagggggtgatgtgccccacaagacacatcaagcccctgcctctgcctcgtcactgcctgggaccggggcccagttacccccccagccccgataccttggtcgtcccccatcaccaacctcaccaccacccccggagctgatggatgtgagcctggtgggcggccctgctgactgctccccacctcacccagcgcctgccccccagcacccggctgcctcagccctccggactcggatgactggaggtcgtccacccctcccgcctcctgatgaccctgccactctggggcctcacctgggcctccgtggtgtaccccagagcacagcagccagctcgtga

SEQ ID NO: 6110 - DNA, 2007 bp, Homo sapiens
  source 1..2007: mol_type = unassigned DNA; mol_type = unassigned DNA
tggtcgccattttgctggttgcattactgggtaatcggggccctggcttgccgcgtccgccggataccctcagccagtgggcaggtctgagctcgggctccccgagcagtttgagtccccttgcccgctccttcaggtctcagcggcggtggcagccgaggtgcaggatgcaagaaggcgccccccggccgggctcccgctccaggcctcgctcccctgcggccctctgagcccaccatggccgtcccaccgggccatggtcccttctctggcttcccagggccccaggagcacacgcaggtattgcctgatgtgcggctactgcctcggaggctgcccctggccttccgggatgcaacctcagccccgctgcgtaagctctctgtggacctcatcaagacctacaagcacatcaatgaggtatactatgcgaagaagaagcggcgggcccagcaggcgccaccccaggattcgagcaacaagaaggagaagaaggtcctgaaccatggttatgatgacgacaaccatgactacatcgtgcgcagtggcgagcgctggctggagcgctacgaaattgactcgctcattggcaaaggctcctttggccaggtggtgaaagcctatgatcatcagacccaggagcttgtggccatcaagatcatcaagaacaaaaaggctttcctgaaccaggcccagattgagctgcggctgctggagctgatgaaccagcatgacacggagatgaagtactatatagtacacctgaagcggcacttcatgttccggaaccacctgtgcctggtatttgagctgctgtcctacaacctgtacgacctcctgcgcaacacccacttccgcggcgtctcgctgaacctgacccggaagctggcgcagcagctctgcacggcactgctctttctggccacgcctgagctcagcatcattcactgcgacctcaagcccgaaaacatcttgctgtgcaaccccaagcgcagcgccatcaagattgtggacttcggcagctcctgccagcttggccagaggatctaccagtatatccagagccgcttctaccgctcacctgaggtgctcctgggcacaccctacgacctggccattgacatgtggtccctgggctgcatccttgtggagatgcacaccggagagcccctcttcagtggctccaatgaggtcgaccagatgaaccgcattgtggaggtgctgggcatcccaccggccgccatgctggaccaggcgcccaaggctcgcaagtactttgaacggctgcctgggggtggctggaccctacgaaggacgaaagaactcaggaaggacctggtgctgcgcatgctggagtatgagcccgccgcccgcatcagccccctgggggctctgcagcacggcttcttccgccgcacggccgacgaggccaccaacacgggcccggcaggcagcagtgcctccacctcgcccgcgcccctcgacacctgcccctcttccagcaccgccagctccatctccagttctggaggctccagtggctcctccagtgacaaccggacctaccgctacagcaaccgatattgtgggggccctgggccccctatcacagactgtgagatgaacagcccccaggtcccaccctcccagccgctgcggccctgggcagggggtgatgtgccccacaagacacatcaagcccctgcctctgcctcgtcactgcctgggaccggggcccagttacccccccagccccgataccttggtcgtcccccatcaccaacctcaccaccacccccggagctgatggatgtgagcctggtgggcggccctgctgactgctccccacctcacccagcgcctgccccccagcacccggctgcctcagccctccggactcggatgactggaggtcgtccacccctcccgcctcctgatgaccctgccactctggggcctcacctgggcctccgtggtgtaccccagagcacagcagccagctcgtga

SEQ ID NO: 6111 - DNA, 446 bp, Homo sapiens
  source 1..446: mol_type = unassigned DNA; mol_type = unassigned DNA
cagctgcgaagtatgcatagtgttcttggtgggtctccttgcctggagggagaagaatggtgcctggctctgccctgctcccacccctttcttcgtgacatgccctgccccaacaggtggtgaaagcctatgatcatcagacccaggagcttgtggccatcaagatcatcaagaacaaaaaggctttcctgaaccaggcccagattgagctgcggctgctggagctgatgaaccagcatgacacggagatgaagtactatatagtacacctgaagcggcacttcatgttccggaaccacctgtgcctggtatttgagctgctgtcctacaacctgtacgacctcctgcgcaacacccacttccgcggcgtctcgctgaacctgacccggaagctggcgcagcagctctgcacggcactgctctttctggccacgcctgagctcagc

SEQ ID NO: 6112 - DNA, 657 bp, Homo sapiens
  source 1..657: mol_type = unassigned DNA; mol_type = unassigned DNA
cgccttccggtctcagcaggcccaggagggcctcctgggtctcagcggcggtggcagccgaggtgcaggatgcaagaaggcgccccccggccgggctcccgctccaggcctcgctcccctgcggccctctgagcccaccatggccgtcccaccgggccatggtcccttctctggcttcccagggccccaggagcacacgcaggtattgcctgatgtgcggctactgcctcggaggctgcccctggccttccgggatgcaacctcagccccgctgcgtaagctctctgtggacctcatcaagacctacaagcacatcaatgaggtatactatgcgaagaagaagcggcgggcccagcaggcgccaccccaggattcgagcaacaagaaggagaagaaggtcctgaaccatggttatgatgacgacaaccatgactacatcgtgcgcagtggcgagcgctggctggagcgctacgaaattgactcgctcattggcaaaggctcctttggccaggtggtgaaagcctatgatcatcagacccaggagcttgtggccatcaagatcatcaagaacaaaaaggctttcctgaaccaggcccagattgagctgcggctgctggagctgatgaaccagcatgacacggagatgaagtactatat

SEQ ID NO: 6113 - DNA, 772 bp, Homo sapiens
  source 1..772: mol_type = unassigned DNA; mol_type = unassigned DNA
ccattttgctggttgcattactgggtaatcggggccctggcttgccgcgtccgccggataccctcagccagtgggcaggtctgagctcgggctccccgagcagtttgagtccccttgcccgctccttcaggtctcagcggcggtggcagccgaggtgcaggatgcaagaaggcgccccccggccgggctcccgctccaggcctcgctcccctgcggccctctgagcccaccatggccgtcccaccgggccatggtcccttctctggcttcccagggccccaggagcacacgcaggtattgcctgatgtgcggctactgcctcggaggctgcccctggccttccgggatgcaacctcagccccgctgcgtaagctctctgtggacctcatcaagacctacaagcacatcaatgaggtatactatgcgaagaagaagcggcgggcccagcaggcgccaccccaggattcgagcaacaagaaggagaagaaggtcctgaaccatggttatgatgacgacaaccatgactacatcgtgcgcagtggcgagcgctggctggagcgctacgaaattgactcgctcattggcaaaggctcctttggccaggtgtgggacaccccccaccaccctgatccaaggccccactaacattgatcacacacccagtggttcagtggcttcaagtcccatgctgggccactcaccctagcccacttagtttccctgtgcctcagtcgccttttctgtaaaacagtttaaataacaagactcaaca

SEQ ID NO: 6114 - DNA, 2448 bp, Homo sapiens
  source 1..2448: mol_type = unassigned DNA; mol_type = unassigned DNA
gggatgggggcggagtccagggcgtgggggggccggtttgttgtggtcgccattttgctggttgcattactgggtaatcggggccctggcttgccgcgtccgccggataccctcagccagtgggcaggtctgagctcgggctccccgagcagtttgagtccccttgcccgctccttcaggtctcagcggcggtggcagccgaggtgcaggatgcaagaaggcgccccccggccgggctcccgctccaggcctcgctcccctgcggccctctgagcccaccatggccgtcccaccgggccatggtcccttctctggcttcccagggccccaggagcacacgcaggtattgcctgatgtgcggctactgcctcggaggctgcccctggccttccgggatgcaacctcagccccgctgcgtaagctctctgtggacctcatcaagacctacaagcacatcaatgaggtatactatgcgaagaagaagcggcgggcccagcaggcgccaccccaggattcgagcaacaagaaggagaagaaggtcctgaaccatggttatgatgacgacaaccatgactacatcgtgcgcagtggcgagcgctggctggagcgctacgaaattgactcgctcattggcaaaggctcctttggccaggtggtgaaagcctatgatcatcagacccaggagcttgtggccatcaagatcatcaagaacaaaaaggctttcctgaaccaggcccagattgagctgcggctgctggagctgatgaaccagcatgacacggagatgaagtactatatagtacacctgaagcggcacttcatgttccggaaccacctgtgcctggtatttgagctgctgtcctacaacctgtacgacctcctgcgcaacacccacttccgcggcgtctcgctgaacctgacccggaagctggcgcagcagctctgcacggcactgctctttctggccacgcctgagctcagcatcattcactgcgacctcaagcccgaaaacatcttgctgtgcaaccccaagcgcagcgccatcaagattgtggacttcggcagctcctgccagcttggccagaggatctaccagtatatccagagccgcttctaccgctcacctgaggtgctcctgggcacaccctacgacctggccattgacatgtggtccctgggctgcatccttgtggagatgcacaccggagagcccctcttcagtggctccaatgaggtcgaccagatgaaccgcattgtggaggtgctgggcatcccaccggccgccatgctggaccaggcgcccaaggctcgcaagtactttgaacggctgcctgggggtggctggaccctacgaaggacgaaagaactcaggaaggattaccagggccccgggacacggcggctgcaggaggacctggtgctgcgcatgctggagtatgagcccgccgcccgcatcagccccctgggggctctgcagcacggcttcttccgccgcacggccgacgaggccaccaacacgggcccggcaggcagcagtgcctccacctcgcccgcgcccctcgacacctgcccctcttccagcaccgccagctccatctccagttctggaggctccagtggctcctccagtgacaaccggacctaccgctacagcaaccgatattgtgggggccctgggccccctatcacagactgtgagatgaacagcccccaggtcccaccctcccagccgctgcggccctgggcagggggtgatgtgccccacaagacacatcaagcccctgcctctgcctcgtcactgcctgggaccggggcccagttacccccccagccccgataccttggtcgtcccccatcaccaacctcaccaccacccccggagctgatggatgtgagcctggtgggcggccctgctgactgctccccacctcacccagcgcctgccccccagcacccggctgcctcagccctccggactcggatgactggaggtcgtccacccctcccgcctcctgatgaccctgccactctggggcctcacctgggcctccgtggtgtaccccagagcacagcagccagctcgtgaccctgccccctccctggggcccctcctgaagccataccctcccccatctgggggccctgggctcccatcctcatctctctccttgactggaattgctgctacccagctggggtgggtgaggcctgcactgattggggcctggggcaggggggtcaaggagagggttttggccgctccctccccactaaggactggacccttgggcccctctccccctttttttctatttattgtaccaaagacagtggtggtccggtggagggaagaccccccctcaccccaggaccctaggagggggtgggggcaggtagggggagatggccttgctcctcctcgctgtacccccagtaaagagctttctc

SEQ ID NO: 6115 - DNA, 2724 bp, Homo sapiens; identical to SEQ ID NO: 6107
  source 1..2724: mol_type = unassigned DNA; mol_type = unassigned DNA

SEQ ID NO: 6116 - DNA, 2535 bp, Homo sapiens; identical to SEQ ID NO: 6108
  source 1..2535: mol_type = unassigned DNA; mol_type = unassigned DNA

SEQ ID NO: 6117 - DNA, 2448 bp, Homo sapiens; identical to SEQ ID NO: 6114
  source 1..2448: mol_type = unassigned DNA; mol_type = unassigned DNA

SEQ ID NO: 6118 - DNA, 1806 bp, Homo sapiens; identical to SEQ ID NO: 6109
  source 1..1806: mol_type = unassigned DNA; mol_type = unassigned DNA

SEQ ID NO: 6119 - DNA, 2007 bp, Homo sapiens; identical to SEQ ID NO: 6110
  source 1..2007: mol_type = unassigned DNA; mol_type = unassigned DNA

SEQ ID NO: 6120 - DNA, 446 bp, Homo sapiens; identical to SEQ ID NO: 6111
  source 1..446: mol_type = unassigned DNA; mol_type = unassigned DNA

SEQ ID NO: 6121 - DNA, 657 bp, Homo sapiens; identical to SEQ ID NO: 6112
  source 1..657: mol_type = unassigned DNA; mol_type = unassigned DNA

SEQ ID NO: 6122 - DNA, 772 bp, Homo sapiens; identical to SEQ ID NO: 6113
  source 1..772: mol_type = unassigned DNA; mol_type = unassigned DNA

SEQ ID NO: 6123 - DNA, 2068 bp, Homo sapiens
  source 1..2068: mol_type = unassigned DNA; mol_type = unassigned DNA
tctcacagcctcccgcagcggcgggcggtcagcgccggcctcatgcagctcctcccgccgcctatccgcaccggaacaaagactcaaatggatgctaaaaagccaaggaaatgtgatttgactcccttcctggttttgaaagcaagaaagaaacaaaagttcacctctgcgaaggttggaagtaaactttcggttcagatccagaagccaccttccaatatcaagaactccagaatgacccaagtctttcataagaacaccagtgttacttcactcccctttgtggacaccaaggggaagaagaatacggtaagcttcccacacattagcaagaaagtcctgctgaagtcatccctgctgtatcaggagaatcaagctcacaatcagatgccggcctcagagctcaaggcttcagaaatacctttccaccctagcattaaaacccaggatcccaaggcagaggagaagtcaccaaagaagcaaaaggtgactctgacagcggcagaggccctaaagctttttaagaaccagctgtctccatatgaacaaagtgaaatcctgggctacgcggagctgtggttcctgggtcttgaagccaagaagctcgacacggctcctgagaaatttagcaagacgagttttgatgatgagcatggcttctatctgaaggtcctgcatgatcacattgcctaccgctatgaagttctggagacaatcgggaaggggtcctttggacaggtggccaagtgcttggatcacaaaaacaatgagctggtggccctgaaaatcatcaggaacaagaagaggtttcaccagcaggccctgatggagctgaagatcctggaagctctcagaaagaaggacaaagacaacacctacaatgtggtgcatatgaaggactttttctactttcgcaatcacttctgcatcacctttgagctcctgggaatcaacttgtatgagttgatgaagaataacaactttcaaggcttcagtctgtccatagttcggcgcttcactctctctgttttgaagtgcttgcagatgctttcggtagagaaaatcattcactgtgatctcaagcccgaaaatatagtgctataccaaaagggccaagcctctgttaaagtcattgactttggatcaagctgttatgaacaccagaaagtatacacgtacatccaaagccggttctaccgatccccagaagtgatcctgggccacccctacgacgtggccattgacatgtggagcctgggctgcatcacggcggagttgtacacgggctaccccctgttccccggggagaatgaggtggagcagctggcctgcatcatggaggtgctgggtctgccgccagccggcttcattcagacagcctccaggagacagacattctttgattccaaaggttttcctaaaaatataaccaacaacagggggaaaaaaagatacccagattccaaggacctcacgatggtgctgaaaacctatgacaccagcttcctggactttctcagaaggtgtttggtatgggaaccttctcttcgcatgaccccggaccaggccctcaagcatgcttggattcatcagtctcggaacctcaagccacagcccaggccccagaccctgaggaaatccaattcctttttcccctctgagacaaggaaggacaaggttcaaggctgtcatcactcgagcagaaaagatgagatcaccaaagagactacagagaaaacaaaagatagccccacgaagcatgttcagcattcaggtgatcagcaggactgtctccagcacggagctgacactgttcagctgcctcaactggtagacgctcccaagaagtcagaggcagctgtcggggcggaggtgtccatgacctccccaggacagagcaaaaacttctccctcaagaacacaaacgttttaccccctattgtatgacctttgctgagggtatgtcctgctcctttccaccagtgatttgtattaagacagcacttatattgtacaatacttcagactgttttttttaaatacataaaactttatgttaaaaaactct

SEQ ID NO: 6124 - DNA, 945 bp, Homo sapiens
  source 1..945: mol_type = unassigned DNA; mol_type = unassigned DNA
agcctcccgcagcggcgggcggtcagcgccggcctcatgcagctcctcccgccgcctatccgcaccggaacaaagactcaaatggatgctaaaaagccaaggaaatgtgatttgactcccttcctggttttgaaagcaagaaagaaacaaaagttcacctctgcgaagggccccactctttctgagatctacatggaagagacaaggaggagtcagctgagaaaacaggaaaatcgcctgtgaagtatgactgaggcgggatggtgtgatggaggtgtgcctttccgaaaaggctgggtggcctgaggcctgcagagagtccagttgctatcttccctgaacagtccaggttggaagtaaactttcggttcagatccagaagccaccttccaatatcaagaactccagaatgacccaagtctttcataagaacaccagtgttacttcactcccctttgtggacaccaaggggaagaagaatacggtaagcttcccacacattagcaagaaagtcctgctgaagtcatccctgctgtatcagggaccaaataagataataggtgcgaaggtgccaactgaaagaggcgtcacacacacataagtccatgtgctcctgggcaagtcactttgtcttgttgggagctcaccttcttaagagcagcagtgaaaaactgttcccatctcttcccatagtgagatgttgctggggttgtcagcagcatacggtaaggtacaggggtctccccaggaatagtgtcagtcagacagatgcttcctttgggagagaggtagggagaaccttctgtctcttaatcgctgttttctccctggagaggtaggtaaagagcctggctgaaggtgggtgtctttggttaaataaatggtttatggcccccaggagagtcctaagtagttatttattgcaaacctcttttcctggacagg

SEQ ID NO: 6125 - DNA, 454 bp, Homo sapiens
  source 1..454: mol_type = unassigned DNA; mol_type = unassigned DNA
tcccgcagcggcgggcggtcagcgccggcctcatgcagctcctcccgccgcctatccgcaccggaacaaagactcaaatggatgctaaaaagccaaggaaatgtgatttgactcccttcctggttttgaaagcaagaaagaaacaaaagttcacctctgcgaaggaagagacaaggaggagtcagctgagaaaacaggaaaatcgcctgtgaagtatgactgaggcgggatggtgtgatggaggtgtgcctttccgaaaaggctgggtggcctgaggcctgcagagagtccagttgctatcttccctgaacagtccaggttggaagtaaactttcggttcagatccagaagccaccttccaatatcaagaactccagaatgacccaagtctttcataagaacaccagtgttacttcactcccctttgtggacaccaaggggaagaagaatacgg

SEQ ID NO: 6126 - DNA, 989 bp, Homo sapiens
  source 1..989: mol_type = unassigned DNA; mol_type = unassigned DNA
ggcgggcggtcagcgccggcctcatgcagctcctcccgccgcctatccgcaccggaacaaagcttaagtggagactcggcaaaagcaggaggccatttagtggaaaagttcaaaccgtggaaacaacaaatgaaaatgtcctttgtcttgcttgagcgatttgatcacctacatgtggtcgaatgcaaacggaatccctgcaaaccctgcactgccatactttctgccccaaagacagcccccagggcataaagatcaagctactggcaattgcagtagaaatcctaaaatcataacaggactcaaatggatgctaaaaagccaaggaaatgtgatttgactcccttcctggttttgaaagcaagaaagaaacaaaagttcacctctgcgaaggttggaagtaaactttcggttcagatccagaagccaccttccaatatcaagaactccagaatgacccaagtctttcataagaacaccagtgttacttcactcccctttgtggacaccaaggggaagaagaatacggtaagcttcccacacattagcaagaaagtcctgctgaagtcatccctgctgtatcagggaccaaataagataataggtgcgaaggtgccaactgaaagaggcgtcacacacacataagtccatgtgctcctgggcaagtcactttgtcttgttgggagctcaccttcttaagagcagcagtgaaaaactgttcccatctcttcccatagtgagatgttgctggggttgtcagcagcatacggtaaggtacaggggtctccccaggaatagtgtcagtcagacagatgcttcctttgggagagaggtagggagaaccttctgtctcttaatcgctgttttctccctggagaggtaggtaaagagcctggctgaaggtgggtgtctttggttaaataaatggtttatggcccccaggagagtcctaagtagttatttattgcaaacctcttttcctggacagg

SEQ ID NO: 6127 - DNA, 440 bp, Homo sapiens
  source 1..440: mol_type = unassigned DNA; mol_type = unassigned DNA
gaaaagggacttgcaaaggacacagagcaagcggtttcagctgtactctgctaatgtaacagggaatgactcaaatggatgctaaaaagccaaggaaatgtgatttgactcccttcctggttttgaaagcaagaaagaaacaaaagttcacctctgcgaagggccccactctttctgagatctacatggttggaagtaaactttcggttcagatccagaagccaccttccaatatcaagaactccagaatgacccaagtctttcataagaacaccagtgttacttcactcccctttgtggacaccaaggggaagaagaatacggtaagcttcccacacattagcaagaaagtcctgctgaagtcatccctgctgtatcaggtgagtgcagacggactggaccctgagaaggcaggtgaaagacctggttttagtccaaag

SEQ ID NO: 6128 - DNA, 447 bp, Homo sapiens
  source 1..447: mol_type = unassigned DNA; mol_type = unassigned DNA
gactcaaatggatgctaaaaagccaaggaaatgtgatttgactcccttcctggttttgaaagcaagaaagaaacaaaagttcacctctgcgaagaaaggggcttcctgcaagagacgggcttatcagtgagtgtcacacagtggaagaggatatccgacggtcattcattgtctcatttccatgtctcatcagcacttcctatacgaaaagcaggaacaaaacaaaatcctgatccgaccatttggtgttgggcaaaggaatggaaatcagttcaagctgaagagacagcaaacagcagagatgtgaattgctagttctgtctaggtttttaggttggcacactattatttatggtaatgcattcacctgttaaatgcaaatggaagactcgaactagaagaacttgtaatgatcattgcaagttaacattaaaacgtttaaaatat

SEQ ID NO: 6129 - DNA, 3272 bp, Homo sapiens
  source 1..3272: mol_type = unassigned DNA; mol_type = unassigned DNA
agtgtgagctgttgaaagcctgcagctaaacaccagtgttacttcactcccctttgtggacaccaaggggaagaagaatacggtaagcttcccacacattagcaagaaagtcctgctgaagtcatccctgctgtatcaggagaatcaagctcacaatcagatgccggcctcagagctcaaggcttcagaaatacctttccaccctagcattaaaacccaggatcccaaggcagaggagaagtcaccaaagaagcaaaaggtgactctgacagcggcagaggccctaaagctttttaagaaccagctgtctccatatgaacaaagtgaaatcctgggctacgcggagctgtggttcctgggtcttgaagccaagaagctcgacacggctcctgagaaatttagcaagacgagttttgatgatgagcatggcttctatctgaaggtcctgcatgatcacattgcctaccgctatgaagttctggagacaatcgggaaggggtcctttggacaggtggccaagtgcttggatcacaaaaacaatgagctggtggccctgaaaatcatcaggaacaagaagaggtttcaccagcaggccctgatggagctgaagatcctggaagctctcagaaagaaggacaaagacaacacctacaatgtggtgcatatgaaggactttttctactttcgcaatcacttctgcatcacctttgagctcctgggaatcaacttgtatgagttgatgaagaataacaactttcaaggcttcagtctgtccatagttcggcgcttcactctctctgttttgaagtgcttgcagatgctttcggtagagaaaatcattcactgtgatctcaagcccgaaaatatagtgctataccaaaagggccaagcctctgttaaagtcattgactttggatcaagctgttatgaacaccagaaagtatacacgtacatccaaagccggttctaccgatccccagaagtgatcctgggccacccctacgacgtggccattgacatgtggagcctgggctgcatcacggcggagttgtacacgggctaccccctgttccccggggagaatgaggtggagcagctggcctgcatcatggaggtgctgggtctgccgccagccggcttcattcagacagcctccaggagacagacattctttgattccaaaggttttcctaaaaatataaccaacaacagggggaaaaaaagatacccagattccaaggacctcacgatggtgctgaaaacctatgacaccagcttcctggactttctcagaaggtgtttggtatgggaaccttctcttcgcatgaccccggaccaggccctcaagcatgcttggattcatcagtctcggaacctcaagccacagcccaggccccagaccctgaggaaatccaattcctttttcccctctgagacaaggaaggacaaggttcaaggctgtcatcactcgagcagaaaagcagatgagatcaccaaagagactacagagaaaacaaaagatagccccacgaagcatgttcagcattcaggtgatcagcaggactgtctccagcacggagctgacactgttcagctgcctcaactggtagacgctcccaagaagtcagaggcagctgtcggggcggaggtgtccatgacctccccaggacagagcaaaaacttctccctcaagaacacaaacgttttaccccctattgtatgacctttgctgagggtatgtcctgctcctttccaccagtgatttgtattaagacagcacttatattgtacaatacttcagactgttttttttaaatacataaaactttatgttaaaaaactctattaacatggccaattggcatgactcctcttatgagggatgggggaggatgtccttgcacttaaactcattccatatgcatctgtgtgtgtagagggggcgggtagttttgaactctcagtgttacagcatcattaatggaactccaaacaaaagaaattttttttcttcttgcccatgactgccaacctatgtcaggatttttgtttgaaaatgatagaagctgaattcaaaagcagtttaaacaacggaagacacttattgacttacataattggggcatcagaaaaggtagatgtagtttcaggcgcagcaggatccaggaattcaaatgaggttgtagggctcagactccctcttcatctattagccttgcttctcactatggttaacttcatcctgatgtcaggccctgctcagaagttaaccgccaacatccagtcaaaaagatacaggcttccttgctaacagggagtctccaaaatgattgtgacacagaaattgtgactgggatactgggatgcttggccagtctgggccccaagcccacagtgatggtgaaggcactgtgactgatgcttctctagactagagcaagggatggaaggtttcccaaaggaagggaagctaagtaaacaagcaggacatgttcactcatctaccatacgccaaatctaagtatgtcttcttacttccctttctaatcctcatctacacaaatacataatttttatgtggttgtcataggacagatagaattttacgtgaaacttaagatcataacatcagaaacaacatagagtatataaaaatagttttcttttttgcttgccatttggaataacctccccccagtacagttttcattttaattgttgcataatattttatgaagggggacaccaggtcattgaagcaatggatttggatgtaatctcccaggaaaaatcttgagttagaatagcagagggttgagagaaagtcccaggaaagacaaatatataaggagttgccagagttgaggaggtcctccaagagacccagagatacagaaagaaaattagaagccaatggagaagtttctagacagaaagaggagtcaagatagaaaattccacagaaaatccagggtaagaacagaaaatatttcttaagtggggtgatatggacattaagtcagagcagtgttagaacaggtaacttatcccagtttctatagccagaaagccacaaaaccagcaatagaactcagatccttgggaacattcttgaaacgatcttcaaccatggatgaagttggaggtggacactgttctgcagctctacagagaataagaagccaggtcttcaacattgtaatcaggatgattttgattgaataattcaaaagtatcttctgattttcatggttataaaaggttaaaatgaa

SEQ ID NO: 6130 - DNA, 1519 bp, Homo sapiens
  source 1..1519: mol_type = unassigned DNA; mol_type = unassigned DNA
gcagctagtaagtagtagagcagggactcaaacccagagcccatgtgtttgttgactctgctgctctggaatctgcatttcttgccaagaactttaagaataggtttagaacaccagtgttacttcactcccctttgtggacaccaaggggaagaagaatacggtaagcttcccacacattagcaagaaagtcctgctgaagtcatccctgctgtatcaggtgagtgcagacggactggaccctgagaaggcaggtgaaagacctggttttagtccaaagccagttttagaaaggcccaggatagtggggaaaagcacagtagctgctgaagaggagaatcaagctcacaatcagatgccggcctcagagctcaaggcttcagaaatacctttccaccctagcattaaaacccaggatcccaaggcagaggagaagtcaccaaagaagcaaaaggtgactctgacagcggcagaggccctaaagctttttaagaaccagctgtctccatatgaacaaagtgaaatcctgggctacgcggagctgtggttcctgggtcttgaagccaagaagctcgacacggctcctgagaaatttagcaagacgagttttgatgatgagcatggcttctatctgaaggtcctgcatgatcacattgcctaccgctatgaagttctggagacaatcgggaaggggtcctttggacaggtggccaagtgcttggatcacaaaaacaatgagctggtggccctgaaaatcatcaggaacaagaagaggtgtggcttggggatgacataggccacagaggagggactgcgtgactgtggcccctgcagaatgccagcccttcctgactgtgcctctccctccaatcttcccttttgtcttcccttttctctttctacccgtctgattccatgagggggcaaagaggaggtttcaccagcaggccctgatggagctgaagatcctggaagctctcagaaagaaggacaaagacaacacctacaatgtggtgcatatgaaggactttttctactttcgcaatcacttctgcatcacctttgagctcctggggtcagctgccttttcttcttaactcattttctctggaaaagttacctaagtgatagtttttgaggtcagaacactagatttctctggatgtgaatatttagtaactagaatggacatgacagtcactcagttatccagaatgcccaggagcaaggaggttgggatgaaagcaggccatcttggtatgcctgtcacctgccagcatacccatgatgtacttccctggtgctgggtactgagccaggtgacatgaccaaaacaaggcctctttccttaagagctaaactgaaatagtcaaaaaggacatttctttgtttgcagtcattttccccactcattggctttctggcctggtcgtgcagaggctgaaacccaaaggaacaggcagctggctgctcagagtgggaaatgggttttgattttgagtaaataaggacaagagca

SEQ ID NO: 6131 - DNA, 985 bp, Homo sapiens
  source 1..985: mol_type = unassigned DNA; mol_type = unassigned DNA
agctagtaagtagtagagcagggactcaaacccagagcccatgtgtttgttgactctgctgctctggaatctgcatttcttgccaagaactttaagaatagaacaccagtgttacttcactcccctttgtggacaccaaggggaagaagaatacggtaagcttcccacacattagcaagaaagtcctgctgaagtcatccctgctgtatcaggtgagtgcagacggactggaccctgagaaggcaggtgaaagacctggttttagtccaaagccagttttagaaaggcccaggatagtggggaaaagcacagtagctgctgaagaggagaatcaagctcacaatcagatgccggcctcagagctcaaggcttcagaaatacctttccaccctagcattaaaacccaggatcccaaggcagaggagaagtcaccaaagaagcaaaaggtgactctgacagcggcaggtatgcctttggggcagtagcagggtggggaggtgcttatggaaggtcggggtgttaagagctaagctgcgctggagtgagctaagctgccaggtgtcagagtagtcaaagaaggcagccagccaagaggaaagtagaagttaagcgttgaacctctgactgtggtagtataagcaagaggctgaataggaggctgaatttcccccaaggagtggctctgggcaagggcgggatgtaccaatgcagacagaaggaagtgtctcatttgcctaaggagcccagacacaaggctcctgtcattttatggacccaggggccagcgggaaggcactgagagagtggaagagccaggagtggaaaggtactgaatactgagagcagagcaaagggtgctgaagcttgctccttcctcttgataaggaggtgttggagaggagcctctgtagggggatcttgattagaaatgcagacatgtagaagagcatggccagccaggggtctcagtccttggctgtagctt

SEQ ID NO: 6132 - DNA, 415 bp, Homo sapiens
  source 1..415: mol_type = unassigned DNA; mol_type = unassigned DNA
ctttgtggacaccaaggggaagaagaatacggtaagcttcccacacattagcaagaaagtcctgctgaagtcatccctgctgtatcaggagaatcaagctcacaatcagatgccggcctcagagctcaaggcttcagaaatacctttccaccctagcattaaaacccaggatcccaaggcagaggagaagtcaccaaagaagcaaaaggtgactctgacagcggcaggtccttcctgatccagctgcagatttgagcgtgaagcctcctgggcctttaatgttgcctttatgttacctgtctggccctgcagacattacagttctcaaagcctctcaagacggactaattatagcttaattccacgttaacttgggcaacttgccacctaaactatatactattgtcgacactaa

SEQ ID NO: 6133 - DNA, 400 bp, Homo sapiens
  source 1..400: mol_type = unassigned DNA; mol_type = unassigned DNA
tgaaggatgaggagcatttaggtaagtagagggcctagggccgcattactgtagcttgacatatgtcttttcttctctctaggaaaatatagtgctataccaaaagggccaagcctctgttaaagtcattgactttggatcaagctgttatgaacaccagaaagtatacacgtacatccaaagccggttctaccgatccccagaagtgatcctgggccacccctacgacgtggccattgacatgtggagcctgggctgcatcacggcggagttgtacacgggctaccccctgttccccggggagaatgaggtggagcagctggcctgcatcatggaggtgctgggtctgccgccagccggcttcattcagacagcctccaggagacagacattctttggt

SEQ ID NO: 6134 - DNA, 855 bp, Homo sapiens
  source 1..855: mol_type = unassigned DNA; mol_type = unassigned DNA
ttactttgcctccgcagtatacacgtacatccaaagccggttctaccgatccccagaagtgatcctgggccacccctacgacgtggccattgacatgtggagcctgggctgcatcacggcggagttgtacacgggctaccccctgttccccggggagaatgaggtggagcagctggcctgcatcatggagattccaaaggttttcctaaaaatataaccaacaacagggggaaaaaaagatacccagattccaaggacctcacgatggtgctgaaaacctatgacaccagcttcctggactttctcagaaggtgtttggtatgggaaccttctcttcgcatgaccccggaccaggccctcaagcatgcttggattcatcagtctcggaacctcaagccacagcccaggccccagaccctgaggaaatccaattcctttttcccctctgagacaaggaaggacaaggttcaaggctgtcatcactcgagcagaaaagatgagatcaccaaagagactacagagaaaacaaaagatagccccacgaagcatgttcagcattcaggtgatcagcaggactgtctccagcacggagctgacactgttcagctgcctcaactggtagacgctcccaagaagtcagaggcagctgtcggggcggaggtgtccatgacctccccaggacagagcaaaaacttctccctcaagaacacaaacgttttaccccctattgtatgacctttgctgagggtatgtcctgctcctttccaccagtgatttgtattaagacagcacttatattgtacaatacttcagactgttttttttaaatacataaaactttatgttaaaaaactc

SEQ ID NO: 6135 - DNA, 560 bp, Homo sapiens
  source 1..560: mol_type = unassigned DNA; mol_type = unassigned DNA
gatcctgggccacccctacgacgtggccattgacatgtggagcctgggctgcatcacggcggagttgtacacgggctaccccctgttccccggggagaatgaggtggagcagctggcctgcatcatggaggtgctgggtctgccgccagccggcttcattcagacagcctccaggagacagacattctttgattccaaaggttttcctaaaaatataaccaacaacagggggaaaaaaagatacccagattccaaggacctcacgatggtgctgaaaacctatgacaccagcttcctggactttctcagaaggtgtttggtgtgagtttgttgggacatctctgcttctgggtttcctcttaaatgctgtactttgacacacgtttgctggtgaaagactaaggctgggagatagttataaaagtaacaagaaatgctaacaatagagctttaaagtctacaaattgcttccacatctgttgtttcatcagacatctctccctactgtgtggttgtcagggcagatgatttgctctgttttgcacgtatggaggttgggg

SEQ ID NO: 6136 - DNA, 587 bp, Homo sapiens
  source 1..587: mol_type = unassigned DNA; mol_type = unassigned DNA
aaaaaatcaatttttaaagtaaattgcattccttgggtaatctacacatggttatttcaaactgagtgtgtgtgtgtgtgtttattggggtgtggcatgaggcgagtgtgtaagacagagagcaaaagagctacagaggccactctaagcagcagcatcatgtgaccactaaagatttacacctgaaactaaatacagaatgttctatctctacagattccaaaggttttcctaaaaatataaccaacaacagggggaaaaaaagatacccagattccaaggacctcacgatggtgctgaaaacctatgacaccagcttcctggactttctcagaaggtgtttggtatgggaaccttctcttcgcatgaccccggaccaggccctcaagcatgcttggattcatcagtctcggaacctcaagccacagcccaggccccagaccctgaggaaatccaattcctttttcccctctgagacaaggaaggacaaggttcaaggctgtcatcactcgagcagaaaagcagatgagatcaccaaagagactacagagaaaacaaaagatagccccacgaagcatgttcagcat

SEQ ID NO: 6137 - DNA, 470 bp, Homo sapiens
  source 1..470: mol_type = unassigned DNA; mol_type = unassigned DNA
ttccaaaggttttcctaaaaatataaccaacaacagggggaaaaaaagatacccagattccaaggacctcacgatggtgctgaaaacctatgacaccagcttcctggactttctcagaaggtgtttggtatgggaaccttctcttcgcatgaccccggaccaggccctcaagcatgcttggattcatcagtctcggaacctcaagccacagcccaggccccagaccctgaggaaatccaattcctttttcccctctgagacaaggaaggacaaggttcaaggctgtcatcactcgagcagaaaaggtacagcctgtcaaataaccagtcctagtcccacagtccgggaattaatattctagaattctgtaaatctccttgtgatatttttgaagccccagttctgtagtctggaaattaaaatctttgtttttaatattctgtttaatatgctgtttaagcatttctgaa

SEQ ID NO: 6138 - DNA, 514 bp, Homo sapiens
  source 1..514: mol_type = unassigned DNA; mol_type = unassigned DNA
ccatgtggggctttgttggggtgcagatgggaaccttctcttcgcatgaccccggaccaggccctcaagcatgcttggattcatcagtctcggaacctcaagccacagcccaggccccagaccctgaggaaatccaattcctttttcccctctgagacaaggaaggacaaggttcaaggctgtcatcactcgagcagaaaagcagatgagatcaccaaagagactacagagaaaacaaaagatagccccacgaagcatgttcagcattcaggtgatcagcaggactgtctccagcacggagctgacactgttcagctgcctcaactggtagacgctcccaagaagtcagaggcagctgtcggggcggaggtgtccatgacctccccaggacagagcaaaaacttctccctcaagaacacaaacgttttaccccctattgtatgacctttgctgagggtatgtcctgctcctttccaccagtgatttgtattaagacagcacttatattgtacaa

SEQ ID NO: 6139 - DNA, 1840 bp, Homo sapiens
  source 1..1840: mol_type = unassigned DNA; mol_type = unassigned DNA
ccttctacagaacaccagtgttacttcactcccctttgtggacaccaaggggaagaagaatacggtaagcttcccacacattagcaagaaagtcctgctgaagtcatccctgctgtatcaggagaatcaagctcacaatcagatgccggcctcagagctcaaggcttcagaaatacctttccaccctagcattaaaacccaggatcccaaggcagaggagaagtcaccaaagaagcaaaaggtgactctgacagcggcagaggccctaaagctttttaagaaccagctgtctccatatgaacaaagtgaaatcctgggctacgcggagctgtggttcctgggtcttgaagccaagaagctcgacacggctcctgagaaatttagcaagacgagttttgatgatgagcatggcttctatctgaaggtcctgcatgatcacattgcctaccgctatgaagttctggagacaatcgggaaggggtcctttggacaggtggccaagtgcttggatcacaaaaacaatgagctggtggccctgaaaatcatcaggaacaagaagaggtttcaccagcaggccctgatggagctgaagatcctggaagctctcagaaagaaggacaaagacaacacctacaatgtggtgcatatgaaggactttttctactttcgcaatcacttctgcatcacctttgagctcctgggaatcaacttgtatgagttgatgaagaataacaactttcaaggcttcagtctgtccatagttcggcgcttcactctctctgttttgaagtgcttgcagatgctttcggtagagaaaatcattcactgtgatctcaagcccgaaaatatagtgctataccaaaagggccaagcctctgttaaagtcattgactttggatcaagctgttatgaacaccagaaagtatacacgtacatccaaagccggttctaccgatccccagaagtgatcctgggccacccctacgacgtggccattgacatgtggagcctgggctgcatcacggcggagttgtacacgggctaccccctgttccccggggagaatgaggtggagcagctggcctgcatcatggaggtgctgggtctgccgccagccggcttcattcagacagcctccaggagacagacattctttgattccaaaggttttcctaaaaatataaccaacaacagggggaaaaaaagatacccagattccaaggacctcacgatggtgctgaaaacctatgacaccagcttcctggactttctcagaaggtgtttggtatgggaaccttctcttcgcatgaccccggaccaggccctcaagcatgcttggattcatcagtctcggaacctcaagccacagcccaggccccagaccctgaggaaatccaattcctttttcccctctgagacaaggaaggacaaggttcaaggctgtcatcactcgagcagaaaagcagatgagatcaccaaagagactacagagaaaacaaaagatagccccacgaagcatgttcagcattcaggtgatcagcaggactgtctccagcacggagctgacactgttcagctgcctcaactggtagacgctcccaagaagtcagaggcagctgtcggggcggaggtgtccatgacctccccaggacagagcaaaaacttctccctcaagaacacaaacgttttaccccctattgtatgacctttgctgagggtatgtcctgctcctttccaccagtgatttgtattaagacagcacttatattgtacaatacttcagactgttttttttaaatacataaaactttatgttaaaaaactctattaacatggccaa

SEQ ID NO: 6140 - DNA, 6727 bp, Homo sapiens
  source 1..6727: mol_type = unassigned DNA; mol_type = unassigned DNA
gggtggaagatgagcagaagcccctgttctcggaacgccggctgacaagcggggtgagcgcagccggggcggggacccagcctagcccactggagcagccgggggtggcccgttcccctttaagagcaactgctctaagccaggagccagagattcgagccggcctcgcccagccagccctctccagcgaggggacccacaagcggcgcctcggccctcccgacctttccgagccctctttgcgccctgggcgcacggggccctacacgcgccaagcatgctgagggtcttcatcctctatgccgagaacgtccacacacccgacaccgacatcagcgatgcctactgctccgcggtgtttgcaggggtgaagaagagaaccaaagtcatcaagaacagcgtgaaccctgtatggaatgagggatttgaatgggacctcaagggcatccccctggaccagggctctgagcttcatgtggtggtcaaagaccatgagacgatggggaggaacaggttcctgggggaagccaaggtcccactccgagaggtcctcgccacccctagtctgtccgccagcttcaatgcccccctgctggacaccaagaagcagcccacaggggcctcgctggtcctgcaggtgtcctacacaccgctgcctggagctgtgcccctgttcccgccccctactcctctggagccctccccgactctgcctgacctggatgtagtggcaggcgggggacagagccgggccgagacttggtccctgctcagtgacagcaccatggacacgagatactctggaaagaagtggccggcccccacggacacaggaggagaggaagacacagaggaccagggactcactggagatgaggcggagccattcctggatcaaagcggaggcccgggggctcccaccaccccaaggaaactaccttcacgtcctccgccccactaccccgggatcaaaagaaagcgaagtgcgcctacatctagaaagctgctgtcagacaaaccgcaggatttccagatcagggtccaggtgatcgaggggcgccagctgccgggggtgaacatcaagcctgtggtcaaggttaccgctgcagggcagaccaagcggacgcggatccacaagggaaacagcccactcttcaatgagactcttttcttcaacttgtttgactctcctggggagctgtttgatgagcccatctttatcacggtggtagactctcgttctctcaggacagatgctctcctcggggagttccggatggacgtgggcaccatttacagagagccccggcacgcctatctcaggaagtggctgctgctctcagaccctgatgacttctctgctggggccagaggctacctgaaaacaagcctttgtgtgctggggcctggggacgaagcgcctctggagagaaaagacccctctgaagacaaggaggacattgaaagcaacctgctccggcccacaggcgtagccctgcgaggagcccacttctgcctgaaggtcttccgggccgaggacttgccgcagatggacgatgccgtgatggacaacgtgaaacagatctttggcttcgagagtaacaagaagaacttggtggacccctttgtggaggtcagctttgcggggaaaatgctgtgcagcaagatcttggagaagacggccaaccctcagtggaaccagaacatcacactgcctgccatgtttccctccatgtgcgaaaaaatgaggattcgtatcatagactgggaccgcctgactcacaatgacatcgtggctaccacctacctgagtatgtcgaaaatctctgcccctggaggagaaatagaagtggatgactacctgggcttcctccccacttttgggccctgctacatcaacctctatggcagtcccagagagttcacaggcttcccagacccctacacagagctcaacacaggcaagggggaaggtgtggcttatcgtggccggcttctgctctccctggagaccaagctggtggagcacagtgaacagaaggtggaggaccttcctgcggatgacatcctccgggtggagaagtaccttaggaggcgcaagtactccctgtttgcggccttctactcagccaccatgctgcaggatgtggatgatgccatccagtttgaggtcagcatcgggaactacgggaacaagttcgacatgacctgcctgccgctggcctccaccactcagtacagccgtgcagtctttgacgggtgccactactactacctaccctggggtaacgtgaaacctgtggtggtgctgtcatcctactgggaggacatcagccatagaatcgagactcagaaccagctgcttgggattgctgaccggctggaagctggcctggagcaggtccacctggccctgaaggcgcagtgctccacggaggacgtggactcgctggtggctcagctgacggatgagctcatcgcaggctgcagccagcctctgggtgacatccatgagacaccctctgccacccacctggaccagtacctgtaccagctgcgcacccatcacctgagccaaatcactgaggctgccctggccctgaagctcggccacagtgagctccctgcagctctggagcaggcggaggactggctcctgcgtctgcgtgccctggcagaggagccccagaacagcctgccggacatcgtcatctggatgctgcagggagacaagcgtgtggcataccagcgggtgcccgcccaccaagtcctcttctcccggcggggtgccaactactgtggcaagaattgtgggaagctacagacaatctttctgaaatatccgatggagaaggtgcctggcgcccggatgccagtgcagatacgggtcaagctgtggtttgggctctcagtggatgagaaggagttcaaccagtttgctgaggggaagctgtctgtctttgctgaaacctatgagaacgagactaagttggcccttgttgggaactggggcacaacgggcctcacctaccccaagttttctgacgtcacgggcaagatcaagctacccaaggacagcttccgcccctcggccggctggacctgggctggagattggttcgtgtgtccggagaagactctgctccatgacatggacgccggtcacctgagcttcgtggaagaggtgtttgagaaccagacccggcttcccggaggccagtggatctacatgagtgacaactacaccgatgtgaacggggagaaggtgcttcccaaggatgacattgagtgcccactgggctggaagtgggaagatgaggaatggtccacagacctcaaccgggctgtcgatgagcaaggctgggagtatagcatcaccatccccccggagcggaagccgaagcactgggtccctgctgagaagatgtactacacacaccgacggcggcgctgggtgcgcctgcgcaggagggatctcagccaaatggaagcactgaaaaggcacaggcaggcggaggcggagggcgagggctgggagtacgcctctctttttggctggaagttccacctcgagtaccgcaagacagatgccttccgccgccgccgctggcgccgtcgcatggagccactggagaagacggggcctgcagctgtgtttgcccttgagggggccctgggcggcgtgatggatgacaagagtgaagattccatgtccgtctccaccttgagcttcggtgtgaacagacccacgatttcctgcatattcgactatgggaaccgctaccatctacgctgctacatgtaccaggcccgggacctggctgcgatggacaaggactctttttctgatccctatgccatcgtctccttcctgcaccagagccagaagacggtggtggtgaagaacacccttaaccccacctgggaccagacgctcatcttctacgagatcgagatctttggcgagccggccacagttgctgagcaaccgcccagcattgtggtggagctgtacgaccatgacacttatggtgcagacgagtttatgggtcgctgcatctgtcaaccgagtctggaacggatgccacggctggcctggttcccactgacgaggggcagccagccgtcgggggagctgctggcctcttttgagctcatccagagagagaagccggccatccaccatattcctggttttgaggtgcaggagacatcaaggatcctggatgagtctgaggacacagacctgccctacccaccaccccagagggaggccaacatctacatggttcctcagaacatcaagccagcgctccagcgtaccgccatcgagatcctggcatggggcctgcggaacatgaagagttaccagctggccaacatctcctcccccagcctcgtggtagagtgtgggggccagacggtgcagtcctgtgtcatcaggaacctccggaagaaccccaactttgacatctgcaccctcttcatggaagtgatgctgcccagggaggagctctactgcccccccatcaccgtcaaggtcatcgataaccgccagtttggccgccggcctgtggtgggccagtgtaccatccgctccctggagagcttcctgtgtgacccctactcggcggagagtccatccccacagggtggcccagacgatgtgagcctactcagtcctggggaagacgtgctcatcgacattgatgacaaggagcccctcatccccatccaggaggaagagttcatcgattggtggagcaaattctttgcctccataggggagagggaaaagtgcggctcctacctggagaaggattttgacaccctgaaggtctatgacacacagctggagaatgtggaggcctttgagggcctgtctgacttttgtaacaccttcaagctgtaccggggcaagacgcaggaggagacagaagatccatctgtgattggtgaatttaagggcctcttcaaaatttatcccctcccagaagacccagccatccccatgcccccaagacagttccaccagctggccgcccagggaccccaggagtgcttggtccgtatctacattgtccgagcatttggcctgcagcccaaggaccccaatggaaagtgtgatccttacatcaagatctccatagggaagaaatcagtgagtgaccaggataactacatcccctgcacgctggagcccgtatttggaaagatgttcgagctgacctgcactctgcctctggagaaggacctaaagatcactctctatgactatgacctcctctccaaggacgaaaagatcggtgagacggtcgtcgacctggagaacaggctgctgtccaagtttggggctcgctgtggactcccacagacctactgtgtctctggaccgaaccagtggcgggaccagctccgcccctcccagctcctccacctcttctgccagcagcatagagtcaaggcacctgtgtaccggacagaccgtgtaatgtttcaggataaagaatattccattgaagagatagaggctggcaggatcccaaacccacacctgggcccagtggaggagcgtctggctctgcatgtgcttcagcagcagggcctggtcccggagcacgtggagtcacggcccctctacagccccctgcagccagacatcgagcaggggaagctgcagatgtgggtcgacctatttccgaaggccctggggcggcctggacctcccttcaacatcaccccacggagagccagaaggtttttcctgcgttgtattatctggaataccagagatgtgatcctggatgacctgagcctcacgggggagaagatgagcgacatttatgtgaaaggttggatgattggctttgaagaacacaagcaaaagacagacgtgcattatcgttccctgggaggtgaaggcaacttcaactggaggttcattttccccttcgactacctgccagctgagcaagtctgtaccattgccaagaaggatgccttctggaggctggacaagactgagagcaaaatcccagcacgagtggtgttccagatctgggacaatgacaagttctcctttgatgattttctgggctccctgcagctcgatctcaaccgcatgcccaagccagccaagacagccaagaagtgctccttggaccagctggatgatgctttccacccagaatggtttgtgtccctttttgagcagaaaacagtgaagggctggtggccctgtgtagcagaagagggtgagaagaaaatactggcgggcaagctggaaatgaccttggagattgtagcagagagtgagcatgaggagcggcctgctggccagggccgggatgagcccaacatgaaccctaagcttgaggacccaaggcgccccgacacctccttcctgtggtttacctccccatacaagaccatgaagttcatcctgtggcggcgtttccggtgggccatcatcctcttcatcatcctcttcatcctgctgctgttcctggccatcttcatctacgccttcccgaactatgctgccatgaagctggtgaagcccttcagctgaggactctcctgccctgtagaaggggccgtggggtcccctccagcatgggactggcctgcctcctccgcccagctcggcgagctcctccagacctcctaggcctgattgtcctgccagggtgggcagacagacagatggaccggcccacactcccag

SEQ ID NO: 6141 - DNA, 6790 bp, Homo sapiens
  source 1..6790: mol_type = unassigned DNA; mol_type = unassigned DNA
gggtggaagatgagcagaagcccctgttctcggaacgccggctgacaagcggggtgagcgcagccggggcggggacccagcctagcccactggagcagccgggggtggcccgttcccctttaagagcaactgctctaagccaggagccagagattcgagccggcctcgcccagccagccctctccagcgaggggacccacaagcggcgcctcggccctcccgacctttccgagccctctttgcgccctgggcgcacggggccctacacgcgccaagcatgctgagggtcttcatcctctatgccgagaacgtccacacacccgacaccgacatcagcgatgcctactgctccgcggtgtttgcaggggtgaagaagagaaccaaagtcatcaagaacagcgtgaaccctgtatggaatgagggatttgaatgggacctcaagggcatccccctggaccagggctctgagcttcatgtggtggtcaaagaccatgagacgatggggaggaacaggttcctgggggaagccaaggtcccactccgagaggtcctcgccacccctagtctgtccgccagcttcaatgcccccctgctggacaccaagaagcagcccacaggggcctcgctggtcctgcaggtgtcctacacaccgctgcctggagctgtgcccctgttcccgccccctactcctctggagccctccccgactctgcctgacctggatgtagtggcaggcgggggacagagccgggccgagacttggtccctgctcagtgacagcaccatggacacgagatactctggaaagaagtggccggcccccacggacacaggaggagaggaagacacagaggaccagggactcactggagatgaggcggagccattcctggatcaaagcggaggcccgggggctcccaccaccccaaggaaactaccttcacgtcctccgccccactaccccgggatcaaaagaaagcgaagtgcgcctacatctagaaagctgctgtcagacaaaccgcaggatttccagatcagggtccaggtgatcgaggggcgccagctgccgggggtgaacatcaagcctgtggtcaaggttaccgctgcagggcagaccaagcggacgcggatccacaagggaaacagcccactcttcaatgagactcttttcttcaacttgtttgactctcctggggagctgtttgatgagcccatctttatcacggtggtagactctcgttctctcaggacagatgctctcctcggggagttccggatggacgtgggcaccatttacagagagccccggcacgcctatctcaggaagtggctgctgctctcagaccctgatgacttctctgctggggccagaggctacctgaaaacaagcctttgtgtgctggggcctggggacgaagcgcctctggagagaaaagacccctctgaagacaaggaggacattgaaagcaacctgctccggcccacaggcgtagccctgcgaggagcccacttctgcctgaaggtcttccgggccgaggacttgccgcagatggacgatgccgtgatggacaacgtgaaacagatctttggcttcgagagtaacaagaagaacttggtggacccctttgtggaggtcagctttgcggggaaaatgctgtgcagcaagatcttggagaagacggccaaccctcagtggaaccagaacatcacactgcctgccatgtttccctccatgtgcgaaaaaatgaggattcgtatcatagactgggaccgcctgactcacaatgacatcgtggctaccacctacctgagtatgtcgaaaatctctgcccctggaggagaaatagaagtggatgactacctgggcttcctccccacttttgggccctgctacatcaacctctatggcagtcccagagagttcacaggcttcccagacccctacacagagctcaacacaggcaagggggaaggtgtggcttatcgtggccggcttctgctctccctggagaccaagctggtggagcacagtgaacagaaggtggaggaccttcctgcggatgacatcctccgggtggagaagtaccttaggaggcgcaagtactccctgtttgcggccttctactcagccaccatgctgcaggatgtggatgatgccatccagtttgaggtcagcatcgggaactacgggaacaagttcgacatgacctgcctgccgctggcctccaccactcagtacagccgtgcagtctttgacgggtgccactactactacctaccctggggtaacgtgaaacctgtggtggtgctgtcatcctactgggaggacatcagccatagaatcgagactcagaaccagctgcttgggattgctgaccggctggaagctggcctggagcaggtccacctggccctgaaggcgcagtgctccacggaggacgtggactcgctggtggctcagctgacggatgagctcatcgcaggctgcagccagcctctgggtgacatccatgagacaccctctgccacccacctggaccagtacctgtaccagctgcgcacccatcacctgagccaaatcactgaggctgccctggccctgaagctcggccacagtgagctccctgcagctctggagcaggcggaggactggctcctgcgtctgcgtgccctggcagaggagccccagaacagcctgccggacatcgtcatctggatgctgcagggagacaagcgtgtggcataccagcgggtgcccgcccaccaagtcctcttctcccggcggggtgccaactactgtggcaagaattgtgggaagctacagacaatctttctgaaatatccgatggagaaggtgcctggcgcccggatgccagtgcagatacgggtcaagctgtggtttgggctctcagtggatgagaaggagttcaaccagtttgctgaggggaagctgtctgtctttgctgaaacctatgagaacgagactaagttggcccttgttgggaactggggcacaacgggcctcacctaccccaagttttctgacgtcacgggcaagatcaagctacccaaggacagcttccgcccctcggccggctggacctgggctggagattggttcgtgtgtccggagaagactctgctccatgacatggacgccggtcacctgagcttcgtggaagaggtgtttgagaaccagacccggcttcccggaggccagtggatctacatgagtgacaactacaccgatgtgaacggggagaaggtgcttcccaaggatgacattgagtgcccactgggctggaagtgggaagatgaggaatggtccacagacctcaaccgggctgtcgatgagcaaggctgggagtatagcatcaccatccccccggagcggaagccgaagcactgggtccctgctgagaagatgtactacacacaccgacggcggcgctgggtgcgcctgcgcaggagggatctcagccaaatggaagcactgaaaaggcacaggcaggcggaggcggagggcgagggctgggagtacgcctctctttttggctggaagttccacctcgagtaccgcaagacagatgccttccgccgccgccgctggcgccgtcgcatggagccactggagaagacggggcctgcagctgtgtttgcccttgagggggccctgggcggcgtgatggatgacaagagtgaagattccatgtccgtctccaccttgagcttcggtgtgaacagacccacgatttcctgcatattcgactatgggaaccgctaccatctacgctgctacatgtaccaggcccgggacctggctgcgatggacaaggactctttttctgatccctatgccatcgtctccttcctgcaccagagccagaagacggtggtggtgaagaacacccttaaccccacctgggaccagacgctcatcttctacgagatcgagatctttggcgagccggccacagttgctgagcaaccgcccagcattgtggtggagctgtacgaccatgacacttatggtgcagacgagtttatgggtcgctgcatctgtcaaccgagtctggaacggatgccacggctggcctggttcccactgacgaggggcagccagccgtcgggggagctgctggcctcttttgagctcatccagagagagaagccggccatccaccatattcctggttttgaggtgcaggagacatcaaggatcctggatgagtctgaggacacagacctgccctacccaccaccccagagggaggccaacatctacatggttcctcagaacatcaagccagcgctccagcgtaccgccatcgagatcctggcatggggcctgcggaacatgaagagttaccagctggccaacatctcctcccccagcctcgtggtagagtgtgggggccagacggtgcagtcctgtgtcatcaggaacctccggaagaaccccaactttgacatctgcaccctcttcatggaagtgatgctgcccagggaggagctctactgcccccccatcaccgtcaaggtcatcgataaccgccagtttggccgccggcctgtggtgggccagtgtaccatccgctccctggagagcttcctgtgtgacccctactcggcggagagtccatccccacagggtggcccagacgatgtgagcctactcagtcctggggaagacgtgctcatcgacattgatgacaaggagcccctcatccccatccagcttgcagacggtctgtcgagcttggcccccactaacacggcttctcctccatccagtcctcatgaggaagagttcatcgattggtggagcaaattctttgcctccataggggagagggaaaagtgcggctcctacctggagaaggattttgacaccctgaaggtctatgacacacagctggagaatgtggaggcctttgagggcctgtctgacttttgtaacaccttcaagctgtaccggggcaagacgcaggaggagacagaagatccatctgtgattggtgaatttaagggcctcttcaaaatttatcccctcccagaagacccagccatccccatgcccccaagacagttccaccagctggccgcccagggaccccaggagtgcttggtccgtatctacattgtccgagcatttggcctgcagcccaaggaccccaatggaaagtgtgatccttacatcaagatctccatagggaagaaatcagtgagtgaccaggataactacatcccctgcacgctggagcccgtatttggaaagatgttcgagctgacctgcactctgcctctggagaaggacctaaagatcactctctatgactatgacctcctctccaaggacgaaaagatcggtgagacggtcgtcgacctggagaacaggctgctgtccaagtttggggctcgctgtggactcccacagacctactgtgtctctggaccgaaccagtggcgggaccagctccgcccctcccagctcctccacctcttctgccagcagcatagagtcaaggcacctgtgtaccggacagaccgtgtaatgtttcaggataaagaatattccattgaagagatagaggctggcaggatcccaaacccacacctgggcccagtggaggagcgtctggctctgcatgtgcttcagcagcagggcctggtcccggagcacgtggagtcacggcccctctacagccccctgcagccagacatcgagcaggggaagctgcagatgtgggtcgacctatttccgaaggccctggggcggcctggacctcccttcaacatcaccccacggagagccagaaggtttttcctgcgttgtattatctggaataccagagatgtgatcctggatgacctgagcctcacgggggagaagatgagcgacatttatgtgaaaggttggatgattggctttgaagaacacaagcaaaagacagacgtgcattatcgttccctgggaggtgaaggcaacttcaactggaggttcattttccccttcgactacctgccagctgagcaagtctgtaccattgccaagaaggatgccttctggaggctggacaagactgagagcaaaatcccagcacgagtggtgttccagatctgggacaatgacaagttctcctttgatgattttctgggctccctgcagctcgatctcaaccgcatgcccaagccagccaagacagccaagaagtgctccttggaccagctggatgatgctttccacccagaatggtttgtgtccctttttgagcagaaaacagtgaagggctggtggccctgtgtagcagaagagggtgagaagaaaatactggcgggcaagctggaaatgaccttggagattgtagcagagagtgagcatgaggagcggcctgctggccagggccgggatgagcccaacatgaaccctaagcttgaggacccaaggcgccccgacacctccttcctgtggtttacctccccatacaagaccatgaagttcatcctgtggcggcgtttccggtgggccatcatcctcttcatcatcctcttcatcctgctgctgttcctggccatcttcatctacgccttcccgaactatgctgccatgaagctggtgaagcccttcagctgaggactctcctgccctgtagaaggggccgtggggtcccctccagcatgggactggcctgcctcctccgcccagctcggcgagctcctccagacctcctaggcctgattgtcctgccagggtgggcagacagacagatggaccggcccacactcccag

SEQ ID NO: 6142 - DNA, 6739 bp, Homo sapiens
  source 1..6739: mol_type = unassigned DNA; mol_type = unassigned DNA
gggtggaagatgagcagaagcccctgttctcggaacgccggctgacaagcggggtgagcgcagccggggcggggacccagcctagcccactggagcagccgggggtggcccgttcccctttaagagcaactgctctaagccaggagccagagattcgagccggcctcgcccagccagccctctccagcgaggggacccacaagcggcgcctcggccctcccgacctttccgagccctctttgcgccctgggcgcacggggccctacacgcgccaagcatgctgagggtcttcatcctctatgccgagaacgtccacacacccgacaccgacatcagcgatgcctactgctccgcggtgtttgcaggggtgaagaagagaaccaaagtcatcaagaacagcgtgaaccctgtatggaatgagggatttgaatgggacctcaagggcatccccctggaccagggctctgagcttcatgtggtggtcaaagaccatgagacgatggggaggaacaggttcctgggggaagccaaggtcccactccgagaggtcctcgccacccctagtctgtccgccagcttcaatgcccccctgctggacaccaagaagcagcccacaggggcctcgctggtcctgcaggtgtcctacacaccgctgcctggagctgtgcccctgttcccgccccctactcctctggagccctccccgactctgcctgacctggatgtagtggcagacacaggaggagaggaagacacagaggaccagggactcactggagatgaggcggagccattcctggatcaaagcggaggcccgggggctcccaccaccccaaggaaactaccttcacgtcctccgccccactaccccgggatcaaaagaaagcgaagtgcgcctacatctagaaagctgctgtcagacaaaccgcaggatttccagatcagggtccaggtgatcgaggggcgccagctgccgggggtgaacatcaagcctgtggtcaaggttaccgctgcagggcagaccaagcggacgcggatccacaagggaaacagcccactcttcaatgagactcttttcttcaacttgtttgactctcctggggagctgtttgatgagcccatctttatcacggtggtagactctcgttctctcaggacagatgctctcctcggggagttccggatggacgtgggcaccatttacagagagccccggcacgcctatctcaggaagtggctgctgctctcagaccctgatgacttctctgctggggccagaggctacctgaaaacaagcctttgtgtgctggggcctggggacgaagcgcctctggagagaaaagacccctctgaagacaaggaggacattgaaagcaacctgctccggcccacaggcgtagccctgcgaggagcccacttctgcctgaaggtcttccgggccgaggacttgccgcagatggacgatgccgtgatggacaacgtgaaacagatctttggcttcgagagtaacaagaagaacttggtggacccctttgtggaggtcagctttgcggggaaaatgctgtgcagcaagatcttggagaagacggccaaccctcagtggaaccagaacatcacactgcctgccatgtttccctccatgtgcgaaaaaatgaggattcgtatcatagactgggaccgcctgactcacaatgacatcgtggctaccacctacctgagtatgtcgaaaatctctgcccctggaggagaaatagaagaggagcctgcaggtgctgtcaagccttcgaaagcctcagacttggatgactacctgggcttcctccccacttttgggccctgctacatcaacctctatggcagtcccagagagttcacaggcttcccagacccctacacagagctcaacacaggcaagggggaaggtgtggcttatcgtggccggcttctgctctccctggagaccaagctggtggagcacagtgaacagaaggtggaggaccttcctgcggatgacatcctccgggtggagaagtaccttaggaggcgcaagtactccctgtttgcggccttctactcagccaccatgctgcaggatgtggatgatgccatccagtttgaggtcagcatcgggaactacgggaacaagttcgacatgacctgcctgccgctggcctccaccactcagtacagccgtgcagtctttgacgggtgccactactactacctaccctggggtaacgtgaaacctgtggtggtgctgtcatcctactgggaggacatcagccatagaatcgagactcagaaccagctgcttgggattgctgaccggctggaagctggcctggagcaggtccacctggccctgaaggcgcagtgctccacggaggacgtggactcgctggtggctcagctgacggatgagctcatcgcaggctgcagccagcctctgggtgacatccatgagacaccctctgccacccacctggaccagtacctgtaccagctgcgcacccatcacctgagccaaatcactgaggctgccctggccctgaagctcggccacagtgagctccctgcagctctggagcaggcggaggactggctcctgcgtctgcgtgccctggcagaggagccccagaacagcctgccggacatcgtcatctggatgctgcagggagacaagcgtgtggcataccagcgggtgcccgcccaccaagtcctcttctcccggcggggtgccaactactgtggcaagaattgtgggaagctacagacaatctttctgaaatatccgatggagaaggtgcctggcgcccggatgccagtgcagatacgggtcaagctgtggtttgggctctcagtggatgagaaggagttcaaccagtttgctgaggggaagctgtctgtctttgctgaaacctatgagaacgagactaagttggcccttgttgggaactggggcacaacgggcctcacctaccccaagttttctgacgtcacgggcaagatcaagctacccaaggacagcttccgcccctcggccggctggacctgggctggagattggttcgtgtgtccggagaagactctgctccatgacatggacgccggtcacctgagcttcgtggaagaggtgtttgagaaccagacccggcttcccggaggccagtggatctacatgagtgacaactacaccgatgtgaacggggagaaggtgcttcccaaggatgacattgagtgcccactgggctggaagtgggaagatgaggaatggtccacagacctcaaccgggctgtcgatgagcaaggctgggagtatagcatcaccatccccccggagcggaagccgaagcactgggtccctgctgagaagatgtactacacacaccgacggcggcgctgggtgcgcctgcgcaggagggatctcagccaaatggaagcactgaaaaggcacaggcaggcggaggcggagggcgagggctgggagtacgcctctctttttggctggaagttccacctcgagtaccgcaagacagatgccttccgccgccgccgctggcgccgtcgcatggagccactggagaagacggggcctgcagctgtgtttgcccttgagggggccctgggcggcgtgatggatgacaagagtgaagattccatgtccgtctccaccttgagcttcggtgtgaacagacccacgatttcctgcatattcgactatgggaaccgctaccatctacgctgctacatgtaccaggcccgggacctggctgcgatggacaaggactctttttctgatccctatgccatcgtctccttcctgcaccagagccagaagacggtggtggtgaagaacacccttaaccccacctgggaccagacgctcatcttctacgagatcgagatctttggcgagccggccacagttgctgagcaaccgcccagcattgtggtggagctgtacgaccatgacacttatggtgcagacgagtttatgggtcgctgcatctgtcaaccgagtctggaacggatgccacggctggcctggttcccactgacgaggggcagccagccgtcgggggagctgctggcctcttttgagctcatccagagagagaagccggccatccaccatattcctggttttgaggtgcaggagacatcaaggatcctggatgagtctgaggacacagacctgccctacccaccaccccagagggaggccaacatctacatggttcctcagaacatcaagccagcgctccagcgtaccgccatcgagatcctggcatggggcctgcggaacatgaagagttaccagctggccaacatctcctcccccagcctcgtggtagagtgtgggggccagacggtgcagtcctgtgtcatcaggaacctccggaagaaccccaactttgacatctgcaccctcttcatggaagtgatgctgcccagggaggagctctactgcccccccatcaccgtcaaggtcatcgataaccgccagtttggccgccggcctgtggtgggccagtgtaccatccgctccctggagagcttcctgtgtgacccctactcggcggagagtccatccccacagggtggcccagacgatgtgagcctactcagtcctggggaagacgtgctcatcgacattgatgacaaggagcccctcatccccatccagcttgcagacggtctgtcgagcttggcccccactaacacggcttctcctccatccagtcctcatgaggaagagttcatcgattggtggagcaaattctttgcctccataggggagagggaaaagtgcggctcctacctggagaaggattttgacaccctgaaggtctatgacacacagctggagaatgtggaggcctttgagggcctgtctgacttttgtaacaccttcaagctgtaccggggcaagacgcaggaggagacagaagatccatctgtgattggtgaatttaagggcctcttcaaaatttatcccctcccagaagacccagccatccccatgcccccaagacagttccaccagctggccgcccagggaccccaggagtgcttggtccgtatctacattgtccgagcatttggcctgcagcccaaggaccccaatggaaagtgtgatccttacatcaagatctccatagggaagaaatcagtgagtgaccaggataactacatcccctgcacgctggagcccgtatttggaaagatgttcgagctgacctgcactctgcctctggagaaggacctaaagatcactctctatgactatgacctcctctccaaggacgaaaagatcggtgagacggtcgtcgacctggagaacaggctgctgtccaagtttggggctcgctgtggactcccacagacctactgtgtctctggaccgaaccagtggcgggaccagctccgcccctcccagctcctccacctcttctgccagcagcatagagtcaaggcacctgtgtaccggacagaccgtgtaatgtttcaggataaagaatattccattgaagagatagaggctggcaggatcccaaacccacacctgggcccagtggaggagcgtctggctctgcatgtgcttcagcagcagggcctggtcccggagcacgtggagtcacggcccctctacagccccctgcagccagacatcgagcaggggaagctgcagatgtgggtcgacctatttccgaaggccctggggcggcctggacctcccttcaacatcaccccacggagagccagaaggtttttcctgcgttgtattatctggaataccagagatgtgatcctggatgacctgagcctcacgggggagaagatgagcgacatttatgtgaaaggttggatgattggctttgaagaacacaagcaaaagacagacgtgcattatcgttccctgggaggtgaaggcaacttcaactggaggttcattttccccttcgactacctgccagctgagcaagtctgtaccattgccaagaaggatgccttctggaggctggacaagactgagagcaaaatcccagcacgagtggtgttccagatctgggacaatgacaagttctcctttgatgattttctgggctccctgcagctcgatctcaaccgcatgcccaagccagccaagacagccaagaagtgctccttggaccagctggatgatgctttccacccagaatggtttgtgtccctttttgagcagaaaacagtgaagggctggtggccctgtgtagcagaagagggtgagaagaaaatactggcgggcaagctggaaatgaccttggagattgtagcagagagtgagcatgaggagcggcctgctggccagggccgggatgagcccaacatgaaccctaagcttgaggacccaaggcgccccgacacctccttcctgtggtttacctccccatacaagaccatgaagttcatcctgtggcggcgtttccggtgggccatcatcctcttcatcatcctcttcatcctgctgctgttcctggccatcttcatctacgccttcccgaactatgctgccatgaagctggtgaagcccttcagctgaggactctcctgccctgtagaaggggccgtggggtcccctccagcatgggactggcctgcctcctccgcccagctcggcgagctcctccagacctcctaggcctgattgtcctgccagggtgggcagacagacagatggaccggcccacactcccag

SEQ ID NO: 6143 - DNA, 6769 bp, Homo sapiens
  source 1..6769: mol_type = unassigned DNA; mol_type = unassigned DNA
gggtggaagatgagcagaagcccctgttctcggaacgccggctgacaagcggggtgagcgcagccggggcggggacccagcctagcccactggagcagccgggggtggcccgttcccctttaagagcaactgctctaagccaggagccagagattcgagccggcctcgcccagccagccctctccagcgaggggacccacaagcggcgcctcggccctcccgacctttccgagccctctttgcgccctgggcgcacggggccctacacgcgccaagcatgctgagggtcttcatcctctatgccgagaacgtccacacacccgacaccgacatcagcgatgcctactgctccgcggtgtttgcaggggtgaagaagagaaccaaagtcatcaagaacagcgtgaaccctgtatggaatgagggatttgaatgggacctcaagggcatccccctggaccagggctctgagcttcatgtggtggtcaaagaccatgagacgatggggaggaacaggttcctgggggaagccaaggtcccactccgagaggtcctcgccacccctagtctgtccgccagcttcaatgcccccctgctggacaccaagaagcagcccacaggggcctcgctggtcctgcaggtgtcctacacaccgctgcctggagctgtgcccctgttcccgccccctactcctctggagccctccccgactctgcctgacctggatgtagtggcaggcgggggacagagccgggccgagacttggtccctgctcagtgacagcaccatggacacgagatactctggaaagaagtggccggcccccacggacacaggaggagaggaagacacagaggaccagggactcactggagatgaggcggagccattcctggatcaaagcggaggcccgggggctcccaccaccccaaggaaactaccttcacgtcctccgccccactaccccgggatcaaaagaaagcgaagtgcgcctacatctagaaagctgctgtcagacaaaccgcaggatttccagatcagggtccaggtgatcgaggggcgccagctgccgggggtgaacatcaagcctgtggtcaaggttaccgctgcagggcagaccaagcggacgcggatccacaagggaaacagcccactcttcaatgagactcttttcttcaacttgtttgactctcctggggagctgtttgatgagcccatctttatcacggtggtagactctcgttctctcaggacagatgctctcctcggggagttccggatggacgtgggcaccatttacagagagccccggcacgcctatctcaggaagtggctgctgctctcagaccctgatgacttctctgctggggccagaggctacctgaaaacaagcctttgtgtgctggggcctggggacgaagcgcctctggagagaaaagacccctctgaagacaaggaggacattgaaagcaacctgctccggcccacaggcgtagccctgcgaggagcccacttctgcctgaaggtcttccgggccgaggacttgccgcagatggacgatgccgtgatggacaacgtgaaacagatctttggcttcgagagtaacaagaagaacttggtggacccctttgtggaggtcagctttgcggggaaaatgctgtgcagcaagatcttggagaagacggccaaccctcagtggaaccagaacatcacactgcctgccatgtttccctccatgtgcgaaaaaatgaggattcgtatcatagactgggaccgcctgactcacaatgacatcgtggctaccacctacctgagtatgtcgaaaatctctgcccctggaggagaaatagaagaggagcctgcaggtgctgtcaagccttcgaaagcctcagacttggatgactacctgggcttcctccccacttttgggccctgctacatcaacctctatggcagtcccagagagttcacaggcttcccagacccctacacagagctcaacacaggcaagggggaaggtgtggcttatcgtggccggcttctgctctccctggagaccaagctggtggagcacagtgaacagaaggtggaggaccttcctgcggatgacatcctccgggtggagaagtaccttaggaggcgcaagtactccctgtttgcggccttctactcagccaccatgctgcaggatgtggatgatgccatccagtttgaggtcagcatcgggaactacgggaacaagttcgacatgacctgcctgccgctggcctccaccactcagtacagccgtgcagtctttgacgggtgccactactactacctaccctggggtaacgtgaaacctgtggtggtgctgtcatcctactgggaggacatcagccatagaatcgagactcagaaccagctgcttgggattgctgaccggctggaagctggcctggagcaggtccacctggccctgaaggcgcagtgctccacggaggacgtggactcgctggtggctcagctgacggatgagctcatcgcaggctgcagccagcctctgggtgacatccatgagacaccctctgccacccacctggaccagtacctgtaccagctgcgcacccatcacctgagccaaatcactgaggctgccctggccctgaagctcggccacagtgagctccctgcagctctggagcaggcggaggactggctcctgcgtctgcgtgccctggcagaggagccccagaacagcctgccggacatcgtcatctggatgctgcagggagacaagcgtgtggcataccagcgggtgcccgcccaccaagtcctcttctcccggcggggtgccaactactgtggcaagaattgtgggaagctacagacaatctttctgaaatatccgatggagaaggtgcctggcgcccggatgccagtgcagatacgggtcaagctgtggtttgggctctcagtggatgagaaggagttcaaccagtttgctgaggggaagctgtctgtctttgctgaaacctatgagaacgagactaagttggcccttgttgggaactggggcacaacgggcctcacctaccccaagttttctgacgtcacgggcaagatcaagctacccaaggacagcttccgcccctcggccggctggacctgggctggagattggttcgtgtgtccggagaagactctgctccatgacatggacgccggtcacctgagcttcgtggaagaggtgtttgagaaccagacccggcttcccggaggccagtggatctacatgagtgacaactacaccgatgtgaacggggagaaggtgcttcccaaggatgacattgagtgcccactgggctggaagtgggaagatgaggaatggtccacagacctcaaccgggctgtcgatgagcaaggctgggagtatagcatcaccatccccccggagcggaagccgaagcactgggtccctgctgagaagatgtactacacacaccgacggcggcgctgggtgcgcctgcgcaggagggatctcagccaaatggaagcactgaaaaggcacaggcaggcggaggcggagggcgagggctgggagtacgcctctctttttggctggaagttccacctcgagtaccgcaagacagatgccttccgccgccgccgctggcgccgtcgcatggagccactggagaagacggggcctgcagctgtgtttgcccttgagggggccctgggcggcgtgatggatgacaagagtgaagattccatgtccgtctccaccttgagcttcggtgtgaacagacccacgatttcctgcatattcgactatgggaaccgctaccatctacgctgctacatgtaccaggcccgggacctggctgcgatggacaaggactctttttctgatccctatgccatcgtctccttcctgcaccagagccagaagacggtggtggtgaagaacacccttaaccccacctgggaccagacgctcatcttctacgagatcgagatctttggcgagccggccacagttgctgagcaaccgcccagcattgtggtggagctgtacgaccatgacacttatggtgcagacgagtttatgggtcgctgcatctgtcaaccgagtctggaacggatgccacggctggcctggttcccactgacgaggggcagccagccgtcgggggagctgctggcctcttttgagctcatccagagagagaagccggccatccaccatattcctggttttgaggtgcaggagacatcaaggatcctggatgagtctgaggacacagacctgccctacccaccaccccagagggaggccaacatctacatggttcctcagaacatcaagccagcgctccagcgtaccgccatcgagatcctggcatggggcctgcggaacatgaagagttaccagctggccaacatctcctcccccagcctcgtggtagagtgtgggggccagacggtgcagtcctgtgtcatcaggaacctccggaagaaccccaactttgacatctgcaccctcttcatggaagtgatgctgcccagggaggagctctactgcccccccatcaccgtcaaggtcatcgataaccgccagtttggccgccggcctgtggtgggccagtgtaccatccgctccctggagagcttcctgtgtgacccctactcggcggagagtccatccccacagggtggcccagacgatgtgagcctactcagtcctggggaagacgtgctcatcgacattgatgacaaggagcccctcatccccatccaggaggaagagttcatcgattggtggagcaaattctttgcctccataggggagagggaaaagtgcggctcctacctggagaaggattttgacaccctgaaggtctatgacacacagctggagaatgtggaggcctttgagggcctgtctgacttttgtaacaccttcaagctgtaccggggcaagacgcaggaggagacagaagatccatctgtgattggtgaatttaagggcctcttcaaaatttatcccctcccagaagacccagccatccccatgcccccaagacagttccaccagctggccgcccagggaccccaggagtgcttggtccgtatctacattgtccgagcatttggcctgcagcccaaggaccccaatggaaagtgtgatccttacatcaagatctccatagggaagaaatcagtgagtgaccaggataactacatcccctgcacgctggagcccgtatttggaaagatgttcgagctgacctgcactctgcctctggagaaggacctaaagatcactctctatgactatgacctcctctccaaggacgaaaagatcggtgagacggtcgtcgacctggagaacaggctgctgtccaagtttggggctcgctgtggactcccacagacctactgtgtctctggaccgaaccagtggcgggaccagctccgcccctcccagctcctccacctcttctgccagcagcatagagtcaaggcacctgtgtaccggacagaccgtgtaatgtttcaggataaagaatattccattgaagagatagaggctggcaggatcccaaacccacacctgggcccagtggaggagcgtctggctctgcatgtgcttcagcagcagggcctggtcccggagcacgtggagtcacggcccctctacagccccctgcagccagacatcgagcaggggaagctgcagatgtgggtcgacctatttccgaaggccctggggcggcctggacctcccttcaacatcaccccacggagagccagaaggtttttcctgcgttgtattatctggaataccagagatgtgatcctggatgacctgagcctcacgggggagaagatgagcgacatttatgtgaaaggttggatgattggctttgaagaacacaagcaaaagacagacgtgcattatcgttccctgggaggtgaaggcaacttcaactggaggttcattttccccttcgactacctgccagctgagcaagtctgtaccattgccaagaaggatgccttctggaggctggacaagactgagagcaaaatcccagcacgagtggtgttccagatctgggacaatgacaagttctcctttgatgattttctgggctccctgcagctcgatctcaaccgcatgcccaagccagccaagacagccaagaagtgctccttggaccagctggatgatgctttccacccagaatggtttgtgtccctttttgagcagaaaacagtgaagggctggtggccctgtgtagcagaagagggtgagaagaaaatactggcgggcaagctggaaatgaccttggagattgtagcagagagtgagcatgaggagcggcctgctggccagggccgggatgagcccaacatgaaccctaagcttgaggacccaaggcgccccgacacctccttcctgtggtttacctccccatacaagaccatgaagttcatcctgtggcggcgtttccggtgggccatcatcctcttcatcatcctcttcatcctgctgctgttcctggccatcttcatctacgccttcccgaactatgctgccatgaagctggtgaagcccttcagctgaggactctcctgccctgtagaaggggccgtggggtcccctccagcatgggactggcctgcctcctccgcccagctcggcgagctcctccagacctcctaggcctgattgtcctgccagggtgggcagacagacagatggaccggcccacactcccag

SEQ ID NO: 6144 - DNA, 6796 bp, Homo sapiens
  source 1..6796: mol_type = unassigned DNA; mol_type = unassigned DNA
gggtggaagatgagcagaagcccctgttctcggaacgccggctgacaagcggggtgagcgcagccggggcggggacccagcctagcccactggagcagccgggggtggcccgttcccctttaagagcaactgctctaagccaggagccagagattcgagccggcctcgcccagccagccctctccagcgaggggacccacaagcggcgcctcggccctcccgacctttccgagccctctttgcgccctgggcgcacggggccctacacgcgccaagcatgctgagggtcttcatcctctatgccgagaacgtccacacacccgacaccgacatcagcgatgcctactgctccgcggtgtttgcaggggtgaagaagagaaccaaagtcatcaagaacagcgtgaaccctgtatggaatgagggatttgaatgggacctcaagggcatccccctggaccagggctctgagcttcatgtggtggtcaaagaccatgagacgatggggaggaacaggttcctgggggaagccaaggtcccactccgagaggtcctcgccacccctagtctgtccgccagcttcaatgcccccctgctggacaccaagaagcagcccacaggggcctcgctggtcctgcaggtgtcctacacaccgctgcctggagctgtgcccctgttcccgccccctactcctctggagccctccccgactctgcctgacctggatgtagtggcagacacaggaggagaggaagacacagaggaccagggactcactggagatgaggcggagccattcctggatcaaagcggaggcccgggggctcccaccaccccaaggaaactaccttcacgtcctccgccccactaccccgggatcaaaagaaagcgaagtgcgcctacatctagaaagctgctgtcagacaaaccgcaggatttccagatcagggtccaggtgatcgaggggcgccagctgccgggggtgaacatcaagcctgtggtcaaggttaccgctgcagggcagaccaagcggacgcggatccacaagggaaacagcccactcttcaatgagactcttttcttcaacttgtttgactctcctggggagctgtttgatgagcccatctttatcacggtggtagactctcgttctctcaggacagatgctctcctcggggagttccggatggacgtgggcaccatttacagagagccccggcacgcctatctcaggaagtggctgctgctctcagaccctgatgacttctctgctggggccagaggctacctgaaaacaagcctttgtgtgctggggcctggggacgaagcgcctctggagagaaaagacccctctgaagacaaggaggacattgaaagcaacctgctccggcccacaggcgtagccctgcgaggagcccacttctgcctgaaggtcttccgggccgaggacttgccgcagatggacgatgccgtgatggacaacgtgaaacagatctttggcttcgagagtaacaagaagaacttggtggacccctttgtggaggtcagctttgcggggaaaatgctgtgcagcaagatcttggagaagacggccaaccctcagtggaaccagaacatcacactgcctgccatgtttccctccatgtgcgaaaaaatgaggattcgtatcatagactgggaccgcctgactcacaatgacatcgtggctaccacctacctgagtatgtcgaaaatctctgcccctggaggagaaatagaagaggagcctgcaggtgctgtcaagccttcgaaagcctcagacttggatgactacctgggcttcctccccacttttgggccctgctacatcaacctctatggcagtcccagagagttcacaggcttcccagacccctacacagagctcaacacaggcaagggggaaggtgtggcttatcgtggccggcttctgctctccctggagaccaagctggtggagcacagtgaacagaaggtggaggaccttcctgcggatgacatcctccgggtggagaagtaccttaggaggcgcaagtactccctgtttgcggccttctactcagccaccatgctgcaggatgtggatgatgccatccagtttgaggtcagcatcgggaactacgggaacaagttcgacatgacctgcctgccgctggcctccaccactcagtacagccgtgcagtctttgacgggtgccactactactacctaccctggggtaacgtgaaacctgtggtggtgctgtcatcctactgggaggacatcagccatagaatcgagactcagaaccagctgcttgggattgctgaccggctggaagctggcctggagcaggtccacctggccctgaaggcgcagtgctccacggaggacgtggactcgctggtggctcagctgacggatgagctcatcgcaggctgcagccagcctctgggtgacatccatgagacaccctctgccacccacctggaccagtacctgtaccagctgcgcacccatcacctgagccaaatcactgaggctgccctggccctgaagctcggccacagtgagctccctgcagctctggagcaggcggaggactggctcctgcgtctgcgtgccctggcagaggagccccagaacagcctgccggacatcgtcatctggatgctgcagggagacaagcgtgtggcataccagcgggtgcccgcccaccaagtcctcttctcccggcggggtgccaactactgtggcaagaattgtgggaagctacagacaatctttctgaaatatccgatggagaaggtgcctggcgcccggatgccagtgcagatacgggtcaagctgtggtttgggctctcagtggatgagaaggagttcaaccagtttgctgaggggaagctgtctgtctttgctgaaacctatgagaacgagactaagttggcccttgttgggaactggggcacaacgggcctcacctaccccaagttttctgacgtcacgggcaagatcaagctacccaaggacagcttccgcccctcggccggctggacctgggctggagattggttcgtgtgtccggagaagactctgctccatgacatggacgccggtcacctgagcttcgtggaagaggtgtttgagaaccagacccggcttcccggaggccagtggatctacatgagtgacaactacaccgatgtgaacggggagaaggtgcttcccaaggatgacattgagtgcccactgggctggaagtgggaagatgaggaatggtccacagacctcaaccgggctgtcgatgagcaaggctgggagtatagcatcaccatccccccggagcggaagccgaagcactgggtccctgctgagaagatgtactacacacaccgacggcggcgctgggtgcgcctgcgcaggagggatctcagccaaatggaagcactgaaaaggcacaggcaggcggaggcggagggcgagggctgggagtacgcctctctttttggctggaagttccacctcgagtaccgcaagacagatgccttccgccgccgccgctggcgccgtcgcatggagccactggagaagacggggcctgcagctgtgtttgcccttgagggggccctgggcggcgtgatggatgacaagagtgaagattccatgtccgtctccaccttgagcttcggtgtgaacagacccacgatttcctgcatattcgactatgggaaccgctaccatctacgctgctacatgtaccaggcccgggacctggctgcgatggacaaggactctttttctgatccctatgccatcgtctccttcctgcaccagagccagaagacggtggtggtgaagaacacccttaaccccacctgggaccagacgctcatcttctacgagatcgagatctttggcgagccggccacagttgctgagcaaccgcccagcattgtggtggagctgtacgaccatgacacttatggtgcagacgagtttatgggtcgctgcatctgtcaaccgagtctggaacggatgccacggctggcctggttcccactgacgaggggcagccagccgtcgggggagctgctggcctcttttgagctcatccagagagagaagccggccatccaccatattcctggttttgaggtgcaggagacatcaaggatcctggatgagtctgaggacacagacctgccctacccaccaccccagagggaggccaacatctacatggttcctcagaacatcaagccagcgctccagcgtaccgccatcgagatcctggcatggggcctgcggaacatgaagagttaccagctggccaacatctcctcccccagcctcgtggtagagtgtgggggccagacggtgcagtcctgtgtcatcaggaacctccggaagaaccccaactttgacatctgcaccctcttcatggaagtgatgctgcccagggaggagctctactgcccccccatcaccgtcaaggtcatcgataaccgccagtttggccgccggcctgtggtgggccagtgtaccatccgctccctggagagcttcctgtgtgacccctactcggcggagagtccatccccacagggtggcccagacgatgtgagcctactcagtcctggggaagacgtgctcatcgacattgatgacaaggagcccctcatccccatccaggaggaagagttcatcgattggtggagcaaattctttgcctccataggggagagggaaaagtgcggctcctacctggagaaggattttgacaccctgaaggtctatgacacacagctggagaatgtggaggcctttgagggcctgtctgacttttgtaacaccttcaagctgtaccggggcaagacgcaggaggagacagaagatccatctgtgattggtgaatttaagggcctcttcaaaatttatcccctcccagaagacccagccatccccatgcccccaagacagttccaccagctggccgcccagggaccccaggagtgcttggtccgtatctacattgtccgagcatttggcctgcagcccaaggaccccaatggaaagtgtgatccttacatcaagatctccatagggaagaaatcagtgagtgaccaggataactacatcccctgcacgctggagcccgtatttggaaagatgttcgagctgacctgcactctgcctctggagaaggacctaaagatcactctctatgactatgacctcctctccaaggacgaaaagatcggtgagacggtcgtcgacctggagaacaggctgctgtccaagtttggggctcgctgtggactcccacagacctactgtgtctctggaccgaaccagtggcgggaccagctccgcccctcccagctcctccacctcttctgccagcagcatagagtcaaggcacctgtgtaccggacagaccgtgtaatgtttcaggataaagaatattccattgaagagatagaggctggcaggatcccaaacccacacctgggcccagtggaggagcgtctggctctgcatgtgcttcagcagcagggcctggtcccggagcacgtggagtcacggcccctctacagccccctgcagccagacatcgagcaggggaagctgcagatgtgggtcgacctatttccgaaggccctggggcggcctggacctcccttcaacatcaccccacggagagccagaaggtttttcctgcgttgtattatctggaataccagagatgtgatcctggatgacctgagcctcacgggggagaagatgagcgacatttatgtgaaaggttggatgattggctttgaagaacacaagcaaaagacagacgtgcattatcgttccctgggaggtgaaggcaacttcaactggaggttcattttccccttcgactacctgccagctgagcaagtctgtaccattgccaagaaggatgccttctggaggctggacaagactgagagcaaaatcccagcacgagtggtgttccagatctgggacaatgacaagttctcctttgatgattttctgggctccctgcagctcgatctcaaccgcatgcccaagccagccaagacagccaagaagtgctccttggaccagctggatgatgctttccacccagaatggtttgtgtccctttttgagcagaaaacagtgaagggctggtggccctgtgtagcagaagagggtgagaagaaaatactggcgggcaagctggaaatgaccttggagattgtagcagagagtgagcatgaggagcggcctgctggccagggccgggatgagcccaacatgaaccctaagcttgaggacccaaggcgccccgacacctccttcctgtggtttacctccccatacaagaccatgaagttcatcctgtggcggcgtttccggtgggccatcatcctcttcatcatcctcttcatcctgctgctgttcctggccatcttcatctacgccttcccgaactatgctgccatgaagctggtgaagcccttcagctgaggactctcctgccctgtagaaggggccgtggggtcccctccagcatgggactggcctgcctcctccgcccagctcggcgagctcctccagacctcctaggcctgattgtcctgccagggtgggcagacagacagatggaccggcccacactcccagagttgctaacatggagctctgagatcaccccacttccatcatttccttctcccccaacccaacgcttttttggatcagctcagacatatttcagtataaaacagttggaaccacacagca

SEQ ID NO: 6145 - DNA, 6636 bp, Homo sapiens
  source 1..6636: mol_type = unassigned DNA; mol_type = unassigned DNA
tctccgcggaggagcagcgaaggcgacagctctcttggcgcggctgcctgggagccgggcgcttgctgggtgggtgctcgggcccggtgctcccgctcccgccctgactgcgcgcctgtgtgccgccggggctgcccagccatgctgtgctgcctgctggtgagggccagcaacctccccagtgcgaagaaggaccggcgcagcgaccctgtcgcaagcctgactttccgaggggtgaagaagagaaccaaagtcatcaagaacagcgtgaaccctgtatggaatgagggatttgaatgggacctcaagggcatccccctggaccagggctctgagcttcatgtggtggtcaaagaccatgagacgatggggaggaacaggttcctgggggaagccaaggtcccactccgagaggtcctcgccacccctagtctgtccgccagcttcaatgcccccctgctggacaccaagaagcagcccacaggggcctcgctggtcctgcaggtgtcctacacaccgctgcctggagctgtgcccctgttcccgccccctactcctctggagccctccccgactctgcctgacctggatgtagtggcaggcgggggacagagccgggccgagacttggtccctgctcagtgacagcaccatggacacgagatactctggaaagaagtggccggcccccacggacacaggaggagaggaagacacagaggaccagggactcactggagatgaggcggagccattcctggatcaaagcggaggcccgggggctcccaccaccccaaggaaactaccttcacgtcctccgccccactaccccgggatcaaaagaaagcgaagtgcgcctacatctagaaagctgctgtcagacaaaccgcaggatttccagatcagggtccaggtgatcgaggggcgccagctgccgggggtgaacatcaagcctgtggtcaaggttaccgctgcagggcagaccaagcggacgcggatccacaagggaaacagcccactcttcaatgagactcttttcttcaacttgtttgactctcctggggagctgtttgatgagcccatctttatcacggtggtagactctcgttctctcaggacagatgctctcctcggggagttccggatggacgtgggcaccatttacagagagccccggcacgcctatctcaggaagtggctgctgctctcagaccctgatgacttctctgctggggccagaggctacctgaaaacaagcctttgtgtgctggggcctggggacgaagcgcctctggagagaaaagacccctctgaagacaaggaggacattgaaagcaacctgctccggcccacaggcgtagccctgcgaggagcccacttctgcctgaaggtcttccgggccgaggacttgccgcagatggacgatgccgtgatggacaacgtgaaacagatctttggcttcgagagtaacaagaagaacttggtggacccctttgtggaggtcagctttgcggggaaaatgctgtgcagcaagatcttggagaagacggccaaccctcagtggaaccagaacatcacactgcctgccatgtttccctccatgtgcgaaaaaatgaggattcgtatcatagactgggaccgcctgactcacaatgacatcgtggctaccacctacctgagtatgtcgaaaatctctgcccctggaggagaaatagaagaggagcctgcaggtgctgtcaagccttcgaaagcctcagacttggatgactacctgggcttcctccccacttttgggccctgctacatcaacctctatggcagtcccagagagttcacaggcttcccagacccctacacagagctcaacacaggcaagggggaaggtgtggcttatcgtggccggcttctgctctccctggagaccaagctggtggagcacagtgaacagaaggtggaggaccttcctgcggatgacatcctccgggtggagaagtaccttaggaggcgcaagtactccctgtttgcggccttctactcagccaccatgctgcaggatgtggatgatgccatccagtttgaggtcagcatcgggaactacgggaacaagttcgacatgacctgcctgccgctggcctccaccactcagtacagccgtgcagtctttgacgggtgccactactactacctaccctggggtaacgtgaaacctgtggtggtgctgtcatcctactgggaggacatcagccatagaatcgagactcagaaccagctgcttgggattgctgaccggctggaagctggcctggagcaggtccacctggccctgaaggcgcagtgctccacggaggacgtggactcgctggtggctcagctgacggatgagctcatcgcaggctgcagccagcctctgggtgacatccatgagacaccctctgccacccacctggaccagtacctgtaccagctgcgcacccatcacctgagccaaatcactgaggctgccctggccctgaagctcggccacagtgagctccctgcagctctggagcaggcggaggactggctcctgcgtctgcgtgccctggcagaggagccccagaacagcctgccggacatcgtcatctggatgctgcagggagacaagcgtgtggcataccagcgggtgcccgcccaccaagtcctcttctcccggcggggtgccaactactgtggcaagaattgtgggaagctacagacaatctttctgaaatatccgatggagaaggtgcctggcgcccggatgccagtgcagatacgggtcaagctgtggtttgggctctcagtggatgagaaggagttcaaccagtttgctgaggggaagctgtctgtctttgctgaaacctatgagaacgagactaagttggcccttgttgggaactggggcacaacgggcctcacctaccccaagttttctgacgtcacgggcaagatcaagctacccaaggacagcttccgcccctcggccggctggacctgggctggagattggttcgtgtgtccggagaagactctgctccatgacatggacgccggtcacctgagcttcgtggaagaggtgtttgagaaccagacccggcttcccggaggccagtggatctacatgagtgacaactacaccgatgtgaacggggagaaggtgcttcccaaggatgacattgagtgcccactgggctggaagtgggaagatgaggaatggtccacagacctcaaccgggctgtcgatgagcaaggctgggagtatagcatcaccatccccccggagcggaagccgaagcactgggtccctgctgagaagatgtactacacacaccgacggcggcgctgggtgcgcctgcgcaggagggatctcagccaaatggaagcactgaaaaggcacaggcaggcggaggcggagggcgagggctgggagtacgcctctctttttggctggaagttccacctcgagtaccgcaagacagatgccttccgccgccgccgctggcgccgtcgcatggagccactggagaagacggggcctgcagctgtgtttgcccttgagggggccctgggcggcgtgatggatgacaagagtgaagattccatgtccgtctccaccttgagcttcggtgtgaacagacccacgatttcctgcatattcgactatgggaaccgctaccatctacgctgctacatgtaccaggcccgggacctggctgcgatggacaaggactctttttctgatccctatgccatcgtctccttcctgcaccagagccagaagacggtggtggtgaagaacacccttaaccccacctgggaccagacgctcatcttctacgagatcgagatctttggcgagccggccacagttgctgagcaaccgcccagcattgtggtggagctgtacgaccatgacacttatggtgcagacgagtttatgggtcgctgcatctgtcaaccgagtctggaacggatgccacggctggcctggttcccactgacgaggggcagccagccgtcgggggagctgctggcctcttttgagctcatccagagagagaagccggccatccaccatattcctggttttgaggtgcaggagacatcaaggatcctggatgagtctgaggacacagacctgccctacccaccaccccagagggaggccaacatctacatggttcctcagaacatcaagccagcgctccagcgtaccgccatcgagatcctggcatggggcctgcggaacatgaagagttaccagctggccaacatctcctcccccagcctcgtggtagagtgtgggggccagacggtgcagtcctgtgtcatcaggaacctccggaagaaccccaactttgacatctgcaccctcttcatggaagtgatgctgcccagggaggagctctactgcccccccatcaccgtcaaggtcatcgataaccgccagtttggccgccggcctgtggtgggccagtgtaccatccgctccctggagagcttcctgtgtgacccctactcggcggagagtccatccccacagggtggcccagacgatgtgagcctactcagtcctggggaagacgtgctcatcgacattgatgacaaggagcccctcatccccatccaggaggaagagttcatcgattggtggagcaaattctttgcctccataggggagagggaaaagtgcggctcctacctggagaaggattttgacaccctgaaggtctatgacacacagctggagaatgtggaggcctttgagggcctgtctgacttttgtaacaccttcaagctgtaccggggcaagacgcaggaggagacagaagatccatctgtgattggtgaatttaagggcctcttcaaaatttatcccctcccagaagacccagccatccccatgcccccaagacagttccaccagctggccgcccagggaccccaggagtgcttggtccgtatctacattgtccgagcatttggcctgcagcccaaggaccccaatggaaagtgtgatccttacatcaagatctccatagggaagaaatcagtgagtgaccaggataactacatcccctgcacgctggagcccgtatttggaaagatgttcgagctgacctgcactctgcctctggagaaggacctaaagatcactctctatgactatgacctcctctccaaggacgaaaagatcggtgagacggtcgtcgacctggagaacaggctgctgtccaagtttggggctcgctgtggactcccacagacctactgtgtctctggaccgaaccagtggcgggaccagctccgcccctcccagctcctccacctcttctgccagcagcatagagtcaaggcacctgtgtaccggacagaccgtgtaatgtttcaggataaagaatattccattgaagagatagaggctggcaggatcccaaacccacacctgggcccagtggaggagcgtctggctctgcatgtgcttcagcagcagggcctggtcccggagcacgtggagtcacggcccctctacagccccctgcagccagacatcgagcaggggaagctgcagatgtgggtcgacctatttccgaaggccctggggcggcctggacctcccttcaacatcaccccacggagagccagaaggtttttcctgcgttgtattatctggaataccagagatgtgatcctggatgacctgagcctcacgggggagaagatgagcgacatttatgtgaaaggttggatgattggctttgaagaacacaagcaaaagacagacgtgcattatcgttccctgggaggtgaaggcaacttcaactggaggttcattttccccttcgactacctgccagctgagcaagtctgtaccattgccaagaaggatgccttctggaggctggacaagactgagagcaaaatcccagcacgagtggtgttccagatctgggacaatgacaagttctcctttgatgattttctgggctccctgcagctcgatctcaaccgcatgcccaagccagccaagacagccaagaagtgctccttggaccagctggatgatgctttccacccagaatggtttgtgtccctttttgagcagaaaacagtgaagggctggtggccctgtgtagcagaagagggtgagaagaaaatactggcgggcaagctggaaatgaccttggagattgtagcagagagtgagcatgaggagcggcctgctggccagggccgggatgagcccaacatgaaccctaagcttgaggacccaaggcgccccgacacctccttcctgtggtttacctccccatacaagaccatgaagttcatcctgtggcggcgtttccggtgggccatcatcctcttcatcatcctcttcatcctgctgctgttcctggccatcttcatctacgccttcccgaactatgctgccatgaagctggtgaagcccttcagctgaggactctcctgccctgtagaaggggccgtggggtcccctccagcatgggactggcctgcctcctccgcccagctcggcgagctcctccagacctcctaggcctgattgtcctgccagggtgggcagacagacagatggaccggcccacactcccag

SEQ ID NO: 6146 - DNA, 6543 bp, Homo sapiens
  source 1..6543: mol_type = unassigned DNA; mol_type = unassigned DNA
tctccgcggaggagcagcgaaggcgacagctctcttggcgcggctgcctgggagccgggcgcttgctgggtgggtgctcgggcccggtgctcccgctcccgccctgactgcgcgcctgtgtgccgccggggctgcccagccatgctgtgctgcctgctggtgagggccagcaacctccccagtgcgaagaaggaccggcgcagcgaccctgtcgcaagcctgactttccgaggggtgaagaagagaaccaaagtcatcaagaacagcgtgaaccctgtatggaatgagggatttgaatgggacctcaagggcatccccctggaccagggctctgagcttcatgtggtggtcaaagaccatgagacgatggggaggaacaggttcctgggggaagccaaggtcccactccgagaggtcctcgccacccctagtctgtccgccagcttcaatgcccccctgctggacaccaagaagcagcccacaggggcctcgctggtcctgcaggtgtcctacacaccgctgcctggagctgtgcccctgttcccgccccctactcctctggagccctccccgactctgcctgacctggatgtagtggcagacacaggaggagaggaagacacagaggaccagggactcactggagatgaggcggagccattcctggatcaaagcggaggcccgggggctcccaccaccccaaggaaactaccttcacgtcctccgccccactaccccgggatcaaaagaaagcgaagtgcgcctacatctagaaagctgctgtcagacaaaccgcaggatttccagatcagggtccaggtgatcgaggggcgccagctgccgggggtgaacatcaagcctgtggtcaaggttaccgctgcagggcagaccaagcggacgcggatccacaagggaaacagcccactcttcaatgagactcttttcttcaacttgtttgactctcctggggagctgtttgatgagcccatctttatcacggtggtagactctcgttctctcaggacagatgctctcctcggggagttccggatggacgtgggcaccatttacagagagccccggcacgcctatctcaggaagtggctgctgctctcagaccctgatgacttctctgctggggccagaggctacctgaaaacaagcctttgtgtgctggggcctggggacgaagcgcctctggagagaaaagacccctctgaagacaaggaggacattgaaagcaacctgctccggcccacaggcgtagccctgcgaggagcccacttctgcctgaaggtcttccgggccgaggacttgccgcagatggacgatgccgtgatggacaacgtgaaacagatctttggcttcgagagtaacaagaagaacttggtggacccctttgtggaggtcagctttgcggggaaaatgctgtgcagcaagatcttggagaagacggccaaccctcagtggaaccagaacatcacactgcctgccatgtttccctccatgtgcgaaaaaatgaggattcgtatcatagactgggaccgcctgactcacaatgacatcgtggctaccacctacctgagtatgtcgaaaatctctgcccctggaggagaaatagaagaggagcctgcaggtgctgtcaagccttcgaaagcctcagacttggatgactacctgggcttcctccccacttttgggccctgctacatcaacctctatggcagtcccagagagttcacaggcttcccagacccctacacagagctcaacacaggcaagggggaaggtgtggcttatcgtggccggcttctgctctccctggagaccaagctggtggagcacagtgaacagaaggtggaggaccttcctgcggatgacatcctccgggtggagaagtaccttaggaggcgcaagtactccctgtttgcggccttctactcagccaccatgctgcaggatgtggatgatgccatccagtttgaggtcagcatcgggaactacgggaacaagttcgacatgacctgcctgccgctggcctccaccactcagtacagccgtgcagtctttgacgggtgccactactactacctaccctggggtaacgtgaaacctgtggtggtgctgtcatcctactgggaggacatcagccatagaatcgagactcagaaccagctgcttgggattgctgaccggctggaagctggcctggagcaggtccacctggccctgaaggcgcagtgctccacggaggacgtggactcgctggtggctcagctgacggatgagctcatcgcaggctgcagccagcctctgggtgacatccatgagacaccctctgccacccacctggaccagtacctgtaccagctgcgcacccatcacctgagccaaatcactgaggctgccctggccctgaagctcggccacagtgagctccctgcagctctggagcaggcggaggactggctcctgcgtctgcgtgccctggcagaggagccccagaacagcctgccggacatcgtcatctggatgctgcagggagacaagcgtgtggcataccagcgggtgcccgcccaccaagtcctcttctcccggcggggtgccaactactgtggcaagaattgtgggaagctacagacaatctttctgaaatatccgatggagaaggtgcctggcgcccggatgccagtgcagatacgggtcaagctgtggtttgggctctcagtggatgagaaggagttcaaccagtttgctgaggggaagctgtctgtctttgctgaaacctatgagaacgagactaagttggcccttgttgggaactggggcacaacgggcctcacctaccccaagttttctgacgtcacgggcaagatcaagctacccaaggacagcttccgcccctcggccggctggacctgggctggagattggttcgtgtgtccggagaagactctgctccatgacatggacgccggtcacctgagcttcgtggaagaggtgtttgagaaccagacccggcttcccggaggccagtggatctacatgagtgacaactacaccgatgtgaacggggagaaggtgcttcccaaggatgacattgagtgcccactgggctggaagtgggaagatgaggaatggtccacagacctcaaccgggctgtcgatgagcaaggctgggagtatagcatcaccatccccccggagcggaagccgaagcactgggtccctgctgagaagatgtactacacacaccgacggcggcgctgggtgcgcctgcgcaggagggatctcagccaaatggaagcactgaaaaggcacaggcaggcggaggcggagggcgagggctgggagtacgcctctctttttggctggaagttccacctcgagtaccgcaagacagatgccttccgccgccgccgctggcgccgtcgcatggagccactggagaagacggggcctgcagctgtgtttgcccttgagggggccctgggcggcgtgatggatgacaagagtgaagattccatgtccgtctccaccttgagcttcggtgtgaacagacccacgatttcctgcatattcgactatgggaaccgctaccatctacgctgctacatgtaccaggcccgggacctggctgcgatggacaaggactctttttctgatccctatgccatcgtctccttcctgcaccagagccagaagacggtggtggtgaagaacacccttaaccccacctgggaccagacgctcatcttctacgagatcgagatctttggcgagccggccacagttgctgagcaaccgcccagcattgtggtggagctgtacgaccatgacacttatggtgcagacgagtttatgggtcgctgcatctgtcaaccgagtctggaacggatgccacggctggcctggttcccactgacgaggggcagccagccgtcgggggagctgctggcctcttttgagctcatccagagagagaagccggccatccaccatattcctggttttgaggtgcaggagacatcaaggatcctggatgagtctgaggacacagacctgccctacccaccaccccagagggaggccaacatctacatggttcctcagaacatcaagccagcgctccagcgtaccgccatcgagatcctggcatggggcctgcggaacatgaagagttaccagctggccaacatctcctcccccagcctcgtggtagagtgtgggggccagacggtgcagtcctgtgtcatcaggaacctccggaagaaccccaactttgacatctgcaccctcttcatggaagtgatgctgcccagggaggagctctactgcccccccatcaccgtcaaggtcatcgataaccgccagtttggccgccggcctgtggtgggccagtgtaccatccgctccctggagagcttcctgtgtgacccctactcggcggagagtccatccccacagggtggcccagacgatgtgagcctactcagtcctggggaagacgtgctcatcgacattgatgacaaggagcccctcatccccatccaggaggaagagttcatcgattggtggagcaaattctttgcctccataggggagagggaaaagtgcggctcctacctggagaaggattttgacaccctgaaggtctatgacacacagctggagaatgtggaggcctttgagggcctgtctgacttttgtaacaccttcaagctgtaccggggcaagacgcaggaggagacagaagatccatctgtgattggtgaatttaagggcctcttcaaaatttatcccctcccagaagacccagccatccccatgcccccaagacagttccaccagctggccgcccagggaccccaggagtgcttggtccgtatctacattgtccgagcatttggcctgcagcccaaggaccccaatggaaagtgtgatccttacatcaagatctccatagggaagaaatcagtgagtgaccaggataactacatcccctgcacgctggagcccgtatttggaaagatgttcgagctgacctgcactctgcctctggagaaggacctaaagatcactctctatgactatgacctcctctccaaggacgaaaagatcggtgagacggtcgtcgacctggagaacaggctgctgtccaagtttggggctcgctgtggactcccacagacctactgtgtctctggaccgaaccagtggcgggaccagctccgcccctcccagctcctccacctcttctgccagcagcatagagtcaaggcacctgtgtaccggacagaccgtgtaatgtttcaggataaagaatattccattgaagagatagaggctggcaggatcccaaacccacacctgggcccagtggaggagcgtctggctctgcatgtgcttcagcagcagggcctggtcccggagcacgtggagtcacggcccctctacagccccctgcagccagacatcgagcaggggaagctgcagatgtgggtcgacctatttccgaaggccctggggcggcctggacctcccttcaacatcaccccacggagagccagaaggtttttcctgcgttgtattatctggaataccagagatgtgatcctggatgacctgagcctcacgggggagaagatgagcgacatttatgtgaaaggttggatgattggctttgaagaacacaagcaaaagacagacgtgcattatcgttccctgggaggtgaaggcaacttcaactggaggttcattttccccttcgactacctgccagctgagcaagtctgtaccattgccaagaaggatgccttctggaggctggacaagactgagagcaaaatcccagcacgagtggtgttccagatctgggacaatgacaagttctcctttgatgattttctgggctccctgcagctcgatctcaaccgcatgcccaagccagccaagacagccaagaagtgctccttggaccagctggatgatgctttccacccagaatggtttgtgtccctttttgagcagaaaacagtgaagggctggtggccctgtgtagcagaagagggtgagaagaaaatactggcgggcaagctggaaatgaccttggagattgtagcagagagtgagcatgaggagcggcctgctggccagggccgggatgagcccaacatgaaccctaagcttgaggacccaaggcgccccgacacctccttcctgtggtttacctccccatacaagaccatgaagttcatcctgtggcggcgtttccggtgggccatcatcctcttcatcatcctcttcatcctgctgctgttcctggccatcttcatctacgccttcccgaactatgctgccatgaagctggtgaagcccttcagctgaggactctcctgccctgtagaaggggccgtggggtcccctccagcatgggactggcctgcctcctccgcccagctcggcgagctcctccagacctcctaggcctgattgtcctgccagggtgggcagacagacagatggaccggcccacactcccag

SEQ ID NO: 6147 - DNA, 6564 bp, Homo sapiens
  source 1..6564: mol_type = unassigned DNA; mol_type = unassigned DNA
tctccgcggaggagcagcgaaggcgacagctctcttggcgcggctgcctgggagccgggcgcttgctgggtgggtgctcgggcccggtgctcccgctcccgccctgactgcgcgcctgtgtgccgccggggctgcccagccatgctgtgctgcctgctggtgagggccagcaacctccccagtgcgaagaaggaccggcgcagcgaccctgtcgcaagcctgactttccgaggggtgaagaagagaaccaaagtcatcaagaacagcgtgaaccctgtatggaatgagggatttgaatgggacctcaagggcatccccctggaccagggctctgagcttcatgtggtggtcaaagaccatgagacgatggggaggaacaggttcctgggggaagccaaggtcccactccgagaggtcctcgccacccctagtctgtccgccagcttcaatgcccccctgctggacaccaagaagcagcccacaggggcctcgctggtcctgcaggtgtcctacacaccgctgcctggagctgtgcccctgttcccgccccctactcctctggagccctccccgactctgcctgacctggatgtagtggcagacacaggaggagaggaagacacagaggaccagggactcactggagatgaggcggagccattcctggatcaaagcggaggcccgggggctcccaccaccccaaggaaactaccttcacgtcctccgccccactaccccgggatcaaaagaaagcgaagtgcgcctacatctagaaagctgctgtcagacaaaccgcaggatttccagatcagggtccaggtgatcgaggggcgccagctgccgggggtgaacatcaagcctgtggtcaaggttaccgctgcagggcagaccaagcggacgcggatccacaagggaaacagcccactcttcaatgagactcttttcttcaacttgtttgactctcctggggagctgtttgatgagcccatctttatcacggtggtagactctcgttctctcaggacagatgctctcctcggggagttccggatggacgtgggcaccatttacagagagccccggcacgcctatctcaggaagtggctgctgctctcagaccctgatgacttctctgctggggccagaggctacctgaaaacaagcctttgtgtgctggggcctggggacgaagcgcctctggagagaaaagacccctctgaagacaaggaggacattgaaagcaacctgctccggcccacaggcgtagccctgcgaggagcccacttctgcctgaaggtcttccgggccgaggacttgccgcagatggacgatgccgtgatggacaacgtgaaacagatctttggcttcgagagtaacaagaagaacttggtggacccctttgtggaggtcagctttgcggggaaaatgctgtgcagcaagatcttggagaagacggccaaccctcagtggaaccagaacatcacactgcctgccatgtttccctccatgtgcgaaaaaatgaggattcgtatcatagactgggaccgcctgactcacaatgacatcgtggctaccacctacctgagtatgtcgaaaatctctgcccctggaggagaaatagaagtggatgactacctgggcttcctccccacttttgggccctgctacatcaacctctatggcagtcccagagagttcacaggcttcccagacccctacacagagctcaacacaggcaagggggaaggtgtggcttatcgtggccggcttctgctctccctggagaccaagctggtggagcacagtgaacagaaggtggaggaccttcctgcggatgacatcctccgggtggagaagtaccttaggaggcgcaagtactccctgtttgcggccttctactcagccaccatgctgcaggatgtggatgatgccatccagtttgaggtcagcatcgggaactacgggaacaagttcgacatgacctgcctgccgctggcctccaccactcagtacagccgtgcagtctttgacgggtgccactactactacctaccctggggtaacgtgaaacctgtggtggtgctgtcatcctactgggaggacatcagccatagaatcgagactcagaaccagctgcttgggattgctgaccggctggaagctggcctggagcaggtccacctggccctgaaggcgcagtgctccacggaggacgtggactcgctggtggctcagctgacggatgagctcatcgcaggctgcagccagcctctgggtgacatccatgagacaccctctgccacccacctggaccagtacctgtaccagctgcgcacccatcacctgagccaaatcactgaggctgccctggccctgaagctcggccacagtgagctccctgcagctctggagcaggcggaggactggctcctgcgtctgcgtgccctggcagaggagccccagaacagcctgccggacatcgtcatctggatgctgcagggagacaagcgtgtggcataccagcgggtgcccgcccaccaagtcctcttctcccggcggggtgccaactactgtggcaagaattgtgggaagctacagacaatctttctgaaatatccgatggagaaggtgcctggcgcccggatgccagtgcagatacgggtcaagctgtggtttgggctctcagtggatgagaaggagttcaaccagtttgctgaggggaagctgtctgtctttgctgaaacctatgagaacgagactaagttggcccttgttgggaactggggcacaacgggcctcacctaccccaagttttctgacgtcacgggcaagatcaagctacccaaggacagcttccgcccctcggccggctggacctgggctggagattggttcgtgtgtccggagaagactctgctccatgacatggacgccggtcacctgagcttcgtggaagaggtgtttgagaaccagacccggcttcccggaggccagtggatctacatgagtgacaactacaccgatgtgaacggggagaaggtgcttcccaaggatgacattgagtgcccactgggctggaagtgggaagatgaggaatggtccacagacctcaaccgggctgtcgatgagcaaggctgggagtatagcatcaccatccccccggagcggaagccgaagcactgggtccctgctgagaagatgtactacacacaccgacggcggcgctgggtgcgcctgcgcaggagggatctcagccaaatggaagcactgaaaaggcacaggcaggcggaggcggagggcgagggctgggagtacgcctctctttttggctggaagttccacctcgagtaccgcaagacagatgccttccgccgccgccgctggcgccgtcgcatggagccactggagaagacggggcctgcagctgtgtttgcccttgagggggccctgggcggcgtgatggatgacaagagtgaagattccatgtccgtctccaccttgagcttcggtgtgaacagacccacgatttcctgcatattcgactatgggaaccgctaccatctacgctgctacatgtaccaggcccgggacctggctgcgatggacaaggactctttttctgatccctatgccatcgtctccttcctgcaccagagccagaagacggtggtggtgaagaacacccttaaccccacctgggaccagacgctcatcttctacgagatcgagatctttggcgagccggccacagttgctgagcaaccgcccagcattgtggtggagctgtacgaccatgacacttatggtgcagacgagtttatgggtcgctgcatctgtcaaccgagtctggaacggatgccacggctggcctggttcccactgacgaggggcagccagccgtcgggggagctgctggcctcttttgagctcatccagagagagaagccggccatccaccatattcctggttttgaggtgcaggagacatcaaggatcctggatgagtctgaggacacagacctgccctacccaccaccccagagggaggccaacatctacatggttcctcagaacatcaagccagcgctccagcgtaccgccatcgagatcctggcatggggcctgcggaacatgaagagttaccagctggccaacatctcctcccccagcctcgtggtagagtgtgggggccagacggtgcagtcctgtgtcatcaggaacctccggaagaaccccaactttgacatctgcaccctcttcatggaagtgatgctgcccagggaggagctctactgcccccccatcaccgtcaaggtcatcgataaccgccagtttggccgccggcctgtggtgggccagtgtaccatccgctccctggagagcttcctgtgtgacccctactcggcggagagtccatccccacagggtggcccagacgatgtgagcctactcagtcctggggaagacgtgctcatcgacattgatgacaaggagcccctcatccccatccagcttgcagacggtctgtcgagcttggcccccactaacacggcttctcctccatccagtcctcatgaggaagagttcatcgattggtggagcaaattctttgcctccataggggagagggaaaagtgcggctcctacctggagaaggattttgacaccctgaaggtctatgacacacagctggagaatgtggaggcctttgagggcctgtctgacttttgtaacaccttcaagctgtaccggggcaagacgcaggaggagacagaagatccatctgtgattggtgaatttaagggcctcttcaaaatttatcccctcccagaagacccagccatccccatgcccccaagacagttccaccagctggccgcccagggaccccaggagtgcttggtccgtatctacattgtccgagcatttggcctgcagcccaaggaccccaatggaaagtgtgatccttacatcaagatctccatagggaagaaatcagtgagtgaccaggataactacatcccctgcacgctggagcccgtatttggaaagatgttcgagctgacctgcactctgcctctggagaaggacctaaagatcactctctatgactatgacctcctctccaaggacgaaaagatcggtgagacggtcgtcgacctggagaacaggctgctgtccaagtttggggctcgctgtggactcccacagacctactgtgtctctggaccgaaccagtggcgggaccagctccgcccctcccagctcctccacctcttctgccagcagcatagagtcaaggcacctgtgtaccggacagaccgtgtaatgtttcaggataaagaatattccattgaagagatagaggctggcaggatcccaaacccacacctgggcccagtggaggagcgtctggctctgcatgtgcttcagcagcagggcctggtcccggagcacgtggagtcacggcccctctacagccccctgcagccagacatcgagcaggggaagctgcagatgtgggtcgacctatttccgaaggccctggggcggcctggacctcccttcaacatcaccccacggagagccagaaggtttttcctgcgttgtattatctggaataccagagatgtgatcctggatgacctgagcctcacgggggagaagatgagcgacatttatgtgaaaggttggatgattggctttgaagaacacaagcaaaagacagacgtgcattatcgttccctgggaggtgaaggcaacttcaactggaggttcattttccccttcgactacctgccagctgagcaagtctgtaccattgccaagaaggatgccttctggaggctggacaagactgagagcaaaatcccagcacgagtggtgttccagatctgggacaatgacaagttctcctttgatgattttctgggctccctgcagctcgatctcaaccgcatgcccaagccagccaagacagccaagaagtgctccttggaccagctggatgatgctttccacccagaatggtttgtgtccctttttgagcagaaaacagtgaagggctggtggccctgtgtagcagaagagggtgagaagaaaatactggcgggcaagctggaaatgaccttggagattgtagcagagagtgagcatgaggagcggcctgctggccagggccgggatgagcccaacatgaaccctaagcttgaggacccaaggcgccccgacacctccttcctgtggtttacctccccatacaagaccatgaagttcatcctgtggcggcgtttccggtgggccatcatcctcttcatcatcctcttcatcctgctgctgttcctggccatcttcatctacgccttcccgaactatgctgccatgaagctggtgaagcccttcagctgaggactctcctgccctgtagaaggggccgtggggtcccctccagcatgggactggcctgcctcctccgcccagctcggcgagctcctccagacctcctaggcctgattgtcctgccagggtgggcagacagacagatggaccggcccacactcccag

SEQ ID NO: 6148 - DNA, 6606 bp, Homo sapiens
  source 1..6606: mol_type = unassigned DNA; mol_type = unassigned DNA
tctccgcggaggagcagcgaaggcgacagctctcttggcgcggctgcctgggagccgggcgcttgctgggtgggtgctcgggcccggtgctcccgctcccgccctgactgcgcgcctgtgtgccgccggggctgcccagccatgctgtgctgcctgctggtgagggccagcaacctccccagtgcgaagaaggaccggcgcagcgaccctgtcgcaagcctgactttccgaggggtgaagaagagaaccaaagtcatcaagaacagcgtgaaccctgtatggaatgagggatttgaatgggacctcaagggcatccccctggaccagggctctgagcttcatgtggtggtcaaagaccatgagacgatggggaggaacaggttcctgggggaagccaaggtcccactccgagaggtcctcgccacccctagtctgtccgccagcttcaatgcccccctgctggacaccaagaagcagcccacaggggcctcgctggtcctgcaggtgtcctacacaccgctgcctggagctgtgcccctgttcccgccccctactcctctggagccctccccgactctgcctgacctggatgtagtggcagacacaggaggagaggaagacacagaggaccagggactcactggagatgaggcggagccattcctggatcaaagcggaggcccgggggctcccaccaccccaaggaaactaccttcacgtcctccgccccactaccccgggatcaaaagaaagcgaagtgcgcctacatctagaaagctgctgtcagacaaaccgcaggatttccagatcagggtccaggtgatcgaggggcgccagctgccgggggtgaacatcaagcctgtggtcaaggttaccgctgcagggcagaccaagcggacgcggatccacaagggaaacagcccactcttcaatgagactcttttcttcaacttgtttgactctcctggggagctgtttgatgagcccatctttatcacggtggtagactctcgttctctcaggacagatgctctcctcggggagttccggatggacgtgggcaccatttacagagagccccggcacgcctatctcaggaagtggctgctgctctcagaccctgatgacttctctgctggggccagaggctacctgaaaacaagcctttgtgtgctggggcctggggacgaagcgcctctggagagaaaagacccctctgaagacaaggaggacattgaaagcaacctgctccggcccacaggcgtagccctgcgaggagcccacttctgcctgaaggtcttccgggccgaggacttgccgcagatggacgatgccgtgatggacaacgtgaaacagatctttggcttcgagagtaacaagaagaacttggtggacccctttgtggaggtcagctttgcggggaaaatgctgtgcagcaagatcttggagaagacggccaaccctcagtggaaccagaacatcacactgcctgccatgtttccctccatgtgcgaaaaaatgaggattcgtatcatagactgggaccgcctgactcacaatgacatcgtggctaccacctacctgagtatgtcgaaaatctctgcccctggaggagaaatagaagaggagcctgcaggtgctgtcaagccttcgaaagcctcagacttggatgactacctgggcttcctccccacttttgggccctgctacatcaacctctatggcagtcccagagagttcacaggcttcccagacccctacacagagctcaacacaggcaagggggaaggtgtggcttatcgtggccggcttctgctctccctggagaccaagctggtggagcacagtgaacagaaggtggaggaccttcctgcggatgacatcctccgggtggagaagtaccttaggaggcgcaagtactccctgtttgcggccttctactcagccaccatgctgcaggatgtggatgatgccatccagtttgaggtcagcatcgggaactacgggaacaagttcgacatgacctgcctgccgctggcctccaccactcagtacagccgtgcagtctttgacgggtgccactactactacctaccctggggtaacgtgaaacctgtggtggtgctgtcatcctactgggaggacatcagccatagaatcgagactcagaaccagctgcttgggattgctgaccggctggaagctggcctggagcaggtccacctggccctgaaggcgcagtgctccacggaggacgtggactcgctggtggctcagctgacggatgagctcatcgcaggctgcagccagcctctgggtgacatccatgagacaccctctgccacccacctggaccagtacctgtaccagctgcgcacccatcacctgagccaaatcactgaggctgccctggccctgaagctcggccacagtgagctccctgcagctctggagcaggcggaggactggctcctgcgtctgcgtgccctggcagaggagccccagaacagcctgccggacatcgtcatctggatgctgcagggagacaagcgtgtggcataccagcgggtgcccgcccaccaagtcctcttctcccggcggggtgccaactactgtggcaagaattgtgggaagctacagacaatctttctgaaatatccgatggagaaggtgcctggcgcccggatgccagtgcagatacgggtcaagctgtggtttgggctctcagtggatgagaaggagttcaaccagtttgctgaggggaagctgtctgtctttgctgaaacctatgagaacgagactaagttggcccttgttgggaactggggcacaacgggcctcacctaccccaagttttctgacgtcacgggcaagatcaagctacccaaggacagcttccgcccctcggccggctggacctgggctggagattggttcgtgtgtccggagaagactctgctccatgacatggacgccggtcacctgagcttcgtggaagaggtgtttgagaaccagacccggcttcccggaggccagtggatctacatgagtgacaactacaccgatgtgaacggggagaaggtgcttcccaaggatgacattgagtgcccactgggctggaagtgggaagatgaggaatggtccacagacctcaaccgggctgtcgatgagcaaggctgggagtatagcatcaccatccccccggagcggaagccgaagcactgggtccctgctgagaagatgtactacacacaccgacggcggcgctgggtgcgcctgcgcaggagggatctcagccaaatggaagcactgaaaaggcacaggcaggcggaggcggagggcgagggctgggagtacgcctctctttttggctggaagttccacctcgagtaccgcaagacagatgccttccgccgccgccgctggcgccgtcgcatggagccactggagaagacggggcctgcagctgtgtttgcccttgagggggccctgggcggcgtgatggatgacaagagtgaagattccatgtccgtctccaccttgagcttcggtgtgaacagacccacgatttcctgcatattcgactatgggaaccgctaccatctacgctgctacatgtaccaggcccgggacctggctgcgatggacaaggactctttttctgatccctatgccatcgtctccttcctgcaccagagccagaagacggtggtggtgaagaacacccttaaccccacctgggaccagacgctcatcttctacgagatcgagatctttggcgagccggccacagttgctgagcaaccgcccagcattgtggtggagctgtacgaccatgacacttatggtgcagacgagtttatgggtcgctgcatctgtcaaccgagtctggaacggatgccacggctggcctggttcccactgacgaggggcagccagccgtcgggggagctgctggcctcttttgagctcatccagagagagaagccggccatccaccatattcctggttttgaggtgcaggagacatcaaggatcctggatgagtctgaggacacagacctgccctacccaccaccccagagggaggccaacatctacatggttcctcagaacatcaagccagcgctccagcgtaccgccatcgagatcctggcatggggcctgcggaacatgaagagttaccagctggccaacatctcctcccccagcctcgtggtagagtgtgggggccagacggtgcagtcctgtgtcatcaggaacctccggaagaaccccaactttgacatctgcaccctcttcatggaagtgatgctgcccagggaggagctctactgcccccccatcaccgtcaaggtcatcgataaccgccagtttggccgccggcctgtggtgggccagtgtaccatccgctccctggagagcttcctgtgtgacccctactcggcggagagtccatccccacagggtggcccagacgatgtgagcctactcagtcctggggaagacgtgctcatcgacattgatgacaaggagcccctcatccccatccagcttgcagacggtctgtcgagcttggcccccactaacacggcttctcctccatccagtcctcatgaggaagagttcatcgattggtggagcaaattctttgcctccataggggagagggaaaagtgcggctcctacctggagaaggattttgacaccctgaaggtctatgacacacagctggagaatgtggaggcctttgagggcctgtctgacttttgtaacaccttcaagctgtaccggggcaagacgcaggaggagacagaagatccatctgtgattggtgaatttaagggcctcttcaaaatttatcccctcccagaagacccagccatccccatgcccccaagacagttccaccagctggccgcccagggaccccaggagtgcttggtccgtatctacattgtccgagcatttggcctgcagcccaaggaccccaatggaaagtgtgatccttacatcaagatctccatagggaagaaatcagtgagtgaccaggataactacatcccctgcacgctggagcccgtatttggaaagatgttcgagctgacctgcactctgcctctggagaaggacctaaagatcactctctatgactatgacctcctctccaaggacgaaaagatcggtgagacggtcgtcgacctggagaacaggctgctgtccaagtttggggctcgctgtggactcccacagacctactgtgtctctggaccgaaccagtggcgggaccagctccgcccctcccagctcctccacctcttctgccagcagcatagagtcaaggcacctgtgtaccggacagaccgtgtaatgtttcaggataaagaatattccattgaagagatagaggctggcaggatcccaaacccacacctgggcccagtggaggagcgtctggctctgcatgtgcttcagcagcagggcctggtcccggagcacgtggagtcacggcccctctacagccccctgcagccagacatcgagcaggggaagctgcagatgtgggtcgacctatttccgaaggccctggggcggcctggacctcccttcaacatcaccccacggagagccagaaggtttttcctgcgttgtattatctggaataccagagatgtgatcctggatgacctgagcctcacgggggagaagatgagcgacatttatgtgaaaggttggatgattggctttgaagaacacaagcaaaagacagacgtgcattatcgttccctgggaggtgaaggcaacttcaactggaggttcattttccccttcgactacctgccagctgagcaagtctgtaccattgccaagaaggatgccttctggaggctggacaagactgagagcaaaatcccagcacgagtggtgttccagatctgggacaatgacaagttctcctttgatgattttctgggctccctgcagctcgatctcaaccgcatgcccaagccagccaagacagccaagaagtgctccttggaccagctggatgatgctttccacccagaatggtttgtgtccctttttgagcagaaaacagtgaagggctggtggccctgtgtagcagaagagggtgagaagaaaatactggcgggcaagctggaaatgaccttggagattgtagcagagagtgagcatgaggagcggcctgctggccagggccgggatgagcccaacatgaaccctaagcttgaggacccaaggcgccccgacacctccttcctgtggtttacctccccatacaagaccatgaagttcatcctgtggcggcgtttccggtgggccatcatcctcttcatcatcctcttcatcctgctgctgttcctggccatcttcatctacgccttcccgaactatgctgccatgaagctggtgaagcccttcagctgaggactctcctgccctgtagaaggggccgtggggtcccctccagcatgggactggcctgcctcctccgcccagctcggcgagctcctccagacctcctaggcctgattgtcctgccagggtgggcagacagacagatggaccggcccacactcccag

SEQ ID NO: 6149 - DNA, 6657 bp, Homo sapiens
  source 1..6657: mol_type = unassigned DNA; mol_type = unassigned DNA
tctccgcggaggagcagcgaaggcgacagctctcttggcgcggctgcctgggagccgggcgcttgctgggtgggtgctcgggcccggtgctcccgctcccgccctgactgcgcgcctgtgtgccgccggggctgcccagccatgctgtgctgcctgctggtgagggccagcaacctccccagtgcgaagaaggaccggcgcagcgaccctgtcgcaagcctgactttccgaggggtgaagaagagaaccaaagtcatcaagaacagcgtgaaccctgtatggaatgagggatttgaatgggacctcaagggcatccccctggaccagggctctgagcttcatgtggtggtcaaagaccatgagacgatggggaggaacaggttcctgggggaagccaaggtcccactccgagaggtcctcgccacccctagtctgtccgccagcttcaatgcccccctgctggacaccaagaagcagcccacaggggcctcgctggtcctgcaggtgtcctacacaccgctgcctggagctgtgcccctgttcccgccccctactcctctggagccctccccgactctgcctgacctggatgtagtggcaggcgggggacagagccgggccgagacttggtccctgctcagtgacagcaccatggacacgagatactctggaaagaagtggccggcccccacggacacaggaggagaggaagacacagaggaccagggactcactggagatgaggcggagccattcctggatcaaagcggaggcccgggggctcccaccaccccaaggaaactaccttcacgtcctccgccccactaccccgggatcaaaagaaagcgaagtgcgcctacatctagaaagctgctgtcagacaaaccgcaggatttccagatcagggtccaggtgatcgaggggcgccagctgccgggggtgaacatcaagcctgtggtcaaggttaccgctgcagggcagaccaagcggacgcggatccacaagggaaacagcccactcttcaatgagactcttttcttcaacttgtttgactctcctggggagctgtttgatgagcccatctttatcacggtggtagactctcgttctctcaggacagatgctctcctcggggagttccggatggacgtgggcaccatttacagagagccccggcacgcctatctcaggaagtggctgctgctctcagaccctgatgacttctctgctggggccagaggctacctgaaaacaagcctttgtgtgctggggcctggggacgaagcgcctctggagagaaaagacccctctgaagacaaggaggacattgaaagcaacctgctccggcccacaggcgtagccctgcgaggagcccacttctgcctgaaggtcttccgggccgaggacttgccgcagatggacgatgccgtgatggacaacgtgaaacagatctttggcttcgagagtaacaagaagaacttggtggacccctttgtggaggtcagctttgcggggaaaatgctgtgcagcaagatcttggagaagacggccaaccctcagtggaaccagaacatcacactgcctgccatgtttccctccatgtgcgaaaaaatgaggattcgtatcatagactgggaccgcctgactcacaatgacatcgtggctaccacctacctgagtatgtcgaaaatctctgcccctggaggagaaatagaagtggatgactacctgggcttcctccccacttttgggccctgctacatcaacctctatggcagtcccagagagttcacaggcttcccagacccctacacagagctcaacacaggcaagggggaaggtgtggcttatcgtggccggcttctgctctccctggagaccaagctggtggagcacagtgaacagaaggtggaggaccttcctgcggatgacatcctccgggtggagaagtaccttaggaggcgcaagtactccctgtttgcggccttctactcagccaccatgctgcaggatgtggatgatgccatccagtttgaggtcagcatcgggaactacgggaacaagttcgacatgacctgcctgccgctggcctccaccactcagtacagccgtgcagtctttgacgggtgccactactactacctaccctggggtaacgtgaaacctgtggtggtgctgtcatcctactgggaggacatcagccatagaatcgagactcagaaccagctgcttgggattgctgaccggctggaagctggcctggagcaggtccacctggccctgaaggcgcagtgctccacggaggacgtggactcgctggtggctcagctgacggatgagctcatcgcaggctgcagccagcctctgggtgacatccatgagacaccctctgccacccacctggaccagtacctgtaccagctgcgcacccatcacctgagccaaatcactgaggctgccctggccctgaagctcggccacagtgagctccctgcagctctggagcaggcggaggactggctcctgcgtctgcgtgccctggcagaggagccccagaacagcctgccggacatcgtcatctggatgctgcagggagacaagcgtgtggcataccagcgggtgcccgcccaccaagtcctcttctcccggcggggtgccaactactgtggcaagaattgtgggaagctacagacaatctttctgaaatatccgatggagaaggtgcctggcgcccggatgccagtgcagatacgggtcaagctgtggtttgggctctcagtggatgagaaggagttcaaccagtttgctgaggggaagctgtctgtctttgctgaaacctatgagaacgagactaagttggcccttgttgggaactggggcacaacgggcctcacctaccccaagttttctgacgtcacgggcaagatcaagctacccaaggacagcttccgcccctcggccggctggacctgggctggagattggttcgtgtgtccggagaagactctgctccatgacatggacgccggtcacctgagcttcgtggaagaggtgtttgagaaccagacccggcttcccggaggccagtggatctacatgagtgacaactacaccgatgtgaacggggagaaggtgcttcccaaggatgacattgagtgcccactgggctggaagtgggaagatgaggaatggtccacagacctcaaccgggctgtcgatgagcaaggctgggagtatagcatcaccatccccccggagcggaagccgaagcactgggtccctgctgagaagatgtactacacacaccgacggcggcgctgggtgcgcctgcgcaggagggatctcagccaaatggaagcactgaaaaggcacaggcaggcggaggcggagggcgagggctgggagtacgcctctctttttggctggaagttccacctcgagtaccgcaagacagatgccttccgccgccgccgctggcgccgtcgcatggagccactggagaagacggggcctgcagctgtgtttgcccttgagggggccctgggcggcgtgatggatgacaagagtgaagattccatgtccgtctccaccttgagcttcggtgtgaacagacccacgatttcctgcatattcgactatgggaaccgctaccatctacgctgctacatgtaccaggcccgggacctggctgcgatggacaaggactctttttctgatccctatgccatcgtctccttcctgcaccagagccagaagacggtggtggtgaagaacacccttaaccccacctgggaccagacgctcatcttctacgagatcgagatctttggcgagccggccacagttgctgagcaaccgcccagcattgtggtggagctgtacgaccatgacacttatggtgcagacgagtttatgggtcgctgcatctgtcaaccgagtctggaacggatgccacggctggcctggttcccactgacgaggggcagccagccgtcgggggagctgctggcctcttttgagctcatccagagagagaagccggccatccaccatattcctggttttgaggtgcaggagacatcaaggatcctggatgagtctgaggacacagacctgccctacccaccaccccagagggaggccaacatctacatggttcctcagaacatcaagccagcgctccagcgtaccgccatcgagatcctggcatggggcctgcggaacatgaagagttaccagctggccaacatctcctcccccagcctcgtggtagagtgtgggggccagacggtgcagtcctgtgtcatcaggaacctccggaagaaccccaactttgacatctgcaccctcttcatggaagtgatgctgcccagggaggagctctactgcccccccatcaccgtcaaggtcatcgataaccgccagtttggccgccggcctgtggtgggccagtgtaccatccgctccctggagagcttcctgtgtgacccctactcggcggagagtccatccccacagggtggcccagacgatgtgagcctactcagtcctggggaagacgtgctcatcgacattgatgacaaggagcccctcatccccatccagcttgcagacggtctgtcgagcttggcccccactaacacggcttctcctccatccagtcctcatgaggaagagttcatcgattggtggagcaaattctttgcctccataggggagagggaaaagtgcggctcctacctggagaaggattttgacaccctgaaggtctatgacacacagctggagaatgtggaggcctttgagggcctgtctgacttttgtaacaccttcaagctgtaccggggcaagacgcaggaggagacagaagatccatctgtgattggtgaatttaagggcctcttcaaaatttatcccctcccagaagacccagccatccccatgcccccaagacagttccaccagctggccgcccagggaccccaggagtgcttggtccgtatctacattgtccgagcatttggcctgcagcccaaggaccccaatggaaagtgtgatccttacatcaagatctccatagggaagaaatcagtgagtgaccaggataactacatcccctgcacgctggagcccgtatttggaaagatgttcgagctgacctgcactctgcctctggagaaggacctaaagatcactctctatgactatgacctcctctccaaggacgaaaagatcggtgagacggtcgtcgacctggagaacaggctgctgtccaagtttggggctcgctgtggactcccacagacctactgtgtctctggaccgaaccagtggcgggaccagctccgcccctcccagctcctccacctcttctgccagcagcatagagtcaaggcacctgtgtaccggacagaccgtgtaatgtttcaggataaagaatattccattgaagagatagaggctggcaggatcccaaacccacacctgggcccagtggaggagcgtctggctctgcatgtgcttcagcagcagggcctggtcccggagcacgtggagtcacggcccctctacagccccctgcagccagacatcgagcaggggaagctgcagatgtgggtcgacctatttccgaaggccctggggcggcctggacctcccttcaacatcaccccacggagagccagaaggtttttcctgcgttgtattatctggaataccagagatgtgatcctggatgacctgagcctcacgggggagaagatgagcgacatttatgtgaaaggttggatgattggctttgaagaacacaagcaaaagacagacgtgcattatcgttccctgggaggtgaaggcaacttcaactggaggttcattttccccttcgactacctgccagctgagcaagtctgtaccattgccaagaaggatgccttctggaggctggacaagactgagagcaaaatcccagcacgagtggtgttccagatctgggacaatgacaagttctcctttgatgattttctgggctccctgcagctcgatctcaaccgcatgcccaagccagccaagacagccaagaagtgctccttggaccagctggatgatgctttccacccagaatggtttgtgtccctttttgagcagaaaacagtgaagggctggtggccctgtgtagcagaagagggtgagaagaaaatactggcgggcaagctggaaatgaccttggagattgtagcagagagtgagcatgaggagcggcctgctggccagggccgggatgagcccaacatgaaccctaagcttgaggacccaaggcgccccgacacctccttcctgtggtttacctccccatacaagaccatgaagttcatcctgtggcggcgtttccggtgggccatcatcctcttcatcatcctcttcatcctgctgctgttcctggccatcttcatctacgccttcccgaactatgctgccatgaagctggtgaagcccttcagctgaggactctcctgccctgtagaaggggccgtggggtcccctccagcatgggactggcctgcctcctccgcccagctcggcgagctcctccagacctcctaggcctgattgtcctgccagggtgggcagacagacagatggaccggcccacactcccag

SEQ ID NO: 6150 - DNA, 6594 bp, Homo sapiens
  source 1..6594: mol_type = unassigned DNA; mol_type = unassigned DNA
tctccgcggaggagcagcgaaggcgacagctctcttggcgcggctgcctgggagccgggcgcttgctgggtgggtgctcgggcccggtgctcccgctcccgccctgactgcgcgcctgtgtgccgccggggctgcccagccatgctgtgctgcctgctggtgagggccagcaacctccccagtgcgaagaaggaccggcgcagcgaccctgtcgcaagcctgactttccgaggggtgaagaagagaaccaaagtcatcaagaacagcgtgaaccctgtatggaatgagggatttgaatgggacctcaagggcatccccctggaccagggctctgagcttcatgtggtggtcaaagaccatgagacgatggggaggaacaggttcctgggggaagccaaggtcccactccgagaggtcctcgccacccctagtctgtccgccagcttcaatgcccccctgctggacaccaagaagcagcccacaggggcctcgctggtcctgcaggtgtcctacacaccgctgcctggagctgtgcccctgttcccgccccctactcctctggagccctccccgactctgcctgacctggatgtagtggcaggcgggggacagagccgggccgagacttggtccctgctcagtgacagcaccatggacacgagatactctggaaagaagtggccggcccccacggacacaggaggagaggaagacacagaggaccagggactcactggagatgaggcggagccattcctggatcaaagcggaggcccgggggctcccaccaccccaaggaaactaccttcacgtcctccgccccactaccccgggatcaaaagaaagcgaagtgcgcctacatctagaaagctgctgtcagacaaaccgcaggatttccagatcagggtccaggtgatcgaggggcgccagctgccgggggtgaacatcaagcctgtggtcaaggttaccgctgcagggcagaccaagcggacgcggatccacaagggaaacagcccactcttcaatgagactcttttcttcaacttgtttgactctcctggggagctgtttgatgagcccatctttatcacggtggtagactctcgttctctcaggacagatgctctcctcggggagttccggatggacgtgggcaccatttacagagagccccggcacgcctatctcaggaagtggctgctgctctcagaccctgatgacttctctgctggggccagaggctacctgaaaacaagcctttgtgtgctggggcctggggacgaagcgcctctggagagaaaagacccctctgaagacaaggaggacattgaaagcaacctgctccggcccacaggcgtagccctgcgaggagcccacttctgcctgaaggtcttccgggccgaggacttgccgcagatggacgatgccgtgatggacaacgtgaaacagatctttggcttcgagagtaacaagaagaacttggtggacccctttgtggaggtcagctttgcggggaaaatgctgtgcagcaagatcttggagaagacggccaaccctcagtggaaccagaacatcacactgcctgccatgtttccctccatgtgcgaaaaaatgaggattcgtatcatagactgggaccgcctgactcacaatgacatcgtggctaccacctacctgagtatgtcgaaaatctctgcccctggaggagaaatagaagtggatgactacctgggcttcctccccacttttgggccctgctacatcaacctctatggcagtcccagagagttcacaggcttcccagacccctacacagagctcaacacaggcaagggggaaggtgtggcttatcgtggccggcttctgctctccctggagaccaagctggtggagcacagtgaacagaaggtggaggaccttcctgcggatgacatcctccgggtggagaagtaccttaggaggcgcaagtactccctgtttgcggccttctactcagccaccatgctgcaggatgtggatgatgccatccagtttgaggtcagcatcgggaactacgggaacaagttcgacatgacctgcctgccgctggcctccaccactcagtacagccgtgcagtctttgacgggtgccactactactacctaccctggggtaacgtgaaacctgtggtggtgctgtcatcctactgggaggacatcagccatagaatcgagactcagaaccagctgcttgggattgctgaccggctggaagctggcctggagcaggtccacctggccctgaaggcgcagtgctccacggaggacgtggactcgctggtggctcagctgacggatgagctcatcgcaggctgcagccagcctctgggtgacatccatgagacaccctctgccacccacctggaccagtacctgtaccagctgcgcacccatcacctgagccaaatcactgaggctgccctggccctgaagctcggccacagtgagctccctgcagctctggagcaggcggaggactggctcctgcgtctgcgtgccctggcagaggagccccagaacagcctgccggacatcgtcatctggatgctgcagggagacaagcgtgtggcataccagcgggtgcccgcccaccaagtcctcttctcccggcggggtgccaactactgtggcaagaattgtgggaagctacagacaatctttctgaaatatccgatggagaaggtgcctggcgcccggatgccagtgcagatacgggtcaagctgtggtttgggctctcagtggatgagaaggagttcaaccagtttgctgaggggaagctgtctgtctttgctgaaacctatgagaacgagactaagttggcccttgttgggaactggggcacaacgggcctcacctaccccaagttttctgacgtcacgggcaagatcaagctacccaaggacagcttccgcccctcggccggctggacctgggctggagattggttcgtgtgtccggagaagactctgctccatgacatggacgccggtcacctgagcttcgtggaagaggtgtttgagaaccagacccggcttcccggaggccagtggatctacatgagtgacaactacaccgatgtgaacggggagaaggtgcttcccaaggatgacattgagtgcccactgggctggaagtgggaagatgaggaatggtccacagacctcaaccgggctgtcgatgagcaaggctgggagtatagcatcaccatccccccggagcggaagccgaagcactgggtccctgctgagaagatgtactacacacaccgacggcggcgctgggtgcgcctgcgcaggagggatctcagccaaatggaagcactgaaaaggcacaggcaggcggaggcggagggcgagggctgggagtacgcctctctttttggctggaagttccacctcgagtaccgcaagacagatgccttccgccgccgccgctggcgccgtcgcatggagccactggagaagacggggcctgcagctgtgtttgcccttgagggggccctgggcggcgtgatggatgacaagagtgaagattccatgtccgtctccaccttgagcttcggtgtgaacagacccacgatttcctgcatattcgactatgggaaccgctaccatctacgctgctacatgtaccaggcccgggacctggctgcgatggacaaggactctttttctgatccctatgccatcgtctccttcctgcaccagagccagaagacggtggtggtgaagaacacccttaaccccacctgggaccagacgctcatcttctacgagatcgagatctttggcgagccggccacagttgctgagcaaccgcccagcattgtggtggagctgtacgaccatgacacttatggtgcagacgagtttatgggtcgctgcatctgtcaaccgagtctggaacggatgccacggctggcctggttcccactgacgaggggcagccagccgtcgggggagctgctggcctcttttgagctcatccagagagagaagccggccatccaccatattcctggttttgaggtgcaggagacatcaaggatcctggatgagtctgaggacacagacctgccctacccaccaccccagagggaggccaacatctacatggttcctcagaacatcaagccagcgctccagcgtaccgccatcgagatcctggcatggggcctgcggaacatgaagagttaccagctggccaacatctcctcccccagcctcgtggtagagtgtgggggccagacggtgcagtcctgtgtcatcaggaacctccggaagaaccccaactttgacatctgcaccctcttcatggaagtgatgctgcccagggaggagctctactgcccccccatcaccgtcaaggtcatcgataaccgccagtttggccgccggcctgtggtgggccagtgtaccatccgctccctggagagcttcctgtgtgacccctactcggcggagagtccatccccacagggtggcccagacgatgtgagcctactcagtcctggggaagacgtgctcatcgacattgatgacaaggagcccctcatccccatccaggaggaagagttcatcgattggtggagcaaattctttgcctccataggggagagggaaaagtgcggctcctacctggagaaggattttgacaccctgaaggtctatgacacacagctggagaatgtggaggcctttgagggcctgtctgacttttgtaacaccttcaagctgtaccggggcaagacgcaggaggagacagaagatccatctgtgattggtgaatttaagggcctcttcaaaatttatcccctcccagaagacccagccatccccatgcccccaagacagttccaccagctggccgcccagggaccccaggagtgcttggtccgtatctacattgtccgagcatttggcctgcagcccaaggaccccaatggaaagtgtgatccttacatcaagatctccatagggaagaaatcagtgagtgaccaggataactacatcccctgcacgctggagcccgtatttggaaagatgttcgagctgacctgcactctgcctctggagaaggacctaaagatcactctctatgactatgacctcctctccaaggacgaaaagatcggtgagacggtcgtcgacctggagaacaggctgctgtccaagtttggggctcgctgtggactcccacagacctactgtgtctctggaccgaaccagtggcgggaccagctccgcccctcccagctcctccacctcttctgccagcagcatagagtcaaggcacctgtgtaccggacagaccgtgtaatgtttcaggataaagaatattccattgaagagatagaggctggcaggatcccaaacccacacctgggcccagtggaggagcgtctggctctgcatgtgcttcagcagcagggcctggtcccggagcacgtggagtcacggcccctctacagccccctgcagccagacatcgagcaggggaagctgcagatgtgggtcgacctatttccgaaggccctggggcggcctggacctcccttcaacatcaccccacggagagccagaaggtttttcctgcgttgtattatctggaataccagagatgtgatcctggatgacctgagcctcacgggggagaagatgagcgacatttatgtgaaaggttggatgattggctttgaagaacacaagcaaaagacagacgtgcattatcgttccctgggaggtgaaggcaacttcaactggaggttcattttccccttcgactacctgccagctgagcaagtctgtaccattgccaagaaggatgccttctggaggctggacaagactgagagcaaaatcccagcacgagtggtgttccagatctgggacaatgacaagttctcctttgatgattttctgggctccctgcagctcgatctcaaccgcatgcccaagccagccaagacagccaagaagtgctccttggaccagctggatgatgctttccacccagaatggtttgtgtccctttttgagcagaaaacagtgaagggctggtggccctgtgtagcagaagagggtgagaagaaaatactggcgggcaagctggaaatgaccttggagattgtagcagagagtgagcatgaggagcggcctgctggccagggccgggatgagcccaacatgaaccctaagcttgaggacccaaggcgccccgacacctccttcctgtggtttacctccccatacaagaccatgaagttcatcctgtggcggcgtttccggtgggccatcatcctcttcatcatcctcttcatcctgctgctgttcctggccatcttcatctacgccttcccgaactatgctgccatgaagctggtgaagcccttcagctgaggactctcctgccctgtagaaggggccgtggggtcccctccagcatgggactggcctgcctcctccgcccagctcggcgagctcctccagacctcctaggcctgattgtcctgccagggtgggcagacagacagatggaccggcccacactcccag

SEQ ID NO: 6151 - DNA, 515 bp, Homo sapiens
  source 1..515: mol_type = unassigned DNA; mol_type = unassigned DNA
ggacgtatgttgtcaagttgcatcttttctgcctccctgctcacatctgtctgtctcctctcattgcttgcctgttcggttttgtccttagaacggggagaaggtgcttcccaaggatgacattgagtgcccactgggctggaagtgggaagatgaggaatggtccacagacctcaaccgggctgtcgatgagcaaggctgggagtatagcatcaccatccccccggagcggaagccgaagcactgggtccctgctgagaagatgtactacacacaccgacggcggcgctgggtgcgcctgcgcaggagggatctcagccaaatggaagcactgaaaagggtgagccagcaggtggtgggtgggagtgaggcctgtggtcacaggtggccagtaggcacagatgcagacctgcatgcccacagacacatgcatgtgtgcacacagcatgcacagacacctgggactcactggaggtgctcacagatcacacccagcatacccaaagatcacaccc

SEQ ID NO: 6152 - DNA, 669 bp, Homo sapiens
  source 1..669: mol_type = unassigned DNA; mol_type = unassigned DNA
cagatggtccagacggtgaccagagcagtagggagccagtatgagttgttgacaagaagagtgctctggtcagagctaggctttaggaccatcagtcaagcagccatggaggatgcttgggaggcagagcctcccatcaggaaaccccaggagtcttgtgtagagatccaggagagggcggcgtgatggatgacaagagtgaagattccatgtccgtctccaccttgagcttcggtgtgaacagacccacgatttcctgcatattcgactatgggaaccgctaccatctacgctgctacatgtaccaggcccgggacctggctgcgatggacaaggactctttttctgatccctatgccatcgtctccttcctgcaccagagccagaagacggtggtggtgaagaacacccttaaccccacctgggaccagacgctcatcttctacgagatcgagatctttggcgagccggccacagttgctgagcaaccgcccagcattgtggtggagctgtacgaccatgacacttatggtgcagacgagtttatgggtcgctgcatctgtcaaccgagtctggaacggatgccacggctggcctggttcccactgacgaggggcagccagccgtcgggggagctgctggcctcttttgagctcatccagagagaga

SEQ ID NO: 6153 - DNA, 3399 bp, Homo sapiens
  source 1..3399: mol_type = unassigned DNA; mol_type = unassigned DNA
agactgtcctgagggatcactgaaactaggcgtgaagtcagcagccatgggcgggtgatggattgtaattcacctgtgacttgcctatgatacatggaagagaccaaagtggcaaagccccgagtcctgggacagcttggctggcagagagaaccagaaagggaggcggtggcttcagagggcagatcccacagacctgcagctggaggaccagagagttttggaaggtttagggcggcgtgatggatgacaagagtgaagattccatgtccgtctccaccttgagcttcggtgtgaacagacccacgatttcctgcatattcgactatgggaaccgctaccatctacgctgctacatgtaccaggcccgggacctggctgcgatggacaaggactctttttctgatccctatgccatcgtctccttcctgcaccagagccagaagacggtggtggtgaagaacacccttaaccccacctgggaccagacgctcatcttctacgagatcgagatctttggcgagccggccacagttgctgagcaaccgcccagcattgtggtggagctgtacgaccatgacacttatggtgcagacgagtttatgggtcgctgcatctgtcaaccgagtctggaacggatgccacggctggcctggttcccactgacgaggggcagccagccgtcgggggagctgctggcctcttttgagctcatccagagagagaagccggccatccaccatattcctggttttgaggtgcaggagacatcaaggatcctggatgagtctgaggacacagacctgccctacccaccaccccagagggaggccaacatctacatggttcctcagaacatcaagccagcgctccagcgtaccgccatcgagatcctggcatggggcctgcggaacatgaagagttaccagctggccaacatctcctcccccagcctcgtggtagagtgtgggggccagacggtgcagtcctgtgtcatcaggaacctccggaagaaccccaactttgacatctgcaccctcttcatggaagtgatgctgcccagggaggagctctactgcccccccatcaccgtcaaggtcatcgataaccgccagtttggccgccggcctgtggtgggccagtgtaccatccgctccctggagagcttcctgtgtgacccctactcggcggagagtccatccccacagggtggcccagacgatgtgagcctactcagtcctggggaagacgtgctcatcgacattgatgacaaggagcccctcatccccatccaggaggaagagttcatcgattggtggagcaaattctttgcctccataggggagagggaaaagtgcggctcctacctggagaaggattttgacaccctgaaggtctatgacacacagctggagaatgtggaggcctttgagggcctgtctgacttttgtaacaccttcaagctgtaccggggcaagacgcaggaggagacagaagatccatctgtgattggtgaatttaagggcctcttcaaaatttatcccctcccagaagacccagccatccccatgcccccaagacagttccaccagctggccgcccagggaccccaggagtgcttggtccgtatctacattgtccgagcatttggcctgcagcccaaggaccccaatggaaagtgtgatccttacatcaagatctccatagggaagaaatcagtgagtgaccaggataactacatcccctgcacgctggagcccgtatttggaaagatgttcgagctgacctgcactctgcctctggagaaggacctaaagatcactctctatgactatgacctcctctccaaggacgaaaagatcggtgagacggtcgtcgacctggagaacaggctgctgtccaagtttggggctcgctgtggactcccacagacctactgtgtctctggaccgaaccagtggcgggaccagctccgcccctcccagctcctccacctcttctgccagcagcatagagtcaaggcacctgtgtaccggacagaccgtgtaatgtttcaggataaagaatattccattgaagagatagaggctggcaggatcccaaacccacacctgggcccagtggaggagcgtctggctctgcatgtgcttcagcagcagggcctggtcccggagcacgtggagtcacggcccctctacagccccctgcagccagacatcgagcaggggaagctgcagatgtgggtcgacctatttccgaaggccctggggcggcctggacctcccttcaacatcaccccacggagagccagaaggtttttcctgcgttgtattatctggaataccagagatgtgatcctggatgacctgagcctcacgggggagaagatgagcgacatttatgtgaaaggttggatgattggctttgaagaacacaagcaaaagacagacgtgcattatcgttccctgggaggtgaaggcaacttcaactggaggttcattttccccttcgactacctgccagctgagcaagtctgtaccattgccaagaaggatgccttctggaggctggacaagactgagagcaaaatcccagcacgagtggtgttccagatctgggacaatgacaagttctcctttgatgattttctgggctccctgcagctcgatctcaaccgcatgcccaagccagccaagacagccaagaagtgctccttggaccagctggatgatgctttccacccagaatggtttgtgtccctttttgagcagaaaacagtgaagggctggtggccctgtgtagcagaagagggtgagaagaaaatactggcgggcaagctggaaatgaccttggagattgtagcagagagtgagcatgaggagcggcctgctggccagggccgggatgagcccaacatgaaccctaagcttgaggacccaaggcgccccgacacctccttcctgtggtttacctccccatacaagaccatgaagttcatcctgtggcggcgtttccggtgggccatcatcctcttcatcatcctcttcatcctgctgctgttcctggccatcttcatctacgccttcccgaactatgctgccatgaagctggtgaagcccttcagctgaggactctcctgccctgtagaaggggccgtggggtcccctccagcatgggactggcctgcctcctccgcccagctcggcgagctcctccagacctcctaggcctgattgtcctgccagggtgggcagacagacagatggaccggcccacactcccagagttgctaacatggagctctgagatcaccccacttccatcatttccttctcccccaacccaacgcttttttggatcagctcagacatatttcagtataaaacagttggaaccaca

SEQ ID NO: 6154 - DNA, 564 bp, Homo sapiens
  source 1..564: mol_type = unassigned DNA; mol_type = unassigned DNA
gaaatggagcaggcgacagtttgggtagtgggcaggagggagaggagagaggcacatggagaaatttgaggcggcgtgatggatgacaagagtgaagattccatgtccgtctccaccttgagcttcggtgtgaacagacccacgatttcctgcatattcgactatgggaaccgctaccatctacgctgctacatgtaccaggcccgggacctggctgcgatggacaaggactctttttctgatccctatgccatcgtctccttcctgcaccagagccagaagacggtggtggtgaagaacacccttaaccccacctgggaccagacgctcatcttctacgagatcgagatctttggcgagccggccacagttgctgagcaaccgcccagcattgtggtggagctgtacgaccatgacacttatggtgcagacgagtttatgggtcgctgcatctgtcaaccgagtctggaacggatgccacggctggcctggttcccactgacgaggggcagccagccgtcgggggagctgctggcctcttttgagctcatccagagagagaag

SEQ ID NO: 6155 - DNA, 600 bp, Homo sapiens
  source 1..600: mol_type = unassigned DNA; mol_type = unassigned DNA
agtatgatgtgaacccgaataagtagactgaataggagtagggctgctctgggtgaagtgtctggaggaatgggcacagtgccagcctagcatcccttctaccctcaaggaatagaggctgcaaaccatggactgtctgatcactgacatagtccatgagtgtcatgagggtgatgggggccttaggtgacaagcacatgaccagagctctcttttcttcactccagccggccatccaccatattcctggttttgaggtgcaggagacatcaaggatcctggatgagtctgaggacacagacctgccctacccaccaccccagagggaggccaacatctacatggttcctcagaacatcaagccagcgctccagcgtaccgccatcgagatcctggcatggggcctgcggaacatgaagagttaccagctggccaacatctcctcccccagcctcgtggtagagtgtgggggccagacggtgcagtcctgtgtcatcaggaacctccggaagaaccccaactttgacatctgcaccctcttcatggaagtgatgctgcccagggaggagctctactgcccccccatcaccgtcaaggtca

SEQ ID NO: 6156 - DNA, 538 bp, Homo sapiens
  source 1..538: mol_type = unassigned DNA; mol_type = unassigned DNA
agactgaataggagtagggctgctctgggtgaagtgtctggaggaatgggcacagtgccagcctagcatcccttctaccctcaaggaatagaggctgcaaaccatggactgtctgatcactgacatagtccatgagtgtcatgagggtgatgggggccttaggtgacaagcacatgaccagagctctcttttcttcactccagccggccatccaccatattcctggttttgaggtgcaggagacatcaaggatcctggatgagtctgaggacacagacctgccctacccaccaccccagagggaggccaacatctacatggttcctcagaacatcaagccagcgctccagcgtaccgccatcgagcctcgtggtagagtgtgggggccagacggtgcagtcctgtgtcatcaggaacctccggaagaaccccaactttgacatctgcaccctcttcatggaagtgatgctgcccagggaggagctctactgcccccccatcaccgtcaaggtcatcgataaccgccagtttggccgcc

SEQ ID NO: 6157 - DNA, 595 bp, Homo sapiens
  source 1..595: mol_type = unassigned DNA; mol_type = unassigned DNA
ctagtgcgccttgatactaatagagaactttttccccttccaacccctctcaccatctcctggatgtgccacatcccatggctgtgggccaggtgcaggagacatcaaggatcctggatgagtctgaggacacagacctgccctacccaccaccccagagggaggccaacatctacatggttcctcagaacatcaagccagcgctccagcgtaccgccatcgagatcctggcatggggcctgcggaacatgaagagttaccagctggccaacatctcctcccccagcctcgtggtagagtgtgggggccagacggtgcagtcctgtgtcatcaggaacctccggaagaaccccaactttgacatctgcaccctcttcatggaagtgatgctgcccagggaggagctctactgcccccccatcaccgtcaaggtcatcgataaccgccagtttggccgccggcctgtggtgggccagtgtaccatccgctccctggagagcttcctgtgtgacccctactcggcggagagtccatccccacagggtggcccagacgatgtgagcctactcagtcctggggaagacgtgctcatcga

SEQ ID NO: 6158 - DNA, 778 bp, Homo sapiens
  source 1..778: mol_type = unassigned DNA; mol_type = unassigned DNA
agatgataacccggaagggtctgagccaggaggcaggagaaccaggctggcgggcaggcacatggtcctctctgggactgagaggggctgaagtggatctgccaggatggaataggcagtgtgtgcacgcatatgctgttctgaggacacagacctgccctacccaccaccccagagggaggccaacatctacatggttcctcagaacatcaagccagcgctccagcgtaccgccatcgagatcctggcatggggcctgcggaacatgaagagttaccagctggccaacatctcctcccccagcctcgtggtagagtgtgggggccagacggtgcagtcctgtgtcatcaggaacctccggaagaaccccaactttgacatctgcaccctcttcatggaagtgatgctgcccagggaggagctctactgcccccccatcaccgtcaaggtcatcgataaccgccagtttggccgccggcctgtggtgggccagtgtaccatccgctccctggagagcttcctgtgtgacccctactcggcggagagtccatccccacagggtggcccagacgatgtgagcctactcagtcctggggaagacgtgctcatcgacattgatgacaaggagcccctcatccccatccagcttgcagacggtctgtcgagcttggcccccactaacacggcttctcctccatccagtcctcatgaggaagagttcatcgattggtggagcaaattctttgcctccataggggagagggaaaagtgcggctcc

SEQ ID NO: 6159 - DNA, 1709 bp, Homo sapiens
  source 1..1709: mol_type = unassigned DNA; mol_type = unassigned DNA
tgacacaatcacttataaaggatctaaagaacctttacctgaacaaggcagtgaatttcagcgatcaccttctgagcagtgctgccgagggtgatggggggctgtgcggcagcaggtccagctgggtgagtgactacagccagagtacctcagatactattgaaaaaatcaaaaggataaagaatttcaagaccaaaacttttcaagaaaagaaggagcagcttatacctgaaaacagactcctgctgaaggaagtcggacccacgggggaaggaagagtctctgtgattgaacagctgctggatgagggagcagaccccaactgctgtgatgaagacaatcgacccgtcataaccgtggctgttatgaataagcaccatgaagcgattccagttctcgtgcagagaggagcagacatcgaccagcagtgggggccgctcagaaatacagctcttcatgaagcaactctgcttggccttgcaggaagagagagcaccgccactttactgggatgcaatgcaagcatccaaaagaagaatgcaggaggccagacagcatacgacctggctctgaacactggagatgaccttgtcacctcactctttgctgccaagtttggccaagggcttgaggaccaactcgctcaaactaggagcctcagcctggatgactgttagccctgaggcctccacgggacttcatttaagaatacgtgcatggctggcacagtggcttacgcctgtaatcccagcactttgggaggctgaggctggcgtatcacctgaggttgggagttcaagaccagcctgaccaacatggagaaaccccgtctctactaaaaatacaaaattagtcgggcgtagtggtgcatgcctgtaatcccagttactcgagaggctgaggcaggaaaatcgcttgaacccgggaggcagaggttacagtgagccaagatcgcgccatcgcactccagcctgggcaacaagagcaaaactccatctcaaaaaaaaaaaagaatatgtgcagctctggctattctttaatcatgtctttctgaaatgtgtatttgagattagaaattgaggttgagaggaactcaggagattttttttttaaatcatatgacagtataagccatcagtactaaatggacagctcccagtatactgtggactgtgataaactgaatgtatgttttttaatggtttattgctgcaggttttttgtgtatttgatttttagtttttaacttatttttcaataggtaataattgcacatggttcaaagctaaaaggtatgaagtattatgtagggatacgtccctcccattctgtcccacagccaccacctctctcctcagccagcaatgacatcagcgtcgacttgcctttcccggggttgtgcagagttagatatgcacatacatgtggtataagcacatgtacagaggagtacacatagcatataaacatgtctgtagcacatatatattctttcccctcttttaaaacaaatggtagcaaaccaaccacacactgttctgtatcttgctctgtttgcttgatacatcttgtaagtggctcctaattactatgtaaagattgaccttatttaaatttttttatgttgaaatcatcaatattcccatcattatggtgtgttctttgattgacaaatcagctctcaataaaccacttataagaatgtgtaa

SEQ ID NO: 6160 - DNA, 3295 bp, Homo sapiens
  source 1..3295: mol_type = unassigned DNA; mol_type = unassigned DNA
aacccgggcggcggcgaaggaggaggcaagaggcgagagagagagagagagaaaatgactgctggttcagtgtgtgtccctcagatcataccattacgagtgcctcagcctggaaaagctaaccatgaaattgataacaatacgcttttggaaatgaaatcagacactccagatgtcaacatatattatactctggatggcagcaaacctgaatttctaaagagaattggttatggggaaaataacacatttaagtatataaaacctattactctgcctgatggaaaaatacaagttaaagctattgctgtctctaaagactgcagacagagtggcattgtgacaaaggtgtttcacgtagactatgaaccaccaaatatagtctctcctgaagacaatgttgaaaatgttctcaaagattcttcaaggcaggaattcaaaaatggatttgttggatcaaaactaaagaaaaaatataagaactctgaaaatcaacgcagctggaatgttaaccttagaaagtttccagtcccccggttttgcacacgtaagcggtcagaagtgtttgacaagcacggagataatgagaattcaaagggagacagactttctcaagtgtgcccactgccttgccccccggccatcagatccctttgctcgcttctgtcaagaatgtggctctcctgtcccacccatatttggctgtcgtctcccacccccagaaggagctcagatgggcttgtgtgcagaatgcagaagcttggtacccatgaacactcccatctgtgtggtgtgtgaggcccctcttgctctacagctgcagccacaggcaagcctccacttgaaggagaaggtaatttgccgggcctgtggtacaggaaatcctgctcacctgagatactgtgtcacctgtgagggggccctgccttcatcacaagagtcgatgtgcagtggggataaagcccctcctccgcccactcagaaaggggggaccatttcctgctacagatgtggtcgctggaatctctgggaggcgtccttctgcggctggtgtggagccatgctcggcattcctgctggctgttctgtttgccctaaatgtggggccagcaatcacctgtctgcccgattctgtggctcctgtggtatttgtgtgaagtccctagtgaaacttagcttggacagaagcctggctctagctgctgaggaacctcgccctttttctgagccccgatgtgcctggcagtccctgaatattcctttgcccagatctgatgttgggactaagagggacataggaacacagactgttggcctcttctacccatctggcaagctgctagcaaaaaaggaacaggaactagcctctcaaaagcagaggcaggagaaaatgagtgaccataaacccctcctgacagccatcagcccaggaagagggtactggagaagacagctggatcacatctctgctcacctcaggtgttatgctcagaacaaccctgaattccgggccttgattgcagaacccaggatgggaaagcttatctctgctactgtccacgaagatggttgtgaagttagcatcagactgaattatagtcaagtctcaaacaagaacctttacctgaacaaggcagtgaatttcagcgatcaccttctgagcagtgctgccgagggtgatggggggctgtgcggcagcaggtccagctgggtgagtgactacagccagagtacctcagatactattgaaaaaatcaaaaggataaagaatttcaagaccaaaacttttcaagaaaagaaggagcagcttatacctgaaaacagactcctgctgaaggaagtcggacccacgggggaaggaagagtctctgtgattgaacagctgctggatgagggagcagaccccaactgctgtgatgaagacaatcgacccgtcataaccgtggctgttatgaataagcaccatgaagcgattccagttctcgtgcagagaggagcagacatcgaccagcagtgggggccgctcagaaatacagctcttcatgaagcaactctgcttggccttgcaggaagagagagcaccgccactttactgggatgcaatgcaagcatccaaaagaagaatgcaggaggccagacagcatacgacctggctctgaacactggagatgaccttgtcacctcactctttgctgccaagtttggccaagggcttgaggaccaactcgctcaaactaggagcctcagcctggatgactgttagccctgaggcctccacgggacttcatttaagaatacgtgcatggctggcacagtggcttacgcctgtaatcccagcactttgggaggctgaggctggcgtatcacctgaggttgggagttcaagaccagcctgaccaacatggagaaaccccgtctctactaaaaatacaaaattagtcgggcgtagtggtgcatgcctgtaatcccagttactcgagaggctgaggcaggaaaatcgcttgaacccgggaggcagaggttacagtgagccaagatcgcgccatcgcactccagcctgggcaacaagagcaaaactccatctcaaaaaaaaaaaagaatatgtgcagctctggctattctttaatcatgtctttctgaaatgtgtatttgagattagaaattgaggttgagaggaactcaggagattttttttttaaatcatatgacagtataagccatcagtactaaatggacagctcccagtatactgtggactgtgataaactgaatgtatgttttttaatggtttattgctgcaggttttttgtgtatttgatttttagtttttaacttatttttcaataggtaataattgcacatggttcaaagctaaaaggtatgaagtattatgtagggatacgtccctcccattctgtcccacagccaccacctctctcctcagccagcaatgacatcagcgtcgacttgcctttcccggggttgtgcagagttagatatgcacatacatgtggtataagcacatgtacagaggagtacacatagcatataaacatgtctgtagcacatatatattctttcccctcttttaaaacaaatggtagcaaaccaaccacacactgttctgtatcttgctctgtttgcttgatacatcttgtaagtggctcctaattactatgtaaagattgaccttatttaaatttttttatgttgaaatcatcaatattcccatcattatggtgtgttctttgattgacaaatcagctctcaataaaccacttataagaatgtgtaa

SEQ ID NO: 6161 - DNA, 3739 bp, Homo sapiens
  source 1..3739: mol_type = unassigned DNA; mol_type = unassigned DNA
aatctttattcccaaatatctgcaaagcctccccactgtgaagagtcaattagatccatctgagaaggatgtgtgacgcttcaggcactgggtgtgagcatcgataagaaagattcaaggagttaggccagaggatgggctagcctacagtaaggcggccaacccagaggtcttggtcacagggatgttgttgggattgacagaggaagtttataggggtttcacttaagcttgaccatgaacctgatgctagagaggaggttggtagatgcaggcatgggtgggactcaagtgtgatcaaggcaaggatctacactgggcaggggccgccttcgggggctaagccaacatatgtcagcaagtgcttaggcttgaatcaggtgtgagggaccaagtccatggagaaagtccagagagaagagtgtttaaggactgtgtgtgggcaggtggtgtgcagaagtctgattttggtctgactctaccctgcctttgccctctggacttggtggtccctctgttgttacccagactcccacagttgtaacatcctgcctgcatgtgctgctccctgcctcctgccttggccacttcacctggtgagggctacatccagatgtgctgccagctgagcagcccagtccagatacaaagctgcatgtttccagaataaagtgaaacaggggtcactttgtacaaatgaccataaactctttcaaataagaaatgcacaccatgacactttctctatcatgcagctttaattctcacatgggaataaccaagtgattgatatgcaatctcttcattcctaggaattcaaaaatggatttgttggatcaaaactaaagaaaaaatataagaactctgaaaatcaacgcagctggaatgttaaccttagaaagtttccagagagtccattggaaatcccagcttatggtggaggatcaggttctagaccacccacccgccagtcccagtcccccggttttgcacacgtaagcggtcagaagtgtttgacaagcacggagataatgagaattcaaagggagacagactttctcaagtgtgcccactgccttgccccccggccatcagatccctttgctcgcttctgtcaagaatgtggctctcctgtcccacccatatttggctgtcgtctcccacccccagaaggagctcagatgggcttgtgtgcagaatgcagaagcttggtacccatgaacactcccatctgtgtggtgtgtgaggcccctcttgctctacagctgcagccacaggcaagcctccacttgaaggagaaggtaatttgccgggcctgtggtacaggaaatcctgctcacctgagatactgtgtcacctgtgagggggccctgccttcatcacaagagtcgatgtgcagtggggataaagcccctcctccgcccactcagaaaggggggaccatttcctgctacagatgtggtcgctggaatctctgggaggcgtccttctgcggctggtgtggagccatgctcggcattcctgctggctgttctgtttgccctaaatgtggggccagcaatcacctgtctgcccgattctgtggctcctgtggtatttgtgtgaagtccctagtgaaacttagcttggacagaagcctggctctagctgctgaggaacctcgccctttttctgagccccgatgtgcctggcagtccctgaatattcctttgcccagatctgatgttgggactaagagggacataggaacacagactgttggcctcttctacccatctggcaagctgctagcaaaaaaggaacaggaactagcctctcaaaagcagaggcaggagaaaatgagtgaccataaacccctcctgacagccatcagcccaggaagagggtactggagaagacagctggatcacatctctgctcacctcaggtgttatgctcagaacaaccctgaattccgggccttgattgcagaacccaggatgggaaagcttatctctgctactgtccacgaagatggttgtgaagttagcatcagactgaattatagtcaagtctcaaacaagaacctttacctgaacaaggcagtgaatttcagcgatcaccttctgagcagtgctgccgagggtgatggggggctgtgcggcagcaggtccagctgggtgagtgactacagccagagtacctcagatactattgaaaaaatcaaaaggataaagaatttcaagaccaaaacttttcaagaaaagaaggagcagcttatacctgaaaacagactcctgctgaaggaagtcggacccacgggggaaggaagagtctctgtgattgaacagctgctggatgagggagcagaccccaactgctgtgatgaagacaatcgacccgtcataaccgtggctgttatgaataagcaccatgaagcgattccagttctcgtgcagagaggagcagacatcgaccagcagtgggggccgctcagaaatacagctcttcatgaagcaactctgcttggccttgcaggaagagagagcaccgccactttactgggatgcaatgcaagcatccaaaagaagaatgcaggaggccagacagcatacgacctggctctgaacactggagatgaccttgtcacctcactctttgctgccaagtttggccaagggcttgaggaccaactcgctcaaactaggagcctcagcctggatgactgttagccctgaggcctccacgggacttcatttaagaatacgtgcatggctggcacagtggcttacgcctgtaatcccagcactttgggaggctgaggctggcgtatcacctgaggttgggagttcaagaccagcctgaccaacatggagaaaccccgtctctactaaaaatacaaaattagtcgggcgtagtggtgcatgcctgtaatcccagttactcgagaggctgaggcaggaaaatcgcttgaacccgggaggcagaggttacagtgagccaagatcgcgccatcgcactccagcctgggcaacaagagcaaaactccatctcaaaaaaaaaaaagaatatgtgcagctctggctattctttaatcatgtctttctgaaatgtgtatttgagattagaaattgaggttgagaggaactcaggagattttttttttaaatcatatgacagtataagccatcagtactaaatggacagctcccagtatactgtggactgtgataaactgaatgtatgttttttaatggtttattgctgcaggttttttgtgtatttgatttttagtttttaacttatttttcaataggtaataattgcacatggttcaaagctaaaaggtatgaagtattatgtagggatacgtccctcccattctgtcccacagccaccacctctctcctcagccagcaatgacatcagcgtcgacttgcctttcccggggttgtgcagagttagatatgcacatacatgtggtataagcacatgtacagaggagtacacatagcatataaacatgtctgtagcacatatatattctttcccctcttttaaaacaaatggtagcaaaccaaccacacactgttctgtatcttgctctgtttgcttgatacatcttgtaagtggctcctaattactatgtaaagattgaccttatttaaatttttttatgttgaaatcatcaatattcccatcattatggtgtgttctttgattgacaaatcagctctcaataaaccacttataagaatgt

SEQ ID NO: 6162 - DNA, 3310 bp, Homo sapiens
  source 1..3310: mol_type = unassigned DNA; mol_type = unassigned DNA
agagagagagagagagagagaaaatgactgctggttcagtgtgtgtccctcagatcataccattacgagtgcctcagcctggaaaagctaaccatgaaattgataacaatacgcttttggaaatgaaatcagacactccagatgtcaacatatattatactctggatggcagcaaacctgaatttctaaagagaattggttatggggaaaataacacatttaagtatataaaacctattactctgcctgatggaaaaatacaagttaaagctattgctgtctctaaagactgcagacagagtggcattgtgacaaaggtgtttcacgtagactatgaaccaccaaatatagtctctcctgaagacaatgttgaaaatgttctcaaagattcttcaaggcaggaattcaaaaatggatttgttggatcaaaactaaagaaaaaatataagaactctgaaaatcaacgcagctggaatgttaaccttagaaagtttccagagagtccattggaaatcccagcttatggtggaggatcaggttctagaccacccacccgccagtcccagtcccccggttttgcacacgtaagcggtcagaagtgtttgacaagcacggagataatgagaattcaaagggagacagactttctcaagtgtgcccactgccttgccccccggccatcagatccctttgctcgcttctgtcaagaatgtggctctcctgtcccacccatatttggctgtcgtctcccacccccagaaggagctcagatgggcttgtgtgcagaatgcagaagcttggtacccatgaacactcccatctgtgtggtgtgtgaggcccctcttgctctacagctgcagccacaggcaagcctccacttgaaggagaaggtaatttgccgggcctgtggtacaggaaatcctgctcacctgagatactgtgtcacctgtgagggggccctgccttcatcacaagagtcgatgtgcagtggggataaagcccctcctccgcccactcagaaaggggggaccatttcctgctacagatgtggtcgctggaatctctgggaggcgtccttctgcggctggtgtggagccatgctcggcattcctgctggctgttctgtttgccctaaatgtggggccagcaatcacctgtctgcccgattctgtggctcctgtggtatttgtgtgaagtccctagtgaaacttagcttggacagaagcctggctctagctgctgaggaacctcgccctttttctgagtccctgaatattcctttgcccagatctgatgttgggactaagagggacataggaacacagactgttggcctcttctacccatctggcaagctgctagcaaaaaaggaacaggaactagcctctcaaaagcagaggcaggagaaaatgagtgaccataaacccctcctgacagccatcagcccaggaagagggtactggagaagacagctggatcacatctctgctcacctcaggtgttatgctcagaacaaccctgaattccgggccttgattgcagaacccaggatgggaaagcttatctctgctactgtccacgaagatggttgtgaagttagcatcagactgaattatagtcaagtctcaaacaagaacctttacctgaacaaggcagtgaatttcagcgatcaccttctgagcagtgctgccgagggtgatggggggctgtgcggcagcaggtccagctgggtgagtgactacagccagagtacctcagatactattgaaaaaatcaaaaggataaagaatttcaagaccaaaacttttcaagaaaagaaggagcagcttatacctgaaaacagactcctgctgaaggaagtcggacccacgggggaaggaagagtctctgtgattgaacagctgctggatgagggagcagaccccaactgctgtgatgaagacaatcgacccgtcataaccgtggctgttatgaataagcaccatgaagcgattccagttctcgtgcagagaggagcagacatcgaccagcagtgggggccgctcagaaatacagctcttcatgaagcaactctgcttggccttgcaggaagagagagcaccgccactttactgggatgcaatgcaagcatccaaaagaagaatgcaggaggccagacagcatacgacctggctctgaacactggagatgaccttgtcacctcactctttgctgccaagtttggccaagggcttgaggaccaactcgctcaaactaggagcctcagcctggatgactgttagccctgaggcctccacgggacttcatttaagaatacgtgcatggctggcacagtggcttacgcctgtaatcccagcactttgggaggctgaggctggcgtatcacctgaggttgggagttcaagaccagcctgaccaacatggagaaaccccgtctctactaaaaatacaaaattagtcgggcgtagtggtgcatgcctgtaatcccagttactcgagaggctgaggcaggaaaatcgcttgaacccgggaggcagaggttacagtgagccaagatcgcgccatcgcactccagcctgggcaacaagagcaaaactccatctcaaaaaaaaaaaagaatatgtgcagctctggctattctttaatcatgtctttctgaaatgtgtatttgagattagaaattgaggttgagaggaactcaggagattttttttttaaatcatatgacagtataagccatcagtactaaatggacagctcccagtatactgtggactgtgataaactgaatgtatgttttttaatggtttattgctgcaggttttttgtgtatttgatttttagtttttaacttatttttcaataggtaataattgcacatggttcaaagctaaaaggtatgaagtattatgtagggatacgtccctcccattctgtcccacagccaccacctctctcctcagccagcaatgacatcagcgtcgacttgcctttcccggggttgtgcagagttagatatgcacatacatgtggtataagcacatgtacagaggagtacacatagcatataaacatgtctgtagcacatatatattctttcccctcttttaaaacaaatggtagcaaaccaaccacacactgttctgtatcttgctctgtttgcttgatacatcttgtaagtggctcctaattactatgtaaagattgaccttatttaaatttttttatgttgaaatcatcaatattcccatcattatggtgtgttctttgattgacaaatcagctctcaataaaccacttataagaatgt

SEQ ID NO: 6163 - DNA, 3538 bp, Homo sapiens
  source 1..3538: mol_type = unassigned DNA; mol_type = unassigned DNA
gagaggctggcgactgggttgggcgcggcagagatgcattaggggtcccgatcccgggccccgcggttagaggaagaggagggcggctagaggaggggaagagcttcccttactccagccgaaaggatgcagagagagagagagagagaaaatgactgctggttcagtgtgtgtccctcagatcataccattacgagtgcctcagcctggaaaagctaaccatgaaattgataacaatacgcttttggaaatgaaatcagacactccagatgtcaacatatattatactctggatggcagcaaacctgaatttctaaagagaattggttatggggaaaataacacatttaagtatataaaacctattactctgcctgatggaaaaatacaagttaaagctattgctgtctctaaagactgcagacagagtggcattgtgacaaaggtgtttcacgtagactatgaaccaccaaatatagtctctcctgaagacaatgttgaaaatgttctcaaagattcttcaaggcaggaattcaaaaatggatttgttggatcaaaactaaagaaaaaatataagaactctgaaaatcaacgcagctggaatgttaaccttagaaagtttccagagagtccattggaaatcccagcttatggtggaggatcaggttctagaccacccacccgccagtcccaggcaagacacagtcccatttacatttaaaagttttctgtttggccacagtatggagattagaccatggaagaggaaagggagaacattatttaggaggcttttgttccagtcccccggttttgcacacgtaagcggtcagaagtgtttgacaagcacggagataatgagaattcaaagggagacagactttctcaagtgtgcccactgccttgccccccggccatcagatccctttgctcgcttctgtcaagaatgtggctctcctgtcccacccatatttggctgtcgtctcccacccccagaaggagctcagatgggcttgtgtgcagaatgcagaagcttggtacccatgaacactcccatctgtgtggtgtgtgaggcccctcttgctctacagctgcagccacaggcaagcctccacttgaaggagaaggtaatttgccgggcctgtggtacaggaaatcctgctcacctgagatactgtgtcacctgtgagggggccctgccttcatcacaagagtcgatgtgcagtggggataaagcccctcctccgcccactcagaaaggggggaccatttcctgctacagatgtggtcgctggaatctctgggaggcgtccttctgcggctggtgtggagccatgctcggcattcctgctggctgttctgtttgccctaaatgtggggccagcaatcacctgtctgcccgattctgtggctcctgtggtatttgtgtgaagtccctagtgaaacttagcttggacagaagcctggctctagctgctgaggaacctcgccctttttctgagtccctgaatattcctttgcccagatctgatgttgggactaagagggacataggaacacagactgttggcctcttctacccatctggcaagctgctagcaaaaaaggaacaggaactagcctctcaaaagcagaggcaggagaaaatgagtgaccataaacccctcctgacagccatcagcccaggaagagggtactggagaagacagctggatcacatctctgctcacctcaggtgttatgctcagaacaaccctgaattccgggccttgattgcagaacccaggatgggaaagcttatctctgctactgtccacgaagatggttgtgaagttagcatcagactgaattatagtcaagtctcaaacaagaacctttacctgaacaaggcagtgaatttcagcgatcaccttctgagcagtgctgccgagggtgatggggggctgtgcggcagcaggtccagctgggtgagtgactacagccagagtacctcagatactattgaaaaaatcaaaaggataaagaatttcaagaccaaaacttttcaagaaaagaaggagcagcttatacctgaaaacagactcctgctgaaggaagtcggacccacgggggaaggaagagtctctgtgattgaacagctgctggatgagggagcagaccccaactgctgtgatgaagacaatcgacccgtcataaccgtggctgttatgaataagcaccatgaagcgattccagttctcgtgcagagaggagcagacatcgaccagcagtgggggccgctcagaaatacagctcttcatgaagcaactctgcttggccttgcaggaagagagagcaccgccactttactgggatgcaatgcaagcatccaaaagaagaatgcaggaggccagacagcatacgacctggctctgaacactggagatgaccttgtcacctcactctttgctgccaagtttggccaagggcttgaggaccaactcgctcaaactaggagcctcagcctggatgactgttagccctgaggcctccacgggacttcatttaagaatacgtgcatggctggcacagtggcttacgcctgtaatcccagcactttgggaggctgaggctggcgtatcacctgaggttgggagttcaagaccagcctgaccaacatggagaaaccccgtctctactaaaaatacaaaattagtcgggcgtagtggtgcatgcctgtaatcccagttactcgagaggctgaggcaggaaaatcgcttgaacccgggaggcagaggttacagtgagccaagatcgcgccatcgcactccagcctgggcaacaagagcaaaactccatctcaaaaaaaaaaaagaatatgtgcagctctggctattctttaatcatgtctttctgaaatgtgtatttgagattagaaattgaggttgagaggaactcaggagattttttttttaaatcatatgacagtataagccatcagtactaaatggacagctcccagtatactgtggactgtgataaactgaatgtatgttttttaatggtttattgctgcaggttttttgtgtatttgatttttagtttttaacttatttttcaataggtaataattgcacatggttcaaagctaaaaggtatgaagtattatgtagggatacgtccctcccattctgtcccacagccaccacctctctcctcagccagcaatgacatcagcgtcgacttgcctttcccggggttgtgcagagttagatatgcacatacatgtggtataagcacatgtacagaggagtacacatagcatataaacatgtctgtagcacatatatattctttcccctcttttaaaacaaatggtagcaaaccaaccacacactgttctgtatcttgctctgtttgcttgatacatcttgtaagtggctcctaattactatgtaaagattgaccttatttaaatttttttatgttgaaatcatcaatattcccatcattatggtgtgttctttgattgacaaatcagctctcaataaaccactta

SEQ ID NO: 6164 - DNA, 3145 bp, Homo sapiens
  source 1..3145: mol_type = unassigned DNA; mol_type = unassigned DNA
aatgtcaatgcccatcggacgcacaagcctggttccttcattctgagttgggaaaccaacttttagcacttggcaactctgtgaaggaatattcttagatgcctatgggaaagcactgggaaaggaactccaggcgggtaccaggctccctgcggagcggcaggggccggtctagttgctaagaagctgagtctccaccaatcatctgcccagcacccagtgggcggggcgcggctcgccgcgtctgtggtaacccgggcggcggcgaaggaggaggcaagaggcgttttgctgcatttaaattaagtgctgctcttcagcttttgtgtacattggaatttatatgtatatatatatagagagagagagagagagagaaaatgactgctggttcagtgtgtgtccctcagatcataccattacgagtgcctcagcctggaaaagctaaccatgaaattgataacaatacgcttttggaaatgaaatcagacactccagatgtcaacatatattatactctggatggcagcaaacctgaatttctaaagagaattggttatggggaaaataacacatttaagtatataaaacctattactctgcctgatggaaaaatacaagttaaagctattgctgtctctaaagactgcagacagagtggcattgtgacaaaggtgtttcacgtagactatgaaccaccaaatatagtctctcctgaagacaatgttgaaaatgttctcaaagattcttcaaggcaggaattcaaaaatggatttgttggatcaaaactaaagaaaaaatataagaactctgaaaatcaacgcagctggaatgttaaccttagaaagtttccagagagtccattggaaatcccagcttatggtggaggatcaggttctagaccacccacccgccagtcccagtcccccggttttgcacacgtaagcggtcagaagtgtttgacaagcacggagataatgagaattcaaagggagacagactttctcaagtgtgcccactgccttgccccccggccatcagatccctttgctcgcttctgtcaagaatgtggctctcctgtcccacccatatttggctgtcgtctcccacccccagaaggagctcagatgggcttgtgtgcagaatgcagaagcttggtacccatgaacactcccatctgtgtggtgtgtgaggcccctcttgctctacagctgcagccacaggcaagcctccacttgaaggagaaggtaatttgccgggcctgtggtacaggaaatcctgctcacctgagatactgtgtcacctgtgagggggccctgccttcatcacaagagtcgatgtgcagtggggataaagcccctcctccgcccactcagaaaggggggaccatttcctgctacagatgtggtcgctggaatctctgggaggcgtccttctgcggctggtgtggagccatgctcggcattcctgctggctgttctgtttgccctaaatgtggggccagcaatcacctgtctgcccgattctgtggctcctgtggtatttgtgtgaagtccctagtgaaacttagcttggacagaagcctggctctagctgctgaggaacctcgccctttttctgagtccctgaatattcctttgcccagatctgatgttgggactaagagggacataggaacacagactgttggcctcttctacccatctggcaagctgctagcaaaaaaggaacaggaactagcctctcaaaagcagaggcaggagaaaatgagtgaccataaacccctcctgacagccatcagcccaggaagagggtactggagaagacagctggatcacatctctgctcacctcaggtgttatgctcagaacaaccctgaattccgggccttgattgcagaacccaggatgggaaagcttatctctgctactgtccacgaagatggttgtgaagttagcatcagactgaattatagtcaagtctcaaacaaggtgaggaaactgaggctcagagaagttaagcaacctgcttcttccaagggcactaagttagtaagtggcagacccaggattcacacttggcagcctgagaccttcccatcatgacaccctaattccaagacattgaaggactttaagcagagaaatgacacaatcacttataaaggatctaaagaacctttacctgaacaaggcagtgaatttcagcgatcaccttctgagcagtgctgccgagggtgatggggggctgtgcggcagcaggtccagctgggtgagtgactacagccagagtacctcagatactattgaaaaaatcaaaaggataaagaatttcaagaccaaaacttttcaagaaaagaaggagcagcttatacctgaaaacagactcctgctgaaggaagtcggacccacgggggaaggaagagtctctgtgattgaacagctgctggatgagggagcagaccccaactgctgtgatgaagacaatcgacccgtcataaccgtggctgttatgaataagcaccatgaagcgattccagttctcgtgcagagaggagcagacatcgaccagcagtgggggccgctcagaaatacagctcttcatgaagcaactctgcttggccttgcaggaagagagagcaccgccactttactgggatgcaatgcaagcatccaaaagaagaatgcaggaggccagacagcatacgacctggctctgaacactggagatgaccttgtcacctcactctttgctgccaagtttggccaagggcttgaggaccaactcgctcaaactaggagcctcagcctggatgactgttagccctgaggcctccacgggacttcatttaagaatacgtgcatggctggcacagtggcttacgcctgtaatcccagcactttgggaggctgaggctggcgtatcacctgaggttgggagttcaagaccagcctgaccaacatggagaaaccccgtctctactaaaaatacaaaattagtcgggcgtagtggtgcatgcctgtaatcccagttactcgagaggctgaggcaggaaaatcgcttgaacccgggaggcagaggttacagtgagccaagatcgcgccatcgcactccagcctgggcaacaagagcaaaactccatctc

SEQ ID NO: 6165 - DNA, 837 bp, Homo sapiens
  source 1..837: mol_type = unassigned DNA; mol_type = unassigned DNA
agatgcaggaaagtatgttagagaaaatgttggtgaccagtggctgagtgtggattagtagtgaagtctatgctctattggattacagagctgaaaaggatagatatcttccaggcatcaagcaggccggcaaacaccccttgatttgctgacttttagataataaatggctaatcctggatcaggctggaagttgctgagaaagacaggagcaaggaagatgaggcaaaggctggaaaaccctattagttccaaccccgatgtgcctggcagtccctgaatattcctttgcccagatctgatgttgggactaagagggacataggaacacagactgttggcctcttctacccatctggcaagctgctagcaaaaaaggaacaggaactagcctctcaaaagcagaggcaggagaaaatgagtgaccataaacccctcctgacagccatcagcccaggaagagggtactggagaagacagctggatcacatctctgctcacctcaggtgttatgctcagaacaaccctgaattccgggccttgattgcagaacccaggatgggaaagcttatctctgctactgtccacgaagatggttgtgaagttagcatcagactgaattatagtcaagtctcaaacaagaacctttacctgaacaaggcagtgaatttcagcgatcaccttctgagcagtgctgccgagggtgatggggggctgtgcggcagcaggtccagctgggtgagtgactacagccagagtacctcagatactattgaaaaaatcaaaaggataaagaatttcaagaccaaaacttttcaagaaaagaaggagcagctt

SEQ ID NO: 6166 - DNA, 3156 bp, Homo sapiens
  source 1..3156: mol_type = unassigned DNA; mol_type = unassigned DNA
gaggcggtgagaggctggcgactgggttgggcgcggcagagatgcattaggggtcccgatcccgggccccgcggttagaggaagaggagggcggctagaggaggggaagagcttcccttactccagccgaaaggatgcagttttgctgcatttaaattaagtgctgctcttcagcttttgtgtacattggaatttatatgtatatatatatagagagagagagagagagagaaaatgactgctggttcagtgtgtgtccctcagatcataccattacgagtgcctcagcctggaaaagctaaccatgaaattgataacaatacgcttttggaaatgaaatcagacactccagatgtcaacatatattatactctggatggcagcaaacctgaatttctaaagagaattggttatggggaaaataacacatttaagtatataaaacctattactctgcctgatggaaaaatacaagttaaagctattgctgtctctaaagactgcagacagagtggcattgtgacaaaggtgtttcacgtagactatgaaccaccaaatatagtctctcctgaagacaatgttgaaaatgttctcaaagattcttcaaggcaggaattcaaaaatggatttgttggatcaaaactaaagaaaaaatataagaactctgaaaatcaacgcagctggaatgttaaccttagaaagtttccagtcccccggttttgcacacgtaagcggtcagaagtgtttgacaagcacggagataatgagaattcaaagggagacagactttctcaagtgtgcccactgccttgccccccggccatcagatccctttgctcgcttctgtcaagaatgtggctctcctgtcccacccatatttggctgtcgtctcccacccccagaaggagctcagatgggcttgtgtgcagaatgcagaagcttggtacccatgaacactcccatctgtgtggtgtgtgaggcccctcttgctctacagctgcagccacaggcaagcctccacttgaaggtaatgaaatgtgattctgtaaaaacatgaatgaaatacatagtaatgtttgaacaggtatatgtcctttttcagctagtgggatggggtaacaatttttttttttttttgagacagaatcttgttctgtcacacaggctggagtgcagtagcgcaatctcagctcactgcaacctccgcctcctcagttcaagtgattctcctgcctcagcctcctgagtagctggaactacaggcgtgcaccaccacgcatggctaatttttatatttttagtagacatggggtttcatcatcttggccaggctggtctcaaactcctgacctcaggtgatgcgcccacctcagcctcccaaagtgctggattacaggcataagccaccatgcccgccaggatggggtaacaattgataagctaatatacatgaacaaaatccattctatttttagtaaggtatgctgtccaagagtttaatttgccaataggatctataatattaagagagatatgtaggattgtattccctgaacatggatttggagggcaaattgcactacagctaacaaagacaattttttacttcatatatttaaactccaacattgcagttagtgttgatttataattttgtccttaaagtggctcatacttttgtttgccttatttgattataggttcttgttatggagaaaaagaatgactagaactagtcacatggaagaaaaagttatgtatcatcacttacatccaaaaaactttgctcaaaaaatgatatcatactgtgaacatttttttgatagaatctttaaacatacaactaaatattttctccattcttcaatttacagtcccatttacttcctctttaatcccaagtaaaggtcactagaggataaaatagatttaatagagggaatttgggggattaaaaaactaagaatttttagcaataagggaaatgcatggcattatgtacaggccataacactcctaaaatggccttgtgggttgtatatgggcaaaatgtattcagagaaaagataaatccactttttctttcaccttcaagctccctttagcatgaagagttcacaagtgtacaaggctgtgtgagccttcagaaatgagattttgaataactggccaggccaaagtcagtttcaggacatctagggaccgcagtgctggactagaaaggaacacttgagcaccactggtcattatcaatggaaaaagattgtatcctgagagaatagtggagaaggtaatttgccgggcctgtggtacaggaaatcctgctcacctgagatactgtgtcacctgtgagggggccctgccttcatcacaagagtcgatgtgcagtggggataaagcccctcctccgcccactcagaaaggggggaccatttcctgctacagatgtggtcgctggaatctctgggaggcgtccttctgcggctggtgtggagccatgctcggcattcctgctggctgttctgtttgccctaaatgtggggccagcaatcacctgtctgcccgattctgtggctcctgtggtatttgtgtgaagtccctagtgaaacttagcttggacagaagcctggctctagctgctgaggaacctcgccctttttctgagccccgatgtgcctggcagtccctgaatattcctttgcccagatctgatgttgggactaagagggacataggaacacagactgttggcctcttctacccatctggcaagctgctagcaaaaaaggaacaggaactagcctctcaaaagcagaggcaggagaaaatgagtgaccataaacccctcctgacagccatcagcccaggaagagggtactggagaagacagctggatcacatctctgctcacctcaggtgttatgctcagaacaaccctgaattccgggccttgattgcagaacccaggatgggaaaggtgggtgagatgaaatttccactccacaagtgtccacgggatcaggctgaaggaaccctccatggactttgcctgaaactgcatcttgcctggctcctttccctttcctgctctgctttctacactttcttactcttctgccttgtgagctctgctctaataaatcacttgcacatgaa

SEQ ID NO: 6167 - DNA, 464 bp, Homo sapiens
  source 1..464: mol_type = unassigned DNA; mol_type = unassigned DNA
ctcaagtgtgcccactgccttgccccccggccatcagatccctttgctcgcttctgtcaagaatgtggctctcctgtcccacccatatttggctgtcgtctcccacccccagaaggagctcagatgggcttgtgtgcagaatgcagaagcttggtacccatgaacactcccatctgtgtggtgtgtgaggcccctcttgctctacagctgcagccacaggcaagcctccacttgaaggagaaggtaatttgccgggcctgtggtacaggaaatcctgctcacctgagatactgtgtcacctgtgagggggccctgccttcatcacaagagccccgatgtgcctggcagtccctgaatattcctttgcccagatctgatgttgggactaagagggacataggaacacagactgttggcctcttctacccatctggcaagctgctagcaaaaaaggaacaggaact

SEQ ID NO: 6168 - DNA, 3498 bp, Homo sapiens
  source 1..3498: mol_type = unassigned DNA; mol_type = unassigned DNA
agatgcctatgggaaagcactgggaaaggaactccaggcgggtaccaggctccctgcggagcggcaggggccggtctagttgctaagaagctgagtctccaccaatcatctgcccagcacccagtgggcggggcgcggctcgccgcgtctgtggtaacccgggcggcggcgaaggaggaggcaagaggcgagagagagagagagagaaaatgactgctggttcagtgtgtgtccctcagatcataccattacgagtgcctcagcctggaaaagctaaccatgaaattgataacaatacgcttttggaaatgaaatcagacactccagatgtcaacatatattatactctggatggcagcaaacctgaatttctaaagagaattggttatggggaaaataacacatttaagtatataaaacctattactctgcctgatggaaaaatacaagttaaagctattgctgtctctaaagactgcagacagagtggcattgtgacaaaggtgtttcacgtagactatgaaccaccaaatatagtctctcctgaagacaatgttgaaaatgttctcaaagattcttcaaggcaggaattcaaaaatggatttgttggatcaaaactaaagaaaaaatataagaactctgaaaatcaacgcagctggaatgttaaccttagaaagtttccagagagtccattggaaatcccagcttatggtggaggatcaggttctagaccacccacccgccagtcccagtcccccggttttgcacacgtaagcggtcagaagtgtttgacaagcacggagataatgagaattcaaagggagacagactttctcaagtgtgcccactgccttgccccccggccatcagatccctttgctcgcttctgtcaagaatgtggctctcctgtcccacccatatttggctgtcgtctcccacccccagaaggagctcagatgggcttgtgtgcagaatgcagaagcttggtacccatgaacactcccatctgtgtggtgtgtgaggcccctcttgctctacagctgcagccacaggcaagcctccacttgaaggagaaggtaatttgccgggcctgtggtacaggaaatcctgctcacctgagatactgtgtcacctgtgagggggccctgccttcatcacaagagtcgatgtgcagtggggataaagcccctcctccgcccactcagaaaggggggaccatttcctgctacagatgtggtcgctggaatctctgggaggcgtccttctgcggctggtgtggagccatgctcggcattcctgctggctgttctgtttgccctaaatgtggggccagcaatcacctgtctgcccgattctgtggctcctgtggtatttgtgtgaagtccctagtgaaacttagcttggacagaagcctggctctagctgctgaggaacctcgccctttttctgagtccctgaatattcctttgcccagatctgatgttgggactaagagggacataggaacacagactgttggcctcttctacccatctggcaagctgctagcaaaaaaggaacaggaactagcctctcaaaagcagaggcaggagaaaatgagtgaccataaacccctcctgacagccatcagcccaggaagagggtactggagaagacagctggatcacatctctgctcacctcaggtgttatgctcagaacaaccctgaattccgggccttgattgcagaacccaggatgggaaagcttatctctgctactgtccacgaagatggttgtgaagttagcatcagactgaattatagtcaagtctcaaacaagaacctttacctgaacaaggcagtgaatttcagcgatcaccttctgagcagtgctgccgagggtgatggggggctgtgcggcagcaggtccagctgggtgagtgactacagccagagtacctcagatactattgaaaaaatcaaaaggataaagaatttcaagaccaaaacttttcaagaaaagaaggagcagcttatacctgaaaacagactcctgctgaaggaagtcggacccacgggggaaggaagagtctctgtgattgaacagctgctggatgagggagcagaccccaactgctgtgatgaagacaatcgacccgtcataaccgtggctgttatgaataagcaccatgaagcgattccagttctcgtgcagagaggagcagacatcgaccagcagtgggggccgctcagaaatacagctcttcatgaagcaactctgcttggccttgcaggaagagagagcaccgccactttactgggatgcaatgcaagcatccaaaagaagaatgcaggaggccagacagcatacgacctggctctgaacactggagatgaccttgtcacctcactctttgctgccaagtttggccaagggcttgaggaccaactcgctcaaactaggagcctcagcctggatgactgttagccctgaggcctccacgggacttcatttaagaatacgtgcatggctggcacagtggcttacgcctgtaatcccagcactttgggaggctgaggctggcgtatcacctgaggttgggagttcaagaccagcctgaccaacatggagaaaccccgtctctactaaaaatacaaaattagtcgggcgtagtggtgcatgcctgtaatcccagttactcgagaggctgaggcaggaaaatcgcttgaacccgggaggcagaggttacagtgagccaagatcgcgccatcgcactccagcctgggcaacaagagcaaaactccatctcaaaaaaaaaaaagaatatgtgcagctctggctattctttaatcatgtctttctgaaatgtgtatttgagattagaaattgaggttgagaggaactcaggagattttttttttaaatcatatgacagtataagccatcagtactaaatggacagctcccagtatactgtggactgtgataaactgaatgtatgttttttaatggtttattgctgcaggttttttgtgtatttgatttttagtttttaacttatttttcaataggtaataattgcacatggttcaaagctaaaaggtatgaagtattatgtagggatacgtccctcccattctgtcccacagccaccacctctctcctcagccagcaatgacatcagcgtcgacttgcctttcccggggttgtgcagagttagatatgcacatacatgtggtataagcacatgtacagaggagtacacatagcatataaacatgtctgtagcacatatatattctttcccctcttttaaaacaaatggtagcaaaccaaccacacactgttctgtatcttgctctgtttgcttgatacatcttgtaagtggctcctaattactatgtaaagattgaccttatttaaatttttttatgttgaaatcatcaatattcccatcattatggtgtgttctttgattgacaaatcagctctcaataaaccacttataagaatgtgt

SEQ ID NO: 6169 - DNA, 1389 bp, Homo sapiens
  source 1..1389: mol_type = unassigned DNA; mol_type = unassigned DNA
atgggcttgtgtgcagaatgcagaagcttggtacccatgaacactcccatctgtgtggtgtgtgaggcccctcttgctctacagctgcagccacaggcaagcctccacttgaaggagaaggtaatttgccgggcctgtggtacaggaaatcctgctcacctgagatactgtgtcacctgtgagggggccctgccttcatcacaagagctcggcattcctgctggctgttctgtttgccctaaatgtggggccagcaatcacctgtctgcccgattctgtggctcctgtggtatttgtgtgaagtccctagtgaaacttagcttggacagaagcctggctctagctgctgaggaacctcgccctttttctgagtccctgaatattcctttgcccagatctgatgttgggactaagagggacataggaacacagactgttggcctcttctacccatctggcaagctgctagcaaaaaaggaacaggaactagcctctcaaaagcagaggcaggagaaaatgagtgaccataaacccctcctgacagccatcagcccaggaagagggtactggagaagacagctggatcacatctctgctcacctcaggtgttatgctcagaacaaccctgaattccgggccttgattgcagaacccaggatgggaaagcttatctctgctactgtccacgaagatggttgtgaagttagcatcagactgaattatagtcaagtctcaaacaagaacctttacctgaacaaggcagtgaatttcagcgatcaccttctgagcagtgctgccgagggtgatggggggctgtgcggcagcaggtccagctgggtgagtgactacagccagagtacctcagatactattgaaaaaatcaaaaggataaagaatttcaagaccaaaacttttcaagaaaagaaggagcagcttatacctgaaaacagactcctgctgaaggaagtcggacccacgggggaaggaagagtctctgtgattgaacagctgctggatgagggagcagaccccaactgctgtgatgaagacaatcgacccgtcataaccgtggctgttatgaataagcaccatgaagcgattccagttctcgtgcagagaggagcagacatcgaccagcagtgggggccgctcagaaatacagctcttcatgaagcaactctgcttggccttgcaggaagagagagcaccgccactttactgggatgcaatgcaagcatccaaaagaagaatgcaggaggccagacagcatacgacctggctctgaacactggagatgaccttgtcacctcactctttgctgccaagtttggccaagggcttgaggaccaactcgctcaaactaggagcctcagcctggatgactgttag

SEQ ID NO: 6170 - DNA, 3493 bp, Homo sapiens
  source 1..3493: mol_type = unassigned DNA; mol_type = unassigned DNA
caagccacgagctgaccgacgcaccgaggagctctctgtccgcggtcccgcaggttggcggcactggagtgggccgggcaggctctgcctccgccgcagagagcgcccggactgcgtggggctggggaagcatcccgggaacggcgggcggtgagcattccgggaaccatctctgggctgtctggggcggtggagcaagtctggaggcgggacgtggggcgagtatgggagccgccacctcgagacgtcttcccgccgtccccggctccaggagaccccacggccttctctcagctccttggcctactgccgtggccttggtgcccccctcctctggtggtcagctcagggcttcctctgcccatgcagtccccagctgccactgctgagggcctcagtggccccctctttggggcctacacgttccccaccttcaagtttcagcctcgccatgatagcatggactggagacgcattagcaccctggatgtagaccgcgtggcccgggaactggatgtggccactctgcaggagaatattgctggcatcaccttctgcaacttggaccgggaggtgtgcagccgctgtgggcagcctgtggacccggcactgctcaaggtgctgcgcctggcgcagctcatcattgagtacctgctgcactgccaggattgcctgagtgccagtgttgcccagctggaggcacggctgcagaccagcctgggccagcagcagcgtggtcagcaggagctgggacgccaggctgacgagctcaagggtgtgcgggaggagagccgccggcgtcgcaagatgatcagcaccctgcagcagctgctaatgcagacaggcacccacagctaccacacgtgccacctgtgtgacaagacattcatgaatgccacctttctccggggccacatccagcgcaggcatgcaggcgtggcagaaggtggaaaacagaagaaacaggaacagccagtggaagaggtgttagaagagctacgggccaagctaaagtggacccaaggggagctggaagcccagagggaggcggagaggcagcggcagctccaggaagcagagctcattcatcagagggaaatagaagctaagaaagaatttgataaatggaaagagcaagagtggaccaaactttatggggaaatagataaactaaaaaaattattttgggatgaatttaaaaatgtcgccaagcagaactctacactagaagagaaactgcgggcactgcagtcccacagtgtgatggagtccaagctgggatcactgcgagatgaggagtcagaggagtggcttcggcaggcacgggagcttcaggccctgagagagaagacagaaattcagaaaacggagtggaaaagaaaagtgaaggaactgcatgaagagcacatggctgagaagaaagagctacaggaggagaaccagaggctccaggcctccctgtctcaggatcagaagaaggcagctgcccagtcccagtgccagatcagcaccctccgtgcccagctgcaggaacaagctaggatcattgcctcccaggaggagatgatccagtccttgtctctcaggaaggtggaagggatccacaaggtgccaaaggctgtggacacagaggaggactctccagaggaagagatggaggactcccaggatgaacagcacaaggtgctggcagctctgaggcgtaaccccactttgctgaagcacttcagaccaatcctggaggacaccctggaagagaagctcgaaagcatggggataaggaaggatgcaaagggaatctcgattcagactctcagacacctggaatccctgctgagagtccagcgggagcagaaggcccggaagttttctgaatttctgagtctgaggggaaagcttgtcaaggaagtcaccagcagagcgaaggagagacaggagaatggcgctgtggtgtcccagccagacgggcagccttcagtcaaaagccagcagagcacactggtcaccagagaggcccagccaaagaccaggaccctgcaggtggccttgccatccacaccggcagagccacccccaccaactcgtcagagccatggcagccatggctccagcctgacccaggtgtccgcccccgctccacgccccggactgcatggaccctccagcacccctccttcctcggggcccgggatgagcacgcccccgttcagttctgaagaggactcagagggagaccgtgtgcagcgtgtgtctctacagcccccaaaagttccttccaggatggtgccccggcccaaggatgactgggactggtctgacacagagacctcggaggagaatgcccagccccctggccagggctcaggaacactggtgcagtcgatggtcaaaaacctggagaagcagctagaagctccagcaaagaagcctgctggaggggtcagtctgttttttatgcccaatgctgggccacagagggctgccacaccaggaaggaagcctcagctttctgaagatgagagtgacttggagatctcctccttggaagatcttcctctggacctggaccagagagagaaacccaagcccttgtctcgctcaaagctcccagagaagtttggcactggtccacagagctctggccaacccagggtccctgcctggtgattcaccccagaagctagctggctagagggttagcctggctggggccagctcaggtccacttcaacagaagaggctgctgggcctcttgtcttcacaaacaaccaagagatcatcctcttggagagaagcagtgcagggaatggatatgatctcatccctcctgacctgtgaggggccctgctgtagatggccacaggtgcctgactaggagcccctaggtccccaggcttgagaaagggttaaaatagaacctccaggtagttttcttcctctacctccacatccccccaagactgaaaagagtcactaactctcttttcccaagccttttataaaactgcaggaacactgtggagatggttcctatctggggtccttttggggacatatgcctcagtcagtcattcagtgattgatccaaaattatttactgagtgcctacctactctgcgccaggctctctagcctctcactactgagttagggtgcaggcagaggctggggcagaatgtttacagccagtgccagcacaaggtagtaatctagtgacagagaacagggtgttatggggagcatatgagaggccatctatcccagcctgggtgatcctggagagtttcccagggttgtgatatgtggcaggcctactcatgggtgggaagggaggatggccacttggctggaccttgtatccccaaaggaccacacgtgtaatttttgatattatttccaaaatcaggttttatacatagccattgtatatttttagtgtgaaaaacattaatatattatatgcaaacatttaaatatagtacaatgtttttaa

SEQ ID NO: 6171 - DNA, 475 bp, Homo sapiens
  source 1..475: mol_type = unassigned DNA; mol_type = unassigned DNA
acagcccccaaaagttccttccaggatggtgccccggcccaaggatgactgggactggtctgacacagagacctcggaggagaatgcccagccccctggccagggctcaggaacactggtgcagtcgatggtcaaaaacctggagaagcagctagaagctccagcaaagaagcctgctggaggggtcagtctgttttttatgcccaatgctgggccacagagggctgccacaccaggaaggaagcctcaggtaggatgtaggatgcttagagtttactctggaattctctacagaaccagctctgagtttggggggcctggggtgaaggttggggagggcccagcaagtgtcatcctttgccctagtgggacattgtgggtgacctccctctgcccctgtgcacatggagagatggccagtttggaatacttgtatccaagttaacattaaaaagccttttggttcattatataa

SEQ ID NO: 6172 - DNA, 561 bp, Homo sapiens
  source 1..561: mol_type = unassigned DNA; mol_type = unassigned DNA
tttatggggaaatagataaactaaaaaaattattttgggatgaatttaaaaatgtcgccaagcagaactctacactagaagagaaactgcgggcactgcagtcccacagtgtgatggagtccaagctgggatcactgcgagatgaggagtcagaggagtggcttcggcaggcacgggagcttcaggccctgagagagaagacagaaattcagaaaacggagtggaaaagaaaagtgaaggaactgcatgaagagcacatggctgagaagaaagagatccagtccttgtctctcaggaaggtggaagggatccacaaggtgccaaaggctgtggacacagaggaggactctccagaggaagagatggaggactcccaggatgaacagcacaaggtgctggcagctctgaggcgtaaccccactttgctgaagcacttcagaccaatcctggaggacaccctggaagagaagctcgaaagcatggggataaggaagtcaaaagccagcagagcacactggtcaccagagaggcccagccaaagaccaggaccctgcaggtggc

SEQ ID NO: 6173 - DNA, 2107 bp, Homo sapiens
  source 1..2107: mol_type = unassigned DNA; mol_type = unassigned DNA
aggtttgtaaatgattgcctggcagccaccttggaaacttggctccctcaagttctcctcttgactgcattcttgaggaagcagaagagacagacgcaagctgtggagctgagtcgggttcagacaagccctgctgaaatacagggagaatttagaatccccaacactaaccctgtggtgatttgctgtaaactctgtcagcgcttgcactttggtcaagaaaactcaggccttctctcagctccttggcctactgccgtggccttggtgcccccctcctctggtggtcagctcagggcttcctctgcccatgcagtccccagctgccactgctgagggcctcagtggccccctctttggggcctacacgttccccaccttcaagtttcagcctcgccatgatagcatggactggagacgcattagcaccctggatgtagaccgcgtggcccgggaactggatgtggccactctgcaggagaatattgctggcatcaccttctgcaacttggaccgggaggtgtgcagccgctgtgggcagcctgtggacccggcactgctcaaggtgctgcgcctggcgcagctcatcattgagtacctgctgcactgccaggattgcctgagtgccagtgttgcccagctggaggcacggctgcagaccagcctgggccagcagcagcgtggtcagcaggagctgggacgccaggctgacgagctcaagggtgtgcgggaggagagccgccggcgtcgcaagatgatcagcaccctgcagcagctgctaatgcagacaggcacccacagctaccacacgtgccacctgtgtgacaagacattcatgaatgccacctttctccggggccacatccagcgcaggcatgcaggcgtggcagaaggtggaaaacagaagaaacaggaacagccagtggaagaggtgttagaagagctacgggccaagctaaagtggacccaaggggagctggaagcccagagggaggcggagaggcagcggcagctccaggaagcagagctcattcatcagagggaaatagaagctaagaaagaatttgataaatggaaagagcaagagtggaccaaactttatggggaaatagataaactaaaaaaattattttgggatgaatttaaaaatgtcgccaagcagaactctacactagaagagaaactgcgggcactgcagtcccacagtgtgatggagtccaagctgggatcactgcgagatgaggagtcagaggagtggcttcggcaggcacgggagcttcaggccctgagagagaagacagaaattcagaaaacggagtggaaaagaaaagtgaaggaactgcatgaagagcacatggctgagaagaaagagctacaggaggagaaccagaggctccaggcctccctgtctcaggatcagaagaaggcagctgcccagtcccagtgccagatcagcaccctccgtgcccagctgcaggaacaagctaggatcattgcctcccaggaggagatgatccagtccttgtctctcaggaaggtggaagggatccacaaggtgccaaaggctgtggacacagaggaggactctccagaggaagagatggaggactcccaggatgaacagcacaaggtgctggcagctctgaggcgtaaccccactttgctgaagcacttcagaccaatcctggaggacaccctggaagagaagctcgaaagcatggggataaggaaggatgcaaagggaatctcgattcagactctcagacacctggaatccctgctgagagtccagcgggagcagaaggcccggaagttttctgaatttctgagtctgaggggaaagcttgtcaaggaagtcaccagcagagcgaaggagagacaggagaatggcgctgtggtgtcccagccagacgggcagccttcaggctgaagaggaggaggaagaggaggggttgctcttgctgtctcacgggtggcagagtcggaagaaaatccacgtataagtggacccatggctgttcaaccccacgttgtttcggggtcaactgtatttcaaacattttctgatcttgaattactgtaagaaactcattttacattgtgaccc

SEQ ID NO: 6174 - DNA, 368 bp, Homo sapiens
  source 1..368: mol_type = unassigned DNA; mol_type = unassigned DNA
ctcaaagcagagttctcacaatgttctctgctggttgtaacccgctctattccacctctttgcagatccagtccttgtctctcaggaaggtggaagggatccacaaggtgccaaaggctgtggacacagaggaggactctccagaggaaggtgggaccttactttctttcctgggtgtccagtgcagaaacagatttgctgccctcctccttgtttagtttgtctctacttaactgtatctggacatccgaagctggagtggagggatctaaggacatgaaataatatttcttaacaccttctgtgtgccaggcatgtgacatgcaggtactaacatacaatctgctggtttagtgatggggaagccc

SEQ ID NO: 6175 - DNA, 572 bp, Homo sapiens
  source 1..572: mol_type = unassigned DNA; mol_type = unassigned DNA
ggagtcctcagggagtggcctggggtgagaccctcccataggctctaagagtctcattctcatcagtgtattccagactgaggaagaaatggggcagcagtcaggagagctcgggattttgagtatagcagaatttaagtgaaatggaaactacactctttaatttgttcttccatggaattgctttttctatgcaagggctgagcccccaggagagcccttgtgaagggaatgctgatttgtgtgaatatctgtaggtgagtaggtatctagtgaggatgagttgggaggatgagttgggtaaggcgtgcccctctgacactgttctgggtataaaagacaacatcatgatgagatcttcatctgaataaaactatgccctggccttttcagaaactgcgggcactgcagtcccacagtgtgatggagtccaagctgggatcactgcgagatgaggagtcagaggagtggcttcggcaggcacgggagcttcaggccctgagagagaagacagaaattcagaaaacggagtggaaaagaaaagtgaaggaactgcatgaagagcacatggc

SEQ ID NO: 6176 - DNA, 708 bp, Homo sapiens
  source 1..708: mol_type = unassigned DNA; mol_type = unassigned DNA
gcaacttggaccgggaggtgtgcagccgctgtgggcagcctgtggacccggcactgctcaaggtgctgcgcctggcgcagctcatcattgagtacctgctgcactgccaggattgcctgagtgccagtgttgcccagctggaggcacggctgcagaccagcctgggccagcagcagcgtggtcagcaggagctgggacgccaggctgacgagctcaagggtgtgcgggaggagagccgccggcgtcgcaagatgatcagcaccctgcagcagctgctaatgcagacaggcacccacagctaccacacgtgccacctgtgtgacaagacattcatgaatgccacctttctccggggccacatccagcgcaggcatgcaggcgtggcagaaggtggaaaacagaagaaacaggaacagccagtggaagaggtgttagaagagctacgggccaagctaaagtggacccaaggggagctggaagcccagagggaggcggagaggcagcggcagctccaggaagcagagctcattcatcagagggaaatagaagctaagaaagaatttgataaatggaaagagcaagagtggaccaaactttatggggaaatagataaactaaaaaaattattttgggatgaatttaaaaatgtcgccaagcagaactctacactagaagaggtacccaacataaaaggctttttaaagtttc

SEQ ID NO: 6177 - DNA, 571 bp, Homo sapiens
  source 1..571: mol_type = unassigned DNA
cccaagccacgagctgaccgacgcaccgaggagctctctgtccgcggtcccgcaggttggcggcactggagtgggccgggcaggctctgcctccgccgcagagagcgcccggactgcgtggggctggggaagcatcccgggaacggcgggcggacgcaagctgtggagctgagtcgggttcagacaagccctgctgaaatacagggagaatttagaatccccaacactaaccctgtggtgatttgctgtaaactctgtcagcgcttgcactttggtcaagaaaactcaggccttctctcagctccttggcctactgccgtggccttggtgcccccctcctctggtggtcagctcagggcttcctctgcccatgcagtccccagctgccactgctgagggcctcagtggccccctctttggggcctacacgttccccaccttcaagtttcagcctcgccatgatagcatggactggagacgcattagcaccctggatgtagaccgcgtggcccgggaactggatgtggccactctgcaggagaatattgctggcatcaccttctgcaacttg

SEQ ID NO: 6178 - DNA, 827 bp, Homo sapiens
  source 1..827: mol_type = unassigned DNA
aaaccggggcaagtccagcctctcagcaaggccaggaagccattcacttggatcctggattttactaacggattaaacgtggcattcccgccttcccccatccgttacagacctaaaaatagctcgtccgagaggggccgggagaggctccacctcttcttgaggtggggcggggcggctgtagtaggagctggaggcaccagagaccccaagccacgagctgaccgacgcaccgaggagctctctgtccgcggtcccgcaggttggcggcactggagtgggccgggcaggctctgcctccgccgcagagagcgcccggactgcgtggggctggggaagcatcccgggaacggcgggcggtgagcattccgggaaccatctctgggctgtctggggcggtggagcaagtctggaggcgggacgtggggcgagtatgggagccgccacctcgagacgtcttcccgccgtccccggctccaggagaccccacggacgcaagctgtggagctgagtcgggttcagacaagccctgctgaaatacagggagaatttagaatccccaacactaaccctgtggtgatttgctgtaaactctgtcagcgcttgcactttggtcaagaaaactcaggccttctctcagctccttggcctactgccgtggccttggtgcccccctcctctggtggtcagctcagggcttcctctgcccatgcagtccccagctgccactgctgagggcctcagtggccccctctttggggcctacacgttccccaccttcaagtttcagcctcgccatgatagcatggactggagacgcattagca

SEQ ID NO: 6179 - DNA, 4749 bp, Homo sapiens
  source 1..4749: mol_type = unassigned DNA
aaataataaagaaattgaaaacaatacattaatataccataacactaaaaagagcaggagcgagagatgagaaagggaatccagcccgctctggagcagtacctggtgaccgccgggggtggggagggggcggctgtcgtcgccgccgccgctgcagcctccatggacaaaagggcactgctagccagccccggcttcgccgccgccgccgccgctgccgccgccccgggcgcgtacatccagatcctcaccacgaacacttccaccacctcctgttcctcctccctccaaagcggcgccgtagccgccggccccctcctccccagtgcccccggcgcggagcagaccgccggcagcctcctctacaccacgccgcacggaccctccagcagagccgggctgctgcagcagccaccagcgctgggacgcggcggcagcggcggcggcggcggccctccggcaaagcgaaggctggagctaggagaaagcggtcatcagtacctctcagatggtttaaaaacccccaagggcaaaggaagagctgcactacgaagtccagatagtccaaaaactccaaaatctccctcagaaaaaacgcggtatgatacgtctcttggtctgctcaccaagaagttcattcagctcctgagccagtcacccgatggggtattggatttgaacaaggcagcagaagtgctaaaagtgcaaaagagaaggatttatgatatcaccaacgttctggaaggcatccacctcattaagaagaagtctaaaaacaacgtccaatggatgggctgcagtctgtctgaggatgggggcatgctggcccagtgtcaaggcctgtcaaaagaagtgaccgagctcagtcaggaagagaagaaattagatgaactgatccaaagctgcaccctggacctcaaactgttaaccgaggattcagagaatcaaaggttagcttatgttacatatcaagatattcgaaaaattagtggccttaaagaccaaactgttatagttgtgaaagcccctccagaaacaagacttgaagtgcctgactcaatagagagcctacaaatacatttggcaagtacccaagggcccattgaggtttacttatgtccagaagagactgaaacacacagtccaatgaaaacaaacaaccaagaccacaatgggaatatccctaaacccgcttccaaagacttggcttcaaccaactcaggacatagcgattgctcagtttctatgggaaacctttctcctctggcctccccagccaacctcttacagcagactgaggaccaaattccttccaacctagaaggaccgtttgtgaacttactgcctcccctgctgcaagaggactatctcctgagcctcggggaggaggaaggcatcagcgatctcttcgatgcttacgatttggaaaagctcccactggtggaagacttcatgtgtagttgattatgcttcgtgtgaactctccttaaaaaccgatatttttttatcatggaaccagaacatctgtcatgcagtgttgtcccttcctaccttcttcctccaagagagtatcatgaagtaaactacaaacttcagaagaaagctgacattttaatgaattttttaaaaaattaataaacaaattgtctaaacgcacagttgcaggctcccttgggaaagccctgctttgctccaggctccaagatctcctggctaagtcagcaagtgagaaaatgtgcaatcaggtgtctctcaccccgaattgtccttcctccttcctccccggattggcttgctgtgcctgacggatgggctgtagaatggggtctggccacctggcctgctgggaaacagcaatcttccttaatagcatttcaagccgtgccttctccgcagaatgcatgtctttgaggtctgctaatatggaatggaactgcagcaaatgcaaacttgaagtcatgcaaaagtatgaaatggatttcttcagctcttcttaggaatatttaaattactgtcataattcagtttaagctatgaactgtgtgtcccagtaggaggtcaagaaaacctccacagccttctggatgaagaacctgttttcaaatatacttgttgcagatacagaagactagtagagttctgccactctaagctgttgtggattttcctgtctccatgaaccactcccattcccccgtccccaatgtgtttgtgagtttccagttgatttgtagcaaatgcctacttagttctttgtggattgttctagacttttaatttttttagctgccatttaagcattcctgtggcacccatcaccatttcaatttaattgtttactttgaagcggtttttgcaaattcatattacttaagcagagggagagaacctctactgatcagagcatctaaacctgtgtgatctaaggtttatcagcctctgcaaggagctttgtcccatcgtgcttccattcccaggagggggagcttggagcgagtcagtcctggggcttgctgacatgggtggcccattggaaaggagaaccaggtcagatgatgtaacagccccaaggagcagcaggcatgggtccctccatccttgggcttcccgggcccctgtgacaggggaaagggctctcttacaccgcactcagggagaccacttctcaggatggggtcagatggagagacctctagggagaaagacatccccattgtgtgagtggcatttccttaagctggcaggaacagggagcagccctgtgtcgggggctggaatagttctggccagaccccgttccccttcctctatgaaggaataagttggaccaagggaagtcggggacgtaaaaaatgaagcaaaacaatgccagggtgtctcccgctttactcttcaggaatggtgtcccaagttggaggctttgtgtcagctgcaaatcctaccagttatgtccaagaatggctttccctcgggcaggtggcagcggccatctcccactgggaatatggcgtagtatctccggtccattccttggatgctaaggactgcgggaatgagggagtcagataaagaacaaacctcgaaacgaacagttaaattgaaatgctatgtgcctgacccaatggtaggcacatagtaggcactcaactcatatgtttaattgaattgaaaatatcccttaggaaaaaaaaaaaacacacaaaaaaccacaagagccccagccagtttactccaggtagatttccacaatatgcaaagtggtggtggggtcaagacagatgacaccagcactttaaactctttgtgtgggtatgcgtgggtgtatgtttgggaagaaaaacaaaggtgcagactatcttcctttttttcttcttcagcctccatccctggcctcctcccctcacacacactggacttggtacaaaatgtcggtgtggtcctagatgaagcattggggtgggggagggagagggagctttgtgttaagtgcctactggaaatgcactgtggggttttttcctgtatgggaaaccatttatgccaagcttttccccatttcccatatttatctcatctggttagctgcctctgcttccagctttgtgtaattctctttgccagctgcacaaagctgattttttccaaagtctaaagactgagctcacctggctagattgttgtgtgttttgttgaattttttcataatgtaatgccgtatttattgtttttaaaatgaaaggaatactaataagtcttaaaagttccttcatgcataagatttttttccagttactgggtttaactggtgtacattaattagatgtccatactgtattttgtttgcattaagtaattttctttttgacttagtatccggcacacaaagtgggttagtactacagtatttgcgttactttaagtactaagtatgcaggtttcctggtaccattgagttgctgctattaaagctcacacacgaaatggctaaaagttacaagtgtgcaaattatgactgcgtgagccttagaaaataaaatgtataaagggcaacacatgagctgtcaaacagtgttaggagtgtgtttatatgtacagagttgtgcatagcaatcgttttatttaagttgatatgtagtctactcacattttcattatttagcaattttgtacaaaaatagcaattaatttgtaaacactgccagaatactttctagctgctttgtaattttttaagagtgttattttgtttttgtttttctgttctttgttgtggctcttgttttcatttttgttgtacgtgtagatctgtaaataaaattgcagtatttaaagcttaagctttcaggaaaaagaaaataagaattcagtgtgtgcatgacaactcgtgtgtatgagaaggagggatatgaaggaagatggcttgcagagtaagtcgggtggcaattgtcagggtgtgggaatttcttttcctacggggtacgtgattttgtaaaaaggaagtatttctcccaaaattgggagtaggcaaactactaatcagtttagctttgtgttgtatgctagtttaaaaaagaaaatatgtaatataatgtaaaaaaaaacaaaaaaaagcttttatgatggattttgtaaatagatttgttacagggtgacctgttctctagctgtgatcttaccacttcaaatgggtgtaatttgaataaattttgtatggtaaaggatcaataaaatgattttttttaagagttc

SEQ ID NO: 6180 - DNA, 4425 bp, Homo sapiens
  source 1..4425: mol_type = unassigned DNA
accgccaccctccctctcctctccccacccccccaccggcgcccgccctcgccctgcgccgccggtctgttcggccctccgggccccctctccagccggccccccacctccccccggagccaggctggtttcggaaatgcccttacagcagcaggcaaagcgaaggctggagctaggagaaagcggtcatcagtacctctcagatggtttaaaaacccccaagggcaaaggaagagctgcactacgaagtccagatagtccaaaaaaaaaaacgcggtatgatacgtctcttggtctgctcaccaagaagttcattcagctcctgagccagtcacccgatggggtattggatttgaacaaggcagcagaagtgctaaaagtgcaaaagagaaggatttatgatatcaccaacgttctggaaggcatccacctcattaagaagaagtctaaaaacaacgtccaatggatgggctgcagtctgtctgaggatgggggcatgctggcccagtgtcaaggcctgtcaaaagaagtgaccgagctcagtcaggaagagaagaaattagatgaactgatccaaagctgcaccctggacctcaaactgttaaccgaggattcagagaatcaaaggttagcttatgttacatatcaagatattcgaaaaattagtggccttaaagaccaaactgttatagttgtgaaagcccctccagaaacaagacttgaagtgcctgactcaatagagagcctacaaatacatttggcaagtacccaagggcccattgaggtttacttatgtccagaagagactgaaacacacagtccaatgaaaacaaacaaccaagaccacaatgggaatatccctaaacccgcttccaaagacttggcttcaaccaactcaggacatagcgattgctcagtttctatgggaaacctttctcctctggcctccccagccaacctcttacagcagactgaggaccaaattccttccaacctagaaggaccgtttgtgaacttactgcctcccctgctgcaagaggactatctcctgagcctcggggaggaggaaggcatcagcgatctcttcgatgcttacgatttggaaaagctcccactggtggaagacttcatgtgtagttgattatgcttcgtgtgaactctccttaaaaaccgatatttttttatcatggaaccagaacatctgtcatgcagtgttgtcccttcctaccttcttcctccaagagagtatcatgaagtaaactacaaacttcagaagaaagctgacattttaatgaattttttaaaaaattaataaacaaattgtctaaacgcacagttgcaggctcccttgggaaagccctgctttgctccaggctccaagatctcctggctaagtcagcaagtgagaaaatgtgcaatcaggtgtctctcaccccgaattgtccttcctccttcctccccggattggcttgctgtgcctgacggatgggctgtagaatggggtctggccacctggcctgctgggaaacagcaatcttccttaatagcatttcaagccgtgccttctccgcagaatgcatgtctttgaggtctgctaatatggaatggaactgcagcaaatgcaaacttgaagtcatgcaaaagtatgaaatggatttcttcagctcttcttaggaatatttaaattactgtcataattcagtttaagctatgaactgtgtgtcccagtaggaggtcaagaaaacctccacagccttctggatgaagaacctgttttcaaatatacttgttgcagatacagaagactagtagagttctgccactctaagctgttgtggattttcctgtctccatgaaccactcccattcccccgtccccaatgtgtttgtgagtttccagttgatttgtagcaaatgcctacttagttctttgtggattgttctagacttttaatttttttagctgccatttaagcattcctgtggcacccatcaccatttcaatttaattgtttactttgaagcggtttttgcaaattcatattacttaagcagagggagagaacctctactgatcagagcatctaaacctgtgtgatctaaggtttatcagcctctgcaaggagctttgtcccatcgtgcttccattcccaggagggggagcttggagcgagtcagtcctggggcttgctgacatgggtggcccattggaaaggagaaccaggtcagatgatgtaacagccccaaggagcagcaggcatgggtccctccatccttgggcttcccgggcccctgtgacaggggaaagggctctcttacaccgcactcagggagaccacttctcaggatggggtcagatggagagacctctagggagaaagacatccccattgtgtgagtggcatttccttaagctggcaggaacagggagcagccctgtgtcgggggctggaatagttctggccagaccccgttccccttcctctatgaaggaataagttggaccaagggaagtcggggacgtaaaaaatgaagcaaaacaatgccagggtgtctcccgctttactcttcaggaatggtgtcccaagttggaggctttgtgtcagctgcaaatcctaccagttatgtccaagaatggctttccctcgggcaggtggcagcggccatctcccactgggaatatggcgtagtatctccggtccattccttggatgctaaggactgcgggaatgagggagtcagataaagaacaaacctcgaaacgaacagttaaattgaaatgctatgtgcctgacccaatggtaggcacatagtaggcactcaactcatatgtttaattgaattgaaaatatcccttaggaaaaaaaaaaaacacacaaaaaaccacaagagccccagccagtttactccaggtagatttccacaatatgcaaagtggtggtggggtcaagacagatgacaccagcactttaaactctttgtgtgggtatgcgtgggtgtatgtttgggaagaaaaacaaaggtgcagactatcttcctttttttcttcttcagcctccatccctggcctcctcccctcacacacactggacttggtacaaaatgtcggtgtggtcctagatgaagcattggggtgggggagggagagggagctttgtgttaagtgcctactggaaatgcactgtggggttttttcctgtatgggaaaccatttatgccaagcttttccccatttcccatatttatctcatctggttagctgcctctgcttccagctttgtgtaattctctttgccagctgcacaaagctgattttttccaaagtctaaagactgagctcacctggctagattgttgtgtgttttgttgaattttttcataatgtaatgccgtatttattgtttttaaaatgaaaggaatactaataagtcttaaaagttccttcatgcataagatttttttccagttactgggtttaactggtgtacattaattagatgtccatactgtattttgtttgcattaagtaattttctttttgacttagtatccggcacacaaagtgggttagtactacagtatttgcgttactttaagtactaagtatgcaggtttcctggtaccattgagttgctgctattaaagctcacacacgaaatggctaaaagttacaagtgtgcaaattatgactgcgtgagccttagaaaataaaatgtataaagggcaacacatgagctgtcaaacagtgttaggagtgtgtttatatgtacagagttgtgcatagcaatcgttttatttaagttgatatgtagtctactcacattttcattatttagcaattttgtacaaaaatagcaattaatttgtaaacactgccagaatactttctagctgctttgtaattttttaagagtgttattttgtttttgtttttctgttctttgttgtggctcttgttttcatttttgttgtacgtgtagatctgtaaataaaattgcagtatttaaagcttaagctttcaggaaaaagaaaataagaattcagtgtgtgcatgacaactcgtgtgtatgagaaggagggatatgaaggaagatggcttgcagagtaagtcgggtggcaattgtcagggtgtgggaatttcttttcctacggggtacgtgattttgtaaaaaggaagtatttctcccaaaattgggagtaggcaaactactaatcagtttagctttgtgttgtatgctagtttaaaaaagaaaatatgtaatataatgtaaaaaaaaacaaaaaaaagcttttatgatggattttgtaaatagatttgttacagggtgacctgttctctagctgtgatcttaccacttcaaatgggtgtaatttgaataaattttgtatggtaaaggatcaataaaatgattttttttaagagtt

SEQ ID NO: 6181 - DNA, 4094 bp, Homo sapiens
  source 1..4094: mol_type = unassigned DNA
gccatttttcagctgccggccgcagcacccgggctgccgccgccgcctcgcaatccgttgcatcggccgcccccgacgcctccatccccgcttggggcccgatatccgtgcggccgggaccctcctctctccagagccccgattatttttggcccccggggcctgtgcggtgcggaaaaataaaaagaaaagagagagagggggctcggaagcgccgggcggggaggagagaaggaggagagacttggaaactccgactgcaaataataaagaaattgaaaacaatacattaatataccataacactaaaaagagcaggagcgagagatgagaaagggaatccagcccgctctggagcagtacctggtgaccgccgggggtggggagggggcggctgtcgtcgccgccgccgctgcagcctccatggacaaaagggcactgctagccagccccggcttcgccgccccgccggcaaagcgaaggctggagctaggagaaagcggtcatcagtacctctcagatggtttaaaaacccccaagggcaaaggaagagctgcactacgaagtccagatagtccaaaaaaaaaaacgcggtatgatacgtctcttggtctgctcaccaagaagttcattcagctcctgagccagtcacccgatggggtattggatttgaacaaggcagcagaagtgctaaaagtgcaaaagagaaggatttatgatatcaccaacgttctggaaggcatcagcgatctcttcgatgcttacgatttggaaaagctcccactggtggaagacttcatgtgtagttgattatgcttcgtgtgaactctccttaaaaaccgatatttttttatcatggaaccagaacatctgtcatgcagtgttgtcccttcctaccttcttcctccaagagagtatcatgaagtaaactacaaacttcagaagaaagctgacattttaatgaattttttaaaaaattaataaacaaattgtctaaacgcacagttgcaggctcccttgggaaagccctgctttgctccaggctccaagatctcctggctaagtcagcaagtgagaaaatgtgcaatcaggtgtctctcaccccgaattgtccttcctccttcctccccggattggcttgctgtgcctgacggatgggctgtagaatggggtctggccacctggcctgctgggaaacagcaatcttccttaatagcatttcaagccgtgccttctccgcagaatgcatgtctttgaggtctgctaatatggaatggaactgcagcaaatgcaaacttgaagtcatgcaaaagtatgaaatggatttcttcagctcttcttaggaatatttaaattactgtcataattcagtttaagctatgaactgtgtgtcccagtaggaggtcaagaaaacctccacagccttctggatgaagaacctgttttcaaatatacttgttgcagatacagaagactagtagagttctgccactctaagctgttgtggattttcctgtctccatgaaccactcccattcccccgtccccaatgtgtttgtgagtttccagttgatttgtagcaaatgcctacttagttctttgtggattgttctagacttttaatttttttagctgccatttaagcattcctgtggcacccatcaccatttcaatttaattgtttactttgaagcggtttttgcaaattcatattacttaagcagagggagagaacctctactgatcagagcatctaaacctgtgtgatctaaggtttatcagcctctgcaaggagctttgtcccatcgtgcttccattcccaggagggggagcttggagcgagtcagtcctggggcttgctgacatgggtggcccattggaaaggagaaccaggtcagatgatgtaacagccccaaggagcagcaggcatgggtccctccatccttgggcttcccgggcccctgtgacaggggaaagggctctcttacaccgcactcagggagaccacttctcaggatggggtcagatggagagacctctagggagaaagacatccccattgtgtgagtggcatttccttaagctggcaggaacagggagcagccctgtgtcgggggctggaatagttctggccagaccccgttccccttcctctatgaaggaataagttggaccaagggaagtcggggacgtaaaaaatgaagcaaaacaatgccagggtgtctcccgctttactcttcaggaatggtgtcccaagttggaggctttgtgtcagctgcaaatcctaccagttatgtccaagaatggctttccctcgggcaggtggcagcggccatctcccactgggaatatggcgtagtatctccggtccattccttggatgctaaggactgcgggaatgagggagtcagataaagaacaaacctcgaaacgaacagttaaattgaaatgctatgtgcctgacccaatggtaggcacatagtaggcactcaactcatatgtttaattgaattgaaaatatcccttaggaaaaaaaaaaaacacacaaaaaaccacaagagccccagccagtttactccaggtagatttccacaatatgcaaagtggtggtggggtcaagacagatgacaccagcactttaaactctttgtgtgggtatgcgtgggtgtatgtttgggaagaaaaacaaaggtgcagactatcttcctttttttcttcttcagcctccatccctggcctcctcccctcacacacactggacttggtacaaaatgtcggtgtggtcctagatgaagcattggggtgggggagggagagggagctttgtgttaagtgcctactggaaatgcactgtggggttttttcctgtatgggaaaccatttatgccaagcttttccccatttcccatatttatctcatctggttagctgcctctgcttccagctttgtgtaattctctttgccagctgcacaaagctgattttttccaaagtctaaagactgagctcacctggctagattgttgtgtgttttgttgaattttttcataatgtaatgccgtatttattgtttttaaaatgaaaggaatactaataagtcttaaaagttccttcatgcataagatttttttccagttactgggtttaactggtgtacattaattagatgtccatactgtattttgtttgcattaagtaattttctttttgacttagtatccggcacacaaagtgggttagtactacagtatttgcgttactttaagtactaagtatgcaggtttcctggtaccattgagttgctgctattaaagctcacacacgaaatggctaaaagttacaagtgtgcaaattatgactgcgtgagccttagaaaataaaatgtataaagggcaacacatgagctgtcaaacagtgttaggagtgtgtttatatgtacagagttgtgcatagcaatcgttttatttaagttgatatgtagtctactcacattttcattatttagcaattttgtacaaaaatagcaattaatttgtaaacactgccagaatactttctagctgctttgtaattttttaagagtgttattttgtttttgtttttctgttctttgttgtggctcttgttttcatttttgttgtacgtgtagatctgtaaataaaattgcagtatttaaagcttaagctttcaggaaaaagaaaataagaattcagtgtgtgcatgacaactcgtgtgtatgagaaggagggatatgaaggaagatggcttgcagagtaagtcgggtggcaattgtcagggtgtgggaatttcttttcctacggggtacgtgattttgtaaaaaggaagtatttctcccaaaattgggagtaggcaaactactaatcagtttagctttgtgttgtatgctagtttaaaaaagaaaatatgtaatataatgtaaaaaaaaacaaaaaaaagcttttatgatggattttgtaaatagatttgttacagggtgacctgttctctagctgtgatcttaccacttcaaatgggtgtaatttgaataaattttgtatggtaaaggatcaataaaatgattttttttaagagtt

SEQ ID NO: 6182 - DNA, 4695 bp, Homo sapiens
  source 1..4695: mol_type = unassigned DNA
attgggtagatgcaataacagtgcacttcacagtgaactctgccagcaccgcgggcagtcatggggagaccccatcttggggttctgagtcttggctctgggagagcccctctcccccacctccttctttgagcagggagaggttaagcctggccattaacccataggtgacccaaatagaattatctgtcccagggatccgttgattgccagccgctgttgtgacaagaaaagctgtggcaaccgaaatgagactccctcagatccagtgataattgacaggttcttcttgaaatttttcctcaaatgtaaccaaaattgcctaaagaatgcgggaaacccacgtgacatgcggagattccaggtcgtggtgtctacgacagtcaatgtggatggccatgtcctggcagtctctgataacatgtttgtccataataattccaagcatgggcggagggctcggaggcttgacccctcggaaggtacgccctcttatctggaacatgctactccctgtatcaaagccatcagcccgagtgaaggatggacgacgggaggtgcgactgtgatcatcataggggacaatttctttgatgggttacaggtcatattcggtaccatgctggtctggagtgagttgatcactcctcatgccatccgtgtgcagacccctcctcggcacatccctggtgttgtggaagtcacactgtcctacaaatctaagcagttctgcaaaggaacaccaggcagattcatttatacagcgctcaacgaacccaccatcgattatggtttccagaggttacagaaggtcattcctcggcaccctggtgaccctgagcgtttgccaaaggaagtaatactcaaaagggctgcggatctggtagaagcactgtatgggatgccacacaacaaccaggaaatcattctgaagagagcggccgacattgccgaggccctgtacagtgttccccgcaaccacaaccaactcccggcccttgctaacacctcggtccacgcagggatgatgggcgtgaattcgttcagtggacaactggccgtgaatgtctccgaggcatcacaagccaccaatcagggtttcacccgcaactcaagcagcgtatcaccacacgggtacgtgccgagcaccactccccagcagaccaactataactccgtcaccacgagcatgaacggatacggctctgccgcaatgtccaatttgggcggctcccccaccttcctcaacggctcagctgccaactccccctatgccatagtgccatccagccccaccatggcctcctccacaagcctcccctccaactgcagcagctcctcgggcatcttctccttctcaccagccaacatggtctcagccgtgaaacagaagagtgctttcgcaccagtcgtcagaccccagacctccccacctcccacctgcaccagcaccaacgggaacagcctgcaagcgatatctggcatgattgttcctcctatgtgaaagaattgccttgaagaattgtattaatgaagaggttggattctgctacagagagtaatctgatacaagtcccagagtggaacttttaactcaggcctttttaagaggaatcacaataactgcagatttttaaacaaacaaaatcaccgaccttgcaaatactgaaattggaagagggatctgcaagtgcagggtgttggttaaagttgtacctcccaagtatttgggggatatatttattctgtattgacaaaagcaaatccactttttctttttcttttttttttttaagcttaattctgcaatcatttgtcttttataaaccgtaaagctctatacaagggacactataaataagactccatgttttaatttatgatgtttttaaagctgtgtaaaggaagaatgaagtggtgatatttacaaaaaagtaaaaaaaaaaaaaaagaaaaaaaggaaaaaaaaaaaagcttgtatgggacagaataggaatgccagttagattttttagaaaaactaagggtcggcttttgcgccttaaagcatatcaaatggtagttagctcagacagtgcattttcaatatctaacttaacatgccaccccttagcagtgcaagcttatttatctcttttgtattgttgtcttaagcaactgtgtaaataaatgcagcctggaaagttaaaacgcgatgtaagtgatcacatttttccctctactcgaaaatccagtgcctctagacagattgttaaaactgcatatttaaatctgatctcattctctccttttacttaagtcagtttcttctgaagccgatggcctctcgagagcttggtggcacacatactgtgtgagaatctcctttgagacttcatggaacagggtccaggcacagaattccacactctgccctccagttaacaagccaaaacctcacgtacgctcccccatttgcaagtttaaagtttactcgtcctaaatgcagacttcatacctatcttccaaaagttgataaaagcaacgtggcaggtattttcgattttcccattccagatactgcctctatcagtcgacccttaccatttgtaacataatagattgaaacaacaggttaagtgctttggaattaagagttaaagggaaccgggggtggagaaaggaaaagaaggttgagacctccaaaacatagttttctgttctatgggaatttttgctctcattatctgggaagtgttcttaaaaataagaattaatagcaaagatgcagcaaagctctgaggatgcatttgcctgatatttttttctttgctcttgtgtttttgtatgtagttataaatactgtagattttttttttgtgattttttgccaaagttgttgttctatttatacattttaatgtcttaagacattttttcaatatcacaaaaagattttactgcgtattttgcaaagaaaaaaagctcactacctttagcttgcacatacttgcaaagttaattaaaaggctttttgttttaaaggggattttgtaaaatatccatataaataatgtatttatctttcgaatttgtacattgcttttcccttcttcctcttccttccacccccaatttattttattgtgtatgtttgctacgtgaaaagtgcgtatttgtttggtcacctacacttgtattagctgtttcaatgtgatttttaaacatttcatttatagttatttttagtattgttataaaccatgcttcagtttttttaatttccacccaaaagtcattgtctatttttgtattatttgtaagttaagaagttttttccaatatatggcaaaaaaaaaaaaatagtagcatattattcttgtagtatttagttcagtagatttaaaaaaaaatgtatcctttgctttggaagcttacaaaacaaccctaatgctgttttactctattaatatgcatggaatctctccctttggagtgacgcattttgtgcattaaattctagggagaaacttcatagaaatcaatgaacatactttctttcttaagtctgcttgtatatttcctctgtctttcacataaatataaaccagcagattggatgccttaacaatgcaaatcatattcatttcacttgtacattgtaactgtgcaccagaactgtcagtcatcactaacattctaagaaaaaagaaaaagaaaaaaagaaaaaaaaaaaaacaaagaaatcgaaaagcacaaaagaactgttttgttaccttaagacaatgtaactttttctagtagagcaagaaatcatttacaacaatgctgcaactgtgcatgcccccatatggattttgcaatggttttcactaggctgtcaagagtgcgatttttatgggttggggtgggtgggggaggggagttgtgggagggtaggggagggaggaaagctgtttttcatggtgagaaataataatgatgactaataataataaaaaaaactggaaaatgtaagcaaggtggacgcattgcttctcggtactcagaaaggttatctgaatttgcgtggtaagcgctggcctgaagatgtacacaagttaaagccatattttatctggtgagccccttaactgtttctgaaggaatgaacggtcagccgggaaggtgtccggcttagaccttgacaacagacactacccatctgtcagccatgtgcagtggttagaactcttcttgaaagtccaaagagcctttaaaatgtgtataatttgtgttttgttgcttctatttctattgattagatgaaaagacattctggccctctgatcctctttcttctccacaaaagttttacaaataaaagatgttcccctaaatacagaatatggctttaagaagaaaatgaaatgaagaattaaattaagatttcagtgttgggggaaaaaatacagcttctggatgactggattgcataacattgccctggcctcacattgtactaggatgcagcttaaatgaagtcatctctaaatctactaacctttcaccttcttatcaaaactttttgaatagacacacactgtacagttcaattgttagagaacctaactactgtagagattgttaaattttttttttttttttgcaaaaattcaagctgtaaaaacttttcaactttcacaatatttaattaaagttacttcctgtctgtga

SEQ ID NO: 6183 - DNA, 4735 bp, Homo sapiens
  source 1..4735: mol_type = unassigned DNA; mol_type = unassigned DNA
taccggcttcagcttctctacagcaatggtgaggcccgggtcgggtctatggcctcaccctggggctccgggtctgggcagggggcgcagggagctccaggtggacgaaatcctccagcgaagggataaggacggagcaggatttctacgtgcgcctcattgactccatgacaaaacaagccatagtgtatgaaggccaagacaagaacccagaaatgtgccgagtcttgctcacacatgagatcatgtgcagccgctgttgtgacaagaaaagctgtggcaaccgaaatgagactccctcagatccagtgataattgacaggttcttcttgaaatttttcctcaaatgtaaccaaaattgcctaaagaatgcgggaaacccacgtgacatgcggagattccaggtcgtggtgtctacgacagtcaatgtggatggccatgtcctggcagtctctgataacatgtttgtccataataattccaagcatgggcggagggctcggaggcttgacccctcggaaggtacgccctcttatctggaacatgctactccctgtatcaaagccatcagcccgagtgaaggatggacgacgggaggtgcgactgtgatcatcataggggacaatttctttgatgggttacaggtcatattcggtaccatgctggtctggagtgagttgatcactcctcatgccatccgtgtgcagacccctcctcggcacatccctggtgttgtggaagtcacactgtcctacaaatctaagcagttctgcaaaggaacaccaggcagattcatttatacagcgctcaacgaacccaccatcgattatggtttccagaggttacagaaggtcattcctcggcaccctggtgaccctgagcgtttgccaaaggaagtaatactcaaaagggctgcggatctggtagaagcactgtatgggatgccacacaacaaccaggaaatcattctgaagagagcggccgacattgccgaggccctgtacagtgttccccgcaaccacaaccaactcccggcccttgctaacacctcggtccacgcagggatgatgggcgtgaattcgttcagtggacaactggccgtgaatgtctccgaggcatcacaagccaccaatcagggtttcacccgcaactcaagcagcgtatcaccacacgggtacgtgccgagcaccactccccagcagaccaactataactccgtcaccacgagcatgaacggatacggctctgccgcaatgtccaatttgggcggctcccccaccttcctcaacggctcagctgccaactccccctatgccatagtgccatccagccccaccatggcctcctccacaagcctcccctccaactgcagcagctcctcgggcatcttctccttctcaccagccaacatggtctcagccgtgaaacagaagagtgctttcgcaccagtcgtcagaccccagacctccccacctcccacctgcaccagcaccaacgggaacagcctgcaagcgatatctggcatgattgttcctcctatgtgaaagaattgccttgaagaattgtattaatgaagaggttggattctgctacagagagtaatctgatacaagtcccagagtggaacttttaactcaggcctttttaagaggaatcacaataactgcagatttttaaacaaacaaaatcaccgaccttgcaaatactgaaattggaagagggatctgcaagtgcagggtgttggttaaagttgtacctcccaagtatttgggggatatatttattctgtattgacaaaagcaaatccactttttctttttcttttttttttttaagcttaattctgcaatcatttgtcttttataaaccgtaaagctctatacaagggacactataaataagactccatgttttaatttatgatgtttttaaagctgtgtaaaggaagaatgaagtggtgatatttacaaaaaagtaaaaaaaaaaaaaaagaaaaaaaggaaaaaaaaaaaagcttgtatgggacagaataggaatgccagttagattttttagaaaaactaagggtcggcttttgcgccttaaagcatatcaaatggtagttagctcagacagtgcattttcaatatctaacttaacatgccaccccttagcagtgcaagcttatttatctcttttgtattgttgtcttaagcaactgtgtaaataaatgcagcctggaaagttaaaacgcgatgtaagtgatcacatttttccctctactcgaaaatccagtgcctctagacagattgttaaaactgcatatttaaatctgatctcattctctccttttacttaagtcagtttcttctgaagccgatggcctctcgagagcttggtggcacacatactgtgtgagaatctcctttgagacttcatggaacagggtccaggcacagaattccacactctgccctccagttaacaagccaaaacctcacgtacgctcccccatttgcaagtttaaagtttactcgtcctaaatgcagacttcatacctatcttccaaaagttgataaaagcaacgtggcaggtattttcgattttcccattccagatactgcctctatcagtcgacccttaccatttgtaacataatagattgaaacaacaggttaagtgctttggaattaagagttaaagggaaccgggggtggagaaaggaaaagaaggttgagacctccaaaacatagttttctgttctatgggaatttttgctctcattatctgggaagtgttcttaaaaataagaattaatagcaaagatgcagcaaagctctgaggatgcatttgcctgatatttttttctttgctcttgtgtttttgtatgtagttataaatactgtagattttttttttgtgattttttgccaaagttgttgttctatttatacattttaatgtcttaagacattttttcaatatcacaaaaagattttactgcgtattttgcaaagaaaaaaagctcactacctttagcttgcacatacttgcaaagttaattaaaaggctttttgttttaaaggggattttgtaaaatatccatataaataatgtatttatctttcgaatttgtacattgcttttcccttcttcctcttccttccacccccaatttattttattgtgtatgtttgctacgtgaaaagtgcgtatttgtttggtcacctacacttgtattagctgtttcaatgtgatttttaaacatttcatttatagttatttttagtattgttataaaccatgcttcagtttttttaatttccacccaaaagtcattgtctatttttgtattatttgtaagttaagaagttttttccaatatatggcaaaaaaaaaaaaatagtagcatattattcttgtagtatttagttcagtagatttaaaaaaaaatgtatcctttgctttggaagcttacaaaacaaccctaatgctgttttactctattaatatgcatggaatctctccctttggagtgacgcattttgtgcattaaattctagggagaaacttcatagaaatcaatgaacatactttctttcttaagtctgcttgtatatttcctctgtctttcacataaatataaaccagcagattggatgccttaacaatgcaaatcatattcatttcacttgtacattgtaactgtgcaccagaactgtcagtcatcactaacattctaagaaaaaagaaaaagaaaaaaagaaaaaaaaaaaaacaaagaaatcgaaaagcacaaaagaactgttttgttaccttaagacaatgtaactttttctagtagagcaagaaatcatttacaacaatgctgcaactgtgcatgcccccatatggattttgcaatggttttcactaggctgtcaagagtgcgatttttatgggttggggtgggtgggggaggggagttgtgggagggtaggggagggaggaaagctgtttttcatggtgagaaataataatgatgactaataataataaaaaaaactggaaaatgtaagcaaggtggacgcattgcttctcggtactcagaaaggttatctgaatttgcgtggtaagcgctggcctgaagatgtacacaagttaaagccatattttatctggtgagccccttaactgtttctgaaggaatgaacggtcagccgggaaggtgtccggcttagaccttgacaacagacactacccatctgtcagccatgtgcagtggttagaactcttcttgaaagtccaaagagcctttaaaatgtgtataatttgtgttttgttgcttctatttctattgattagatgaaaagacattctggccctctgatcctctttcttctccacaaaagttttacaaataaaagatgttcccctaaatacagaatatggctttaagaagaaaatgaaatgaagaattaaattaagatttcagtgttgggggaaaaaatacagcttctggatgactggattgcataacattgccctggcctcacattgtactaggatgcagcttaaatgaagtcatctctaaatctactaacctttcaccttcttatcaaaactttttgaatagacacacactgtacagttcaattgttagagaacctaactactgtagagattgttaaattttttttttttttttgcaaaaattcaagctgtaaaaacttttcaactttcacaatatttaattaaagttacttcctgtctgtga

SEQ ID NO: 6184 - DNA, 5127 bp, Homo sapiens
  source 1..5127: mol_type = unassigned DNA; mol_type = unassigned DNA
agcatacatctctaattttattattttggtcttttcgttggattttccctttcttctttttttcgggttatcgctcagttttgagcagaggtttacattttttaaaaatttgctttccagcccgccttgatcttctaagtgcgagttcatcgtctgagaaaaaaaaaaatctctggaaagcatccaacggagtggaagcagcatgaaggaagagccgctgggcagcggcatgaacgcggtgcggacgtggatgcagggcgccggggtgctggacgccaacacggcggcgcagagcggggtgggtctggcccgggctcactttgagaagcagccgccttccaatctgcggaaatccaacttcttccacttcgtcctggccctctacgacagacagggccagcccgtggagatcgagaggacagcgtttgtggggttcgtggagaaggaaaaagaagccaacagcgaaaagaccaataacggaattcactaccggcttcagcttctctacagcaatgggataaggacggagcaggatttctacgtgcgcctcattgactccatgacaaaacaagccatagtgtatgaaggccaagacaagaacccagaaatgtgccgagtcttgctcacacatgagatcatgtgcagccgctgttgtgacaagaaaagctgtggcaaccgaaatgagactccctcagatccagtgataattgacaggttcttcttgaaatttttcctcaaatgtaaccaaaattgcctaaagaatgcgggaaacccacgtgacatgcggagattccaggtcgtggtgtctacgacagtcaatgtggatggccatgtcctggcagtctctgataacatgtttgtccataataattccaagcatgggcggagggctcggaggcttgacccctcggaaggtacgccctcttatctggaacatgctactccctgtatcaaagccatcagcccgagtgaaggatggacgacgggaggtgcgactgtgatcatcataggggacaatttctttgatgggttacaggtcatattcggtaccatgctggtctggagtgagttgatcactcctcatgccatccgtgtgcagacccctcctcggcacatccctggtgttgtggaagtcacactgtcctacaaatctaagcagttctgcaaaggaacaccaggcagattcatttatacagcgctcaacgaacccaccatcgattatggtttccagaggttacagaaggtcattcctcggcaccctggtgaccctgagcgtttgccaaaggaagtaatactcaaaagggctgcggatctggtagaagcactgtatgggatgccacacaacaaccaggaaatcattctgaagagagcggccgacattgccgaggccctgtacagtgttccccgcaaccacaaccaactcccggcccttgctaacacctcggtccacgcagggatgatgggcgtgaattcgttcagtggacaactggccgtgaatgtctccgaggcatcacaagccaccaatcagggtttcacccgcaactcaagcagcgtatcaccacacgggtacgtgccgagcaccactccccagcagaccaactataactccgtcaccacgagcatgaacggatacggctctgccgcaatgtccaatttgggcggctcccccaccttcctcaacggctcagctgccaactccccctatgccatagtgccatccagccccaccatggcctcctccacaagcctcccctccaactgcagcagctcctcgggcatcttctccttctcaccagccaacatggtctcagccgtgaaacagaagagtgctttcgcaccagtcgtcagaccccagacctccccacctcccacctgcaccagcaccaacgggaacagcctgcaagcgatatctggcatgattgttcctcctatgtgaaagaattgccttgaagaattgtattaatgaagaggttggattctgctacagagagtaatctgatacaagtcccagagtggaacttttaactcaggcctttttaagaggaatcacaataactgcagatttttaaacaaacaaaatcaccgaccttgcaaatactgaaattggaagagggatctgcaagtgcagggtgttggttaaagttgtacctcccaagtatttgggggatatatttattctgtattgacaaaagcaaatccactttttctttttcttttttttttttaagcttaattctgcaatcatttgtcttttataaaccgtaaagctctatacaagggacactataaataagactccatgttttaatttatgatgtttttaaagctgtgtaaaggaagaatgaagtggtgatatttacaaaaaagtaaaaaaaaaaaaaaagaaaaaaaggaaaaaaaaaaaagcttgtatgggacagaataggaatgccagttagattttttagaaaaactaagggtcggcttttgcgccttaaagcatatcaaatggtagttagctcagacagtgcattttcaatatctaacttaacatgccaccccttagcagtgcaagcttatttatctcttttgtattgttgtcttaagcaactgtgtaaataaatgcagcctggaaagttaaaacgcgatgtaagtgatcacatttttccctctactcgaaaatccagtgcctctagacagattgttaaaactgcatatttaaatctgatctcattctctccttttacttaagtcagtttcttctgaagccgatggcctctcgagagcttggtggcacacatactgtgtgagaatctcctttgagacttcatggaacagggtccaggcacagaattccacactctgccctccagttaacaagccaaaacctcacgtacgctcccccatttgcaagtttaaagtttactcgtcctaaatgcagacttcatacctatcttccaaaagttgataaaagcaacgtggcaggtattttcgattttcccattccagatactgcctctatcagtcgacccttaccatttgtaacataatagattgaaacaacaggttaagtgctttggaattaagagttaaagggaaccgggggtggagaaaggaaaagaaggttgagacctccaaaacatagttttctgttctatgggaatttttgctctcattatctgggaagtgttcttaaaaataagaattaatagcaaagatgcagcaaagctctgaggatgcatttgcctgatatttttttctttgctcttgtgtttttgtatgtagttataaatactgtagattttttttttgtgattttttgccaaagttgttgttctatttatacattttaatgtcttaagacattttttcaatatcacaaaaagattttactgcgtattttgcaaagaaaaaaagctcactacctttagcttgcacatacttgcaaagttaattaaaaggctttttgttttaaaggggattttgtaaaatatccatataaataatgtatttatctttcgaatttgtacattgcttttcccttcttcctcttccttccacccccaatttattttattgtgtatgtttgctacgtgaaaagtgcgtatttgtttggtcacctacacttgtattagctgtttcaatgtgatttttaaacatttcatttatagttatttttagtattgttataaaccatgcttcagtttttttaatttccacccaaaagtcattgtctatttttgtattatttgtaagttaagaagttttttccaatatatggcaaaaaaaaaaaaatagtagcatattattcttgtagtatttagttcagtagatttaaaaaaaaatgtatcctttgctttggaagcttacaaaacaaccctaatgctgttttactctattaatatgcatggaatctctccctttggagtgacgcattttgtgcattaaattctagggagaaacttcatagaaatcaatgaacatactttctttcttaagtctgcttgtatatttcctctgtctttcacataaatataaaccagcagattggatgccttaacaatgcaaatcatattcatttcacttgtacattgtaactgtgcaccagaactgtcagtcatcactaacattctaagaaaaaagaaaaagaaaaaaagaaaaaaaaaaaaacaaagaaatcgaaaagcacaaaagaactgttttgttaccttaagacaatgtaactttttctagtagagcaagaaatcatttacaacaatgctgcaactgtgcatgcccccatatggattttgcaatggttttcactaggctgtcaagagtgcgatttttatgggttggggtgggtgggggaggggagttgtgggagggtaggggagggaggaaagctgtttttcatggtgagaaataataatgatgactaataataataaaaaaaactggaaaatgtaagcaaggtggacgcattgcttctcggtactcagaaaggttatctgaatttgcgtggtaagcgctggcctgaagatgtacacaagttaaagccatattttatctggtgagccccttaactgtttctgaaggaatgaacggtcagccgggaaggtgtccggcttagaccttgacaacagacactacccatctgtcagccatgtgcagtggttagaactcttcttgaaagtccaaagagcctttaaaatgtgtataatttgtgttttgttgcttctatttctattgattagatgaaaagacattctggccctctgatcctctttcttctccacaaaagttttacaaataaaagatgttcccctaaatacagaatatggctttaagaagaaaatgaaatgaagaattaaattaagatttcagtgttgggggaaaaaatacagcttctggatgactggattgcataacattgccctggcctcacattgtactaggatgcagcttaaatgaagtcatctctaaatctactaacctttcaccttcttatcaaaactttttgaatagacacacactgtacagttcaattgttagagaacctaactactgtagagattgttaaattttttttttttttttgcaaaaattcaagctgtaaaaacttttcaactttcacaatatttaattaaagttacttcctgtctgtga

SEQ ID NO: 6185 - DNA, 5250 bp, Homo sapiens
  source 1..5250: mol_type = unassigned DNA; mol_type = unassigned DNA
gccaagcatacatctctaattttattattttggtcttttcgttggattttccctttcttctttttttcgggttatcgctcagttttgagcagaggtttacattttttaaaaatttgctttccagcccgccttgatcttctaagtgcgagttcatcgtctgagaaaaaaaaaaatctctggttggcgtttttgtttcttttcttttctttcttttctttcctttttttttttttttaatttttttcaagggggaggagattttccacaagaaaaggttgttttcatgtttgggattcaggaaagcatccaacggagtggaagcagcatgaaggaagagccgctgggcagcggcatgaacgcggtgcggacgtggatgcagggcgccggggtgctggacgccaacacggcggcgcagagcggggtgggtctggcccgggctcactttgagaagcagccgccttccaatctgcggaaatccaacttcttccacttcgtcctggccctctacgacagacagggccagcccgtggagatcgagaggacagcgtttgtggggttcgtggagaaggaaaaagaagccaacagcgaaaagaccaataacggaattcactaccggcttcagcttctctacagcaatgggataaggacggagcaggatttctacgtgcgcctcattgactccatgacaaaacaagccatagtgtatgaaggccaagacaagaacccagaaatgtgccgagtcttgctcacacatgagatcatgtgcagccgctgttgtgacaagaaaagctgtggcaaccgaaatgagactccctcagatccagtgataattgacaggttcttcttgaaatttttcctcaaatgtaaccaaaattgcctaaagaatgcgggaaacccacgtgacatgcggagattccaggtcgtggtgtctacgacagtcaatgtggatggccatgtcctggcagtctctgataacatgtttgtccataataattccaagcatgggcggagggctcggaggcttgacccctcggaaggtacgccctcttatctggaacatgctactccctgtatcaaagccatcagcccgagtgaaggatggacgacgggaggtgcgactgtgatcatcataggggacaatttctttgatgggttacaggtcatattcggtaccatgctggtctggagtgagttgatcactcctcatgccatccgtgtgcagacccctcctcggcacatccctggtgttgtggaagtcacactgtcctacaaatctaagcagttctgcaaaggaacaccaggcagattcatttatacagcgctcaacgaacccaccatcgattatggtttccagaggttacagaaggtcattcctcggcaccctggtgaccctgagcgtttgccaaaggaagtaatactcaaaagggctgcggatctggtagaagcactgtatgggatgccacacaacaaccaggaaatcattctgaagagagcggccgacattgccgaggccctgtacagtgttccccgcaaccacaaccaactcccggcccttgctaacacctcggtccacgcagggatgatgggcgtgaattcgttcagtggacaactggccgtgaatgtctccgaggcatcacaagccaccaatcagggtttcacccgcaactcaagcagcgtatcaccacacgggtacgtgccgagcaccactccccagcagaccaactataactccgtcaccacgagcatgaacggatacggctctgccgcaatgtccaatttgggcggctcccccaccttcctcaacggctcagctgccaactccccctatgccatagtgccatccagccccaccatggcctcctccacaagcctcccctccaactgcagcagctcctcgggcatcttctccttctcaccagccaacatggtctcagccgtgaaacagaagagtgctttcgcaccagtcgtcagaccccagacctccccacctcccacctgcaccagcaccaacgggaacagcctgcaagcgatatctggcatgattgttcctcctatgtgaaagaattgccttgaagaattgtattaatgaagaggttggattctgctacagagagtaatctgatacaagtcccagagtggaacttttaactcaggcctttttaagaggaatcacaataactgcagatttttaaacaaacaaaatcaccgaccttgcaaatactgaaattggaagagggatctgcaagtgcagggtgttggttaaagttgtacctcccaagtatttgggggatatatttattctgtattgacaaaagcaaatccactttttctttttcttttttttttttaagcttaattctgcaatcatttgtcttttataaaccgtaaagctctatacaagggacactataaataagactccatgttttaatttatgatgtttttaaagctgtgtaaaggaagaatgaagtggtgatatttacaaaaaagtaaaaaaaaaaaaaaagaaaaaaaggaaaaaaaaaaaagcttgtatgggacagaataggaatgccagttagattttttagaaaaactaagggtcggcttttgcgccttaaagcatatcaaatggtagttagctcagacagtgcattttcaatatctaacttaacatgccaccccttagcagtgcaagcttatttatctcttttgtattgttgtcttaagcaactgtgtaaataaatgcagcctggaaagttaaaacgcgatgtaagtgatcacatttttccctctactcgaaaatccagtgcctctagacagattgttaaaactgcatatttaaatctgatctcattctctccttttacttaagtcagtttcttctgaagccgatggcctctcgagagcttggtggcacacatactgtgtgagaatctcctttgagacttcatggaacagggtccaggcacagaattccacactctgccctccagttaacaagccaaaacctcacgtacgctcccccatttgcaagtttaaagtttactcgtcctaaatgcagacttcatacctatcttccaaaagttgataaaagcaacgtggcaggtattttcgattttcccattccagatactgcctctatcagtcgacccttaccatttgtaacataatagattgaaacaacaggttaagtgctttggaattaagagttaaagggaaccgggggtggagaaaggaaaagaaggttgagacctccaaaacatagttttctgttctatgggaatttttgctctcattatctgggaagtgttcttaaaaataagaattaatagcaaagatgcagcaaagctctgaggatgcatttgcctgatatttttttctttgctcttgtgtttttgtatgtagttataaatactgtagattttttttttgtgattttttgccaaagttgttgttctatttatacattttaatgtcttaagacattttttcaatatcacaaaaagattttactgcgtattttgcaaagaaaaaaagctcactacctttagcttgcacatacttgcaaagttaattaaaaggctttttgttttaaaggggattttgtaaaatatccatataaataatgtatttatctttcgaatttgtacattgcttttcccttcttcctcttccttccacccccaatttattttattgtgtatgtttgctacgtgaaaagtgcgtatttgtttggtcacctacacttgtattagctgtttcaatgtgatttttaaacatttcatttatagttatttttagtattgttataaaccatgcttcagtttttttaatttccacccaaaagtcattgtctatttttgtattatttgtaagttaagaagttttttccaatatatggcaaaaaaaaaaaaatagtagcatattattcttgtagtatttagttcagtagatttaaaaaaaaatgtatcctttgctttggaagcttacaaaacaaccctaatgctgttttactctattaatatgcatggaatctctccctttggagtgacgcattttgtgcattaaattctagggagaaacttcatagaaatcaatgaacatactttctttcttaagtctgcttgtatatttcctctgtctttcacataaatataaaccagcagattggatgccttaacaatgcaaatcatattcatttcacttgtacattgtaactgtgcaccagaactgtcagtcatcactaacattctaagaaaaaagaaaaagaaaaaaagaaaaaaaaaaaaacaaagaaatcgaaaagcacaaaagaactgttttgttaccttaagacaatgtaactttttctagtagagcaagaaatcatttacaacaatgctgcaactgtgcatgcccccatatggattttgcaatggttttcactaggctgtcaagagtgcgatttttatgggttggggtgggtgggggaggggagttgtgggagggtaggggagggaggaaagctgtttttcatggtgagaaataataatgatgactaataataataaaaaaaactggaaaatgtaagcaaggtggacgcattgcttctcggtactcagaaaggttatctgaatttgcgtggtaagcgctggcctgaagatgtacacaagttaaagccatattttatctggtgagccccttaactgtttctgaaggaatgaacggtcagccgggaaggtgtccggcttagaccttgacaacagacactacccatctgtcagccatgtgcagtggttagaactcttcttgaaagtccaaagagcctttaaaatgtgtataatttgtgttttgttgcttctatttctattgattagatgaaaagacattctggccctctgatcctctttcttctccacaaaagttttacaaataaaagatgttcccctaaatacagaatatggctttaagaagaaaatgaaatgaagaattaaattaagatttcagtgttgggggaaaaaatacagcttctggatgactggattgcataacattgccctggcctcacattgtactaggatgcagcttaaatgaagtcatctctaaatctactaacctttcaccttcttatcaaaactttttgaatagacacacactgtacagttcaattgttagagaacctaactactgtagagattgttaaattttttttttttttttgcaaaaattcaagctgtaaaaacttttcaactttcacaatatttaattaaagttacttcctgtctgtga

SEQ ID NO: 6186 - DNA, 602 bp, Homo sapiens
  source 1..602: mol_type = unassigned DNA; mol_type = unassigned DNA
tgcaccagcaccaacgggaacagcctgcaagatcagtcttttgtggactctagcaagttctccagtgcagggtctctcccgggactggccttctcctgaacgatatctggcatgattgttcctcctatgtgaaagaattgccttgaagaattgtattaatgaagaggttggattctgctacagagagtaatctgatacaagtcccagagtggaacttttaactcaggcctttttaagaggaatcacaataactgcagatttttaaacaaacaaaatcaccgaccttgcaaatactgaaattggaagagggatctgcaagtgcagggtgttggttaaagttgtacctcccaagtatttgggggatatatttattctgtattgacaaaagcaaatccactttttctttttcttttttttttttaagcttaattctgcaatcatttgtcttttataaaccgtaaagctctatacaagggacactataaataagactccatgttttaatttatgatgtttttaaagctgtgtaaaggaagaatgaagtggtgatatttacaaaaaagtaaaaaaaaaaaaaaagaaaaaaaggaaaaaaaaaaaag

SEQ ID NO: 6187 - DNA, 2345 bp, Homo sapiens
  source 1..2345: mol_type = unassigned DNA; mol_type = unassigned DNA
gggttatcgctcagttttgagcagaggtttacattttttaaaaatttgctttccagcccgccttgatcttctaagtgcgagttcatcgtctgagaaaaaaaaaaatctctggttggcgtttttgtttcttttcttttctttcttttctttcctttttttttttttttaatttttttcaagggggaggagattttccacaagaaaaggttgttttcatgtttgggattcaggaaagcatccaacggagtggaagcagcatgaaggaagagccgctgggcagcggcatgaacgcggtgcggacgtggatgcagggcgccggggtgctggacgccaacacggcggcgcagagcggggtgggtctggcccgggctcactttgagaagcagccgccttccaatctgcggaaatccaacttcttccacttcgtcctggccctctacgacagacagggccagcccgtggagatcgagaggacagcgtttgtggggttcgtggagaaggaaaaagaagccaacagcgaaaagaccaataacggaattcactaccggcttcagcttctctacagcaatgggataaggacggagcaggatttctacgtgcgcctcattgactccatgacaaaacaagccatagtgtatgaaggccaagacaagaacccagaaatgtgccgagtcttgctcacacatgagatcatgtgcaggttcttcttgaaatttttcctcaaatgtaaccaaaattgcctaaagaatgcgggaaacccacgtgacatgcggagattccaggtcgtggtgtctacgacagtcaatgtggatggccatgtcctggcagtctctgataacatgtttgtccataataattccaagcatgggcggagggctcggaggcttgacccctcggaagctactccctgtatcaaagccatcagcccgagtgaaggatggacgacgggaggtgcgactgtgatcatcataggggacaatttctttgatgggttacaggtcatattcggtaccatgctggtctggagtgagttgatcactcctcatgccatccgtgtgcagacccctcctcggcacatccctggtgttgtggaagtcacactgtcctacaaatctaagcagttctgcaaaggaacaccaggcagattcatttatacagcgctcaacgaacccaccatcgattatggtttccagaggttacagaaggtcattcctcggcaccctggtgaccctgagcgtttgccaaaggaagtaatactcaaaagggctgcggatctggtagaagcactgtatgggatgccacacaacaaccaggaaatcattctgaagagagcggccgacattgccgaggccctgtacagtgttccccgcaaccacaaccaactcccggcccttgctaacacctcggtccacgcagggatgatgggcgtgaattcgttcagtggacaactggccgtgaatgtctccgaggcatcacaagccaccaatcagggtttcacccgcaactcaagcagcgtatcaccacacgggtacgtgccgagcaccactccccagcagaccaactataactccgtcaccacgagcatgaacggatacggctctgccgcaatgtccaatttgggcggctcccccaccttcctcaacggctcagctgccaactccccctatgccatagtgccatccagccccaccatggcctcctccacaagcctcccctccaactgcagcagctcctcgggcatcttctccttctcaccagccaacatggtctcagccgtgaaacagaagagtgctttcgcaccagtcgtcagaccccagacctccccacctcccacctgcaccagcaccaacgggaacagcctgcaagcgatatctggcatgattgttcctcctatgtgaaagaattgccttgaagaattgtattaatgaagaggttggattctgctacagagagtaatctgatacaagtcccagagtggaacttttaactcaggcctttttaagaggaatcacaataactgcagatttttaaacaaacaaaatcaccgaccttgcaaatactgaaattggaagagggatctgcaagtgcagggtgttggttaaagttgtacctcccaagtatttgggggatatatttattctgtattgacaaaagcaaatccactttttctttttcttttttttttttaagcttaattctgcaatcatttgtcttttataaaccgtaaagctctatacaagggacactataaataagactccatgttttaatttatgatgtttttaaagctgtgtaaaggaagaatgaagtggtgatatttacaaaaaagtaaaaaaaaaaaaaaa

SEQ ID NO: 6188 - DNA, 2277 bp, Homo sapiens
  source 1..2277: mol_type = unassigned DNA; mol_type = unassigned DNA
gccaagcatacatctctaattttattattttggtcttttcgttggattttccctttcttctttttttcgggttatcgctcagttttgagcagaggtttacattttttaaaaatttgctttccagcccgccttgatcttctaagtgcgagttcatcgtctgagaaaaaaaaaaatctctggttggcgtttttgtttcttttcttttctttcttttctttcctttttttttttttttaatttttttcaagggggaggagattttccacaagaaaaggttgttttcatgtttgggattcaggaaagcatccaacggagtggaagcagcatgaaggaagagccgctgggcagcggcatgaacgcggtgcggacgtggatgcagggcgccggggtgctggacgccaacacggcggcgcagagcggggtgggtctggcccgggctcactttgagaagcagccgccttccaatctgcggaaatccaacttcttccacttcgtcctggccctctacgacagacagggccagcccgtggagatcgagaggacagcgtttgtggggttcgtggagaaggaaaaagaagccaacagcgaaaagaccaataacggaattcactaccggcttcagcttctctacagcaatgggataaggacggagcaggatttctacgtgcgcctcattgactccatgacaaaacaagccatagtgtatgaaggccaagacaagaacccagaaatgtgccgagtcttgctcacacatgagatcatgtgcagccgctgttgtgacaagaaaagctgtggcaaccgaaatgagactccctcagatccagtgataattgacaggttcttcttgaaatttttcctcaaatgtaaccaaaattgcctaaagaatgcgggaaacccacgtgacatgcggagattccaggtcgtggtgtctacgacagtcaatgtggatggccatgtcctggcagtctctgataacatgtttgtccataataattccaagcatgggcggagggctcggaggcttgacccctcggaagctactccctgtatcaaagccatcagcccgagtgaaggatggacgacgggaggtgcgactgtgatcatcataggggacaatttctttgatgggttacaggtcatattcggtaccatgctggtctggagtgagttgatcactcctcatgccatccgtgtgcagacccctcctcggcacatccctggtgttgtggaagtcacactgtcctacaaatctaagcagttctgcaaaggaacaccaggcagattcatttatacagcgctcaacgaacccaccatcgattatggtttccagaggttacagaaggtcattcctcggcaccctggtgaccctgagcgtttgccaaaggaagtaatactcaaaagggctgcggatctggtagaagcactgtatgggatgccacacaacaaccaggaaatcattctgaagagagcggccgacattgccgaggccctgtacagtgttccccgcaaccacaaccaactcccggcccttgctaacacctcggtccacgcagggatgatgggcgtgaattcgttcagtggacaactggccgtgaatgtctccgaggcatcacaagccaccaatcaggtagtgccatccagccccaccatggcctcctccacaagcctcccctccaactgcagcagctcctcgggcatcttctccttctcaccagccaacatggtctcagccgtgaaacagaagagtgctttcgcaccagtcgtcagaccccagacctccccacctcccacctgcaccagcaccaacgggaacagcctgcaagcgatatctggcatgattgttcctcctatgtgaaagaattgccttgaagaattgtattaatgaagaggttggattctgctacagagagtaatctgatacaagtcccagagtggaacttttaactcaggcctttttaagaggaatcacaataactgcagatttttaaacaaacaaaatcaccgaccttgcaaatactgaaattggaagagggatctgcaagtgcagggtgttggttaaagttgtacctcccaagtatttgggggatatatttattctgtattgacaaaagcaaatccactttttctttttcttttttttttttaagcttaattctgcaatcatttgtcttttataaaccgtaaagctctatacaagggacactataaataagactccatgttttaatttatgatgtttttaaagctgtgtaaaggaagaatgaagtggtgatattt

SEQ ID NO: 6189 - DNA, 1911 bp, Homo sapiens
  source 1..1911: mol_type = unassigned DNA; mol_type = unassigned DNA
tcttttgggagagagggagcagtcaggaacagggggcggaggagggatcacaattggccacaatttctgctgctaccgtggctgcctggctcgccagcgggggtcccggcttggggaaagttgcctcgaaagttggtccactcgctcacgcagacctctctcctgcatctcttgtgtctttgcgtcctgatgcaacccaggaagccaacagcgaaaagaccaataacggaattcactaccggcttcagcttctctacagcaatgggataaggacggagcaggatttctacgtgcgcctcattgactccatgacaaaacaagccatagtgtatgaaggccaagacaagaacccagaaatgtgccgagtcttgctcacacatgagatcatgtgcagccgctgttgtgacaagaaaagctgtggcaaccgaaatgagactccctcagatccagtgataattgacaggttcttcttgaaatttttcctcaaatgtaaccaaaattgcctaaagaatgcgggaaacccacgtgacatgcggagattccaggtcgtggtgtctacgacagtcaatgtggatggccatgtcctggcagtctctgataacatgtttgtccataataattccaagcatgggcggagggctcggaggcttgacccctcggaaggtacgccctcttatctggaacatgctactccctgtatcaaagccatcagcccgagtgaaggatggacgacgggaggtgcgactgtgatcatcataggggacaatttctttgatgggttacaggtcatattcggtaccatgctggtctggagtgagttgatcactcctcatgccatccgtgtgcagacccctcctcggcacatccctggtgttgtggaagtcacactgtcctacaaatctaagcagttctgcaaaggaacaccaggcagattcatttatacagcgctcaacgaacccaccatcgattatggtttccagaggttacagaaggtcattcctcggcaccctggtgaccctgagcgtttgccaaaggaagtaatactcaaaagggctgcggatctggtagaagcactgtatgggatgccacacaacaaccaggaaatcattctgaagagagcggccgacattgccgaggccctgtacagtgttccccgcaaccacaaccaactcccggcccttgctaacacctcggtccacgcagggatgatgggcgtgaattcgttcagtggacaactggccgtgaatgtctccgaggcatcacaagccaccaatcagggtttcacccgcaactcaagcagcgtatcaccacacgggtacgtgccgagcaccactccccagcagaccaactataactccgtcaccacgagcatgaacggatacggctctgccgcaatgtccaatttgggcggctcccccaccttcctcaacggctcagctgccaactccccctatgccatagtgccatccagccccaccatggcctcctccacaagcctcccctccaactgcagcagctcctcgggcatcttctccttctcaccagccaacatggtctcagccgtgaaacagaagagtgctttcgcaccagtcgtcagaccccagacctccccacctcccacctgcaccagcaccaacgggaacagcctgcaagcgatatctggcatgattgttcctcctatgtgaaagaattgccttgaagaattgtattaatgaagaggttggattctgctacagagagtaatctgatacaagtcccagagtggaacttttaactcaggcctttttaagaggaatcacaataactgcagatttttaaacaaacaaaatcaccgaccttgcaaatactgaaattggaagagggatctgcaagtgcagggtgttggttaaagttgtacctcccaagtatttg

SEQ ID NO: 6190 - DNA, 766 bp, Homo sapiens
  source 1..766: mol_type = unassigned DNA; mol_type = unassigned DNA
tgggaattatggttggtttgggtgtcttctgaacttttggtactaaacatttgccatctgtaaacacttactggacttacaatgattggagaagacacaggcatgtttgtagcaaagggaatataggacagctccaagatccggggcggcttatagtctttgcggaggaggttcttcttgaaatttttcctcaaatgtaaccaaaattgcctaaagaatgcgggaaacccacgtgacatgcggagattccaggtcgtggtgtctacgacagtcaatgtggatggccatgtcctggcagtctctgataacatgtttgtccataataattccaagcatgggcggagggctcggaggcttgacccctcggaaggtacgccctcttatctggaacatgctactccctgtatcaaagccatcagcccgagtgaaggatggacgacgggaggtgcgactgtgatcatcataggggacaatttctttgatgggttacaggtcatattcggtaccatgctggtctggagtgagttgatcactcctcatgccatccgtgtgcagacccctcctcggcacatccctggtgttgtggaagtcacactgtcctacaaatctaagcagttctgcaaaggaacaccaggcagattcatttatacagcgctcaacgaacccaccatcgattatggtttccagaggttacagaaggtcattcctcggcaccctggtgaccctgagcgtttgccaaaggtgaggatactgcctttttgtaatt

SEQ ID NO: 6191 - DNA, 490 bp, Homo sapiens
  source 1..490: mol_type = unassigned DNA; mol_type = unassigned DNA
agagcttgaggggttcctggagggtggctgctgcggcgagacgccgagcatgttttccatccattcccacctgccctgctagctgagacgtgagattcgaggggtgccggaatataactgtgggttctactccgcgaagcggggtgggtctggcccgggctcactttgagaagcagccgccttccaatctgcggaaatccaacttcttccacttcgtcctggccctctacgacagacagggccagcccgtggagatcgagaggacagcgtttgtggggttcgtggagaaggaaaaagaagccaacagcgaaaagaccaataacggaattcactaccggcttcagcttctctacagcaatgggataaggacggagcaggatttctacgtgcgcctcattgactccatgacaaaacaagccatagtgtatgaaggccaagacaagaacccagaaatgtgccgagtcttgctcacacatgagatcatgtgcag

SEQ ID NO: 6192 - DNA, 4430 bp, Homo sapiens
  source 1..4430: mol_type = unassigned DNA; mol_type = unassigned DNA
tgtttcttcacaggttcttcttgaaatttttcctcaaatgtaaccaaaattgcctaaagaatgcgggaaacccacgtgacatgcggagattccaggtcgtggtgtctacgacagtcaatgtggatggccatgtcctggcagtctctgataacatgtttgtccataataattccaagcatgggcggagggctcggaggcttgacccctcggaaggtacgccctcttatctggaacatgctactccctgtatcaaagccatcagcccgagtgaaggatggacgacgggaggtgcgactgtgatcatcataggggacaatttctttgatgggttacaggtcatattcggtaccatgctggtctggagtgagttgatcactcctcatgccatccgtgtgcagacccctcctcggcacatccctggtgttgtggaagtcacactgtcctacaaatctaagcagttctgcaaaggaacaccaggcagattcatttatacagcgctcaacgaacccaccatcgattatggtttccagaggttacagaaggtcattcctcggcaccctggtgaccctgagcgtttgccaaaggaagtaatactcaaaagggctgcggatctggtagaagcactgtatgggatgccacacaacaaccaggaaatcattctgaagagagcggccgacattgccgaggccctgtacagtgttccccgcaaccacaaccaactcccggcccttgctaacacctcggtccacgcagggatgatgggcgtgaattcgttcagtggacaactggccgtgaatgtctccgaggcatcacaagccaccaatcagggtttcacccgcaactcaagcagcgtatcaccacacgggtacgtgccgagcaccactccccagcagaccaactataactccgtcaccacgagcatgaacggatacggctctgccgcaatgtccaatttgggcggctcccccaccttcctcaacggctcagctgccaactccccctatgccatagtgccatccagccccaccatggcctcctccacaagcctcccctccaactgcagcagctcctcgggcatcttctccttctcaccagccaacatggtctcagccgtgaaacagaagagtgctttcgcaccagtcgtcagaccccagacctccccacctcccacctgcaccagcaccaacgggaacagcctgcaagcgatatctggcatgattgttcctcctatgtgaaagaattgccttgaagaattgtattaatgaagaggttggattctgctacagagagtaatctgatacaagtcccagagtggaacttttaactcaggcctttttaagaggaatcacaataactgcagatttttaaacaaacaaaatcaccgaccttgcaaatactgaaattggaagagggatctgcaagtgcagggtgttggttaaagttgtacctcccaagtatttgggggatatatttattctgtattgacaaaagcaaatccactttttctttttcttttttttttttaagcttaattctgcaatcatttgtcttttataaaccgtaaagctctatacaagggacactataaataagactccatgttttaatttatgatgtttttaaagctgtgtaaaggaagaatgaagtggtgatatttacaaaaaagtaaaaaaaaaaaaaaagaaaaaaaggaaaaaaaaaaaagcttgtatgggacagaataggaatgccagttagattttttagaaaaactaagggtcggcttttgcgccttaaagcatatcaaatggtagttagctcagacagtgcattttcaatatctaacttaacatgccaccccttagcagtgcaagcttatttatctcttttgtattgttgtcttaagcaactgtgtaaataaatgcagcctggaaagttaaaacgcgatgtaagtgatcacatttttccctctactcgaaaatccagtgcctctagacagattgttaaaactgcatatttaaatctgatctcattctctccttttacttaagtcagtttcttctgaagccgatggcctctcgagagcttggtggcacacatactgtgtgagaatctcctttgagacttcatggaacagggtccaggcacagaattccacactctgccctccagttaacaagccaaaacctcacgtacgctcccccatttgcaagtttaaagtttactcgtcctaaatgcagacttcatacctatcttccaaaagttgataaaagcaacgtggcaggtattttcgattttcccattccagatactgcctctatcagtcgacccttaccatttgtaacataatagattgaaacaacaggttaagtgctttggaattaagagttaaagggaaccgggggtggagaaaggaaaagaaggttgagacctccaaaacatagttttctgttctatgggaatttttgctctcattatctgggaagtgttcttaaaaataagaattaatagcaaagatgcagcaaagctctgaggatgcatttgcctgatatttttttctttgctcttgtgtttttgtatgtagttataaatactgtagattttttttttgtgattttttgccaaagttgttgttctatttatacattttaatgtcttaagacattttttcaatatcacaaaaagattttactgcgtattttgcaaagaaaaaaagctcactacctttagcttgcacatacttgcaaagttaattaaaaggctttttgttttaaaggggattttgtaaaatatccatataaataatgtatttatctttcgaatttgtacattgcttttcccttcttcctcttccttccacccccaatttattttattgtgtatgtttgctacgtgaaaagtgcgtatttgtttggtcacctacacttgtattagctgtttcaatgtgatttttaaacatttcatttatagttatttttagtattgttataaaccatgcttcagtttttttaatttccacccaaaagtcattgtctatttttgtattatttgtaagttaagaagttttttccaatatatggcaaaaaaaaaaaaatagtagcatattattcttgtagtatttagttcagtagatttaaaaaaaaatgtatcctttgctttggaagcttacaaaacaaccctaatgctgttttactctattaatatgcatggaatctctccctttggagtgacgcattttgtgcattaaattctagggagaaacttcatagaaatcaatgaacatactttctttcttaagtctgcttgtatatttcctctgtctttcacataaatataaaccagcagattggatgccttaacaatgcaaatcatattcatttcacttgtacattgtaactgtgcaccagaactgtcagtcatcactaacattctaagaaaaaagaaaaagaaaaaaagaaaaaaaaaaaaacaaagaaatcgaaaagcacaaaagaactgttttgttaccttaagacaatgtaactttttctagtagagcaagaaatcatttacaacaatgctgcaactgtgcatgcccccatatggattttgcaatggttttcactaggctgtcaagagtgcgatttttatgggttggggtgggtgggggaggggagttgtgggagggtaggggagggaggaaagctgtttttcatggtgagaaataataatgatgactaataataataaaaaaaactggaaaatgtaagcaaggtggacgcattgcttctcggtactcagaaaggttatctgaatttgcgtggtaagcgctggcctgaagatgtacacaagttaaagccatattttatctggtgagccccttaactgtttctgaaggaatgaacggtcagccgggaaggtgtccggcttagaccttgacaacagacactacccatctgtcagccatgtgcagtggttagaactcttcttgaaagtccaaagagcctttaaaatgtgtataatttgtgttttgttgcttctatttctattgattagatgaaaagacattctggccctctgatcctctttcttctccacaaaagttttacaaataaaagatgttcccctaaatacagaatatggctttaagaagaaaatgaaatgaagaattaaattaagatttcagtgttgggggaaaaaatacagcttctggatgactggattgcataacattgccctggcctcacattgtactaggatgcagcttaaatgaagtcatctctaaatctactaacctttcaccttcttatcaaaactttttgaatagacacacactgtacagttcaattgttagagaacctaactactgtagagattgttaaattttttttttttttttgcaaaaattcaagctgtaaaaacttttcaactttcacaatatttaattaaagttacttcctgtctgtgatggc

SEQ ID NO: 6193 - DNA, 5145 bp, Homo sapiens
  source 1..5145: mol_type = unassigned DNA; mol_type = unassigned DNA
attcatggggcccgcgcgcggctgcagccgggctccgtggcgctcgcagccaccgcctcctctcggctccaggtcttccccttctttttacaactgatcctgttggggattttttttttttctaaattggaacggtggggaggagcagggaggggggacctggaggaaggggagagattaggcagccatcaatttcctccagtttctcccagaacaggtgatgcttctaaattgtgatcactttcaggaggcagcactgcagctggaaggatgcgagcgacctagggtggagtggctgaggcggcagatctgaacttgcggaggataagaacccaaactttgactacatcagtccgcacctcgccagtgaagcaaaggacgggttatcttttttttttttctaagactcaaacttgggcacttgatcccttttcttggattgctttggaggagacgatttgctggcaacgttgggaacagtcaggactgtgttgtaactcttacttttaaagcgacagtagaggatcagactttttaaatgtttggaattcaagatactttaggaagaggaccaactctgaaagagaaatcgctgggcgcggagatggattcggtcaggtcctgggtccggaatgtcggagtggtggacgctaatgtcgccgcgcagagcggggtcgccctgtcccgggcccactttgagaaacagcctccttccaacttgaggaaatccaacttctttcacttcgtcctggcgctctatgacaggcagggccagccggtggagatcgagcggacggccttcgtggactttgtggagaatgacaaagaacaaggcaacgagaagaccaacaacggcactcactacaagttacagctcctctacagcaacggtgtccgcacggaacaggacctctatgtcaggctcatcgactcggtcaccaagcagcccatcgcttacgagggacagaataagaatccggaaatgtgccgagttctcctgacgcacgaagtgatgtgtagtcgatgctgcgaaaagaaaagctgtggaaaccgaaatgagactccatcggacccagtcataattgacagattctttttaaaatttttcctcaagtgcaatcagaattgtttgaaaacagcaggaaacccaagggacatgagacggtttcaggttgtgttgtcaacaacggtgaatgtggatggacacgtcctggctgtttctgacaacatgtttgttcataacaactccaagcatggacggagagcaagaagactcgatccatcggaagctaccccctgcatcaaagccattagcccgagtgaaggctggaccacaggaggagccatggtcatcatcatcggggacaacttctttgatggtctccaagtggtgtttgggactatgcttgtatggagcgagctaataacccctcatgccatcagagtacagactcctccccggcacatcccaggcgtggtagaggtgacattatcttataaatctaaacagttctgcaaaggagccccaggaaggttcatttacacagcattaaatgaacccaccatagactatggcttccagagactgcagaaggtcatccctaggcatcctggagatcctgagagattagctaaggagatgctgttgaaaagagctgcagatctagtggaagctctttatggcacaccacacaataaccaggacatcattttgaagcgagccgcagacattgctgaagctctctacagcgtccccaggaatcccagccagcttccagccctctctagctccccagcgcacagtggcatgatgggaatcaactcctatggcagccagcttggggtcagcatctcagagtcaacacaaggaaataatcaagggtacatccgcaacacaagcagcatctctccgcggggatactcttccagctccacgcctcaacagtctaattacagtacctccagcaacagtatgaatggctacagcaatgtccccatggccaacttgggtgttccaggttcaccaggatttctaaatggctcacccaccggctctccttatggaatcatgtcatcaagtcccaccgttgggtcttccagcacatcctccatcctcccattttcctcttcagtttttcctgctgtcaaacagaagagtgcctttgcccctgtcatcaggccccaaggctccccttcacctgcctgctccagcggcaatggaaatggattcagagccatgaccggacttgttgtacccccgatgtaaagaagaactgctttcttatagcacaaaactacttactctgatggaccaataatgaagaaagcactaggagctcttttgggggtgtagtggtgcccccacatgaacatgatggacacccttgggtctgcaaggagccagcatcttacttggtcccacgtcctcctatagctctgatggtggctacacaaactgaccctcttgggacaaggacaaaagatgtcattgacgtagtcagtgctaagagcagaaatgcaattctttgttatgaacattatgaaaaccaccttcctatgtttgtaaaatatttaagaaaaaattggcaaacaattaatgcttaatattttggatactatttgtttttctttgtaggaaaaaaaagttgaaagtttctattttctatgaagcctttcagataccaatttagtttatgcagaaaaaaattgaacaaaacagggtaccagcacggaagactttcttaaaacgcaacctgaattgaatgatgaaatgttgtatgtgtgtttgcttatagcttaatctctttaaaaaatgaacaaaaaaagggaaaaattttaaaatgttttacaattatttaaataaataaatgtgtaacttattgtaagtagaggtagaaattaagacctttttttggaagagagagggatttctcttcctgatgtaaaatgaaaatgatgcaaacatgtagtaacaagttttaaaggtgtgtgattattactgcagttacttactagattcttatcccctgtcctgcaccccctccttttccatcactttattgacccaagggcaagaacatgtagattcccacagaacaccctaatgcagaaacagacactctagcacatgcacaaatactccaacccatcaattcattcccagctccgtctgatttctaaatagtccacactcttgtgaatactttttaaaattcctattattagctttcaacgttctcccctgagcagtccagagaattcccatgtttgagtctgtctcaggctttcagcatcccaaggaaagaagcacctcaccttctagcagagccaaaaccacagactttcttaaccaagggaccccttgggaattcctcctcaccagaaccccaccactccctccgctttgggtgcctggttcagtacagaggtacacagccccatagaacttcagcaacacggtttggagaagataactctgtttgatggactctttagagtcagtcttagaacatccaagtcctttcctctccctgtcaatttccccttttatggcattaaactctcttgaaaaacatagctatgccactcgacagtttctagtcaagaatgagacggaatgtgggagagggatattaaaagccctaatcccctcttctgatgttcgaagaaaggcaagaccagattcttgggagatccagagattaggggcatctgcgttctatgcagcacagttacccagccctttgatgggctcttcatcgttttgtgactagctcttagaggggaagaaccttgccttagctgctaacagtggttgattcttgaaagcttatgtaatcctagagacatatccaggcatattgggattgccaataaagatgtcacttgtttccacgttggggttctccttattgactcatgagcaccacaatagagtctatacacagacttagtttggggttcttggttgggatttcagcattagaaatagatgcagcactcatggaaaaacatcatgagtgcatctgagccaattttagatgatttcattaattctgcataccttctctttgacccattgatgcaggcccacatctatccagccccaactgtcttatttgcctttaacccattctggaattacccagtatgacttatattatttctatgcacatgagaatccaaggttttagaaacctggcatgcttataactactgctgacagtccctcatagtcagggcttaaagcgccaaaatacacggaaacataagagaaaaagtcccccagtgagaaacctgattgatggaaggggaagaatgtgtggaatatgaatgttaccttccaaaagtgaaggcagagcaaaattaagcatgtttagccctggatttgagccaatccaacataaggaaattttgttttttttaagtagcattgcttttagaacctgtgaattttccttttgcatgaagatgagtgcagtactgtcttcaaaatgattgtagaatttcttggtagctttacaccgaaaaatgcgtgtaactaaataccagacatcttgaccattcagctagaaccctggcagcaacagagctatttaattgtacaaatgtgtgtaaggattatttttagtgtactaataaattaaaaacaaagctaccctgtcctcgttagtcattgctattcaatcattccagtcccaagttatttttgtgccacttggaatatgagtatttctattggtaactacaaactctatcctgtgtttgtaagaggagctgtgtaagatttttttcatttaaagggacaatttacttcattatttatctttcttttgttatagcgttgtaattcttctcagtttttctttgcacatttcaatatgcatggtttaaaaaccattaacttctctaccttttgtacagtaaggtttcattttcacactgtatagtttcattttattgttttgctttgtcagttatatacagtataaagttgctatgcacagagctttttgtaaagacagcttttttgtttactgtttttaatggtcttacttaaagaatatcttgtttgtaaaatgaatatgtctacttcagttttaaactttaaattatcctaacaaaaaaataaaatttttgtactgt

SEQ ID NO: 6194 - DNA, 1888 bp, Homo sapiens
  source 1..1888: mol_type = unassigned DNA; mol_type = unassigned DNA
gcacttcccaaagtccctcctgaacctggaactcagtccctgagctcgtggccctgcgtgcgcagtcctcgcgggataggcccgaatgctgcctttccaaatgacaagtcccttcacttttctgccaagggaagccttggggcttcctaaggacagacagagcccgatgggttgggtggtgcctgtttaaaggcagctttggaacaaggcaacgagaagaccaacaacggcactcactacaagttacagctcctctacagcaacggtgtccgcacggaacaggacctctatgtcaggctcatcgactcggtcaccaagcagcccatcgcttacgagggacagaataagaatccggaaatgtgccgagttctcctgacgcacgaagtgatgtgtagtcgatgctgcgaaaagaaaagctgtggaaaccgaaatgagactccatcggacccagtcataattgacagattctttttaaaatttttcctcaagtgcaatcagaattgtttgaaaacagcaggaaacccaagggacatgagacggtttcaggttgtgttgtcaacaacggtgaatgtggatggacacgtcctggctgtttctgacaacatgtttgttcataacaactccaagcatggacggagagcaagaagactcgatccatcggaagctaccccctgcatcaaagccattagcccgagtgaaggctggaccacaggaggagccatggtcatcatcatcggggacaacttctttgatggtctccaagtggtgtttgggactatgcttgtatggagcgagctaataacccctcatgccatcagagtacagactcctccccggcacatcccaggcgtggtagaggtgacattatcttataaatctaaacagttctgcaaaggagccccaggaaggttcatttacacagcattaaatgaacccaccatagactatggcttccagagactgcagaaggtcatccctaggcatcctggagatcctgagagattagctaaggagatgctgttgaaaagagctgcagatctagtggaagctctttatggcacaccacacaataaccaggacatcattttgaagcgagccgcagacattgctgaagctctctacagcgtccccaggaatcccagccagcttccagccctctctagctccccagcgcacagtggcatgatgggaatcaactcctatggcagccagcttggggtcagcatctcagagtcaacacaaggaaataatcaagggtacatccgcaacacaagcagcatctctccgcggggatactcttccagctccacgcctcaacagtctaattacagtacctccagcaacagtatgaatggctacagcaatgtccccatggccaacttgggtgttccaggttcaccaggatttctaaatggctcacccaccggctctccttatggaatcatgtcatcaagtcccaccgttgggtcttccagcacatcctccatcctcccattttcctcttcagtttttcctgctgtcaaacagaagagtgcctttgcccctgtcatcaggccccaaggctccccttcacctgcctgctccagcggcaatggaaatggattcagagccatgaccggacttgttgtacccccgatgtaaagaagaactgctttcttatagcacaaaactacttactctgatggaccaataatgaagaaagcactaggagctcttttgggggtgtagtggtgcccccacatgaacatgatggacacccttgggtctgcaaggagccagcatcttacttggtcccacgtcctcctatagctctgatggtggctacacaaactgaccctcttgggacaaggacaaaagatgtcattgacgtagtcagtgctaagagcag

SEQ ID NO: 6195 - DNA, 2505 bp, Homo sapiens
  source 1..2505: mol_type = unassigned DNA; mol_type = unassigned DNA
gatgcttctaaattgtgatcactttcaggaggcagcactgcagctggaaggatgcgagcgacctagggtggagtggctgaggcggcagatctgaacttgcggaggataagaacccaaactttgactacatcagtccgcacctcgccagtgaagcaaaggacgggttatcttttttttttttctaagactcaaacttgggcacttgatcccttttcttggattgctttggaggagacgatttgctggcaacgttgggaacagtcaggactgtgttgtaactcttacttttaaagcgacagtagaggatcagactttttaaatgtttggaattcaagatactttaggaagaggaccaactctgaaagagaaatcgctgggcgcggagatggattcggtcaggtcctgggtccggaatgtcggagtggtggacgctaatgtcgccgcgcagagcggggtcgccctgtcccgggcccactttgagaaacagcctccttccaacttgaggaaatccaacttctttcacttcgtcctggcgctctatgacaggcagggccagccggtggagatcgagcggacggccttcgtggactttgtggagaatgacaaagaacaaggcaacgagaagaccaacaacggcactcactacaagttacagctcctctacagcaacggtgtccgcacggaacaggacctctatgtcaggctcatcgactcggtcaccaagcagcccatcgcttacgagggacagaataagaatccggaaatgtgccgagttctcctgacgcacgaagtgatgtgtagtcgatgctgcgaaaagaaaagctgtggaaaccgaaatgagactccatcggacccagtcataattgacaggtagggggaaaaagtgatttttcaatcatttttggttccttttcttcatgaacctcaactctgagtactgatccatggagctttgctgtcaagttggtttcatgttatttcaagtcactaagctcatccaacaaaggcctcctcatgctggcctttcttggaagaagccagaatcttcctttggaacacgtgtctctaaatctgtggtggagtcttttccaggtgcaccagcttcagcctaataagtagtatgtgtggtgcaggatataagcgatggcacctctcctttcgggcagggtatggtctcaatcagttttctagaagaagcaatgtgccccaagttaagtggcacccactttattattctcggtgattgctgcttggctggaagattatcaattcagattacggtttaggggattatggcaagctctctgctgtgttcagggagattcctttctaccatggaggattgcattctgtgttctatgttatattcagaatgggaaagattctttgggacaagacactaattcactgaaatgtgatttaggcatcctcagctgtctgttttttgtgattggaaacagaacttacaaaccaatgaagaaataccaaattaacttccagaaatcatgtaatttttaagaaaccccatattcccatccctaatttttttctctttcgttaaaaaacggaataattccctattgcttctttctttgggttttcacatttctagccaggtcctgaaatggattggagagaccacagtctccaaagttgttattccaatattccaacgaattctcagttgggagaatggaacctctggcattcttcccagaaagccagcttggtttcttcgtggaaagtatagcatagcctaggaactgaggaggctggaattctgatcttgtcctagcttctgaccttggacaaagcactcagcatctttgttcttcaataatataatgatgggttaggaggtgcagtcacttctgtaggcttcaagaggctactgaaatatcaatggcagctttgcagtgttctctgagatgcttgaagaggatgatgggcaaatataaaatgtttgttggatgtgtatagtgtctttgccattttagaaggttccagtgagctgcgttttagggagctattggggttgctctggtcttttttgaaagtacagagaagcttaaatatatagagttgcaaggactctttggagtcagtcattttcctcatctagctgaaaaatctgaacgctgagcggtggcatgacttgcccgtggttgtgcagctggttgggcagagctggcattagaacacagctgtccttacttccaggctgggtgccgtaactcacgcctgtaatcccagcacttaggaagaccgaggtgggcagatcacttgaggtcgggggtttgcgaccagcctggtcaacatagtggaccccagactttactaaaaatacaaaaattagtcaggcatggtggcacatgcctgtaatcccagctacttgggaggctgaggcaggaaaatcgcttgaacccaggaggcacagattgcagtgagccaagatcacgccactgcactccagcctgggtgacagagacagtgagactctgtctc

SEQ ID NO: 6196 - DNA, 1017 bp, Homo sapiens
  source 1..1017: mol_type = unassigned DNA; mol_type = unassigned DNA
atggtcatcatcatcggggacaacttctttgatggtctccaagtggtgtttgggactatgcttgtatggagcgagctaataacccctcatgccatcagagtacagactcctccccggcacatcccaggcgtggtagaggtgacattatcttataaatctaaacagttctgcaaaggagccccaggaaggttcatttacacagcattaaatgaacccaccatagactatggcttccagagactgcagaaggtcatccctaggcatcctggagatcctgagagattagctaaggagatgctgttgaaaagagctgcagatctagtggaagctctttatggcacaccacacaataaccaggacatcattttgaagcgagccgcagacattgctgaagctctctacagcgtccccaggaatcccagccagcttccagccctctctagctccccagcgcacagtggcatgatgggaatcaactcctatggcagccagcttggggtcagcatctcagagtcaacacaaggaaataatcaagggtacatccgcaacacaagcagcatctctccgcggggatactcttccagctccacgcctcaacagtctaattacagtacctccagcaacagtatgaatggctacagcaatgtccccatggccaacttgggtgttccaggttcaccaggatttctaaatggctcacccaccggctctccttatggaactggactttggctcacgtggttactcaaggccttttggggaaagaaaaggattgaaacaattccgtttttatagagaaagagcatgtgtggcctgttcatgtcatcaagtcccaccgttgggtcttccagcacatcctccatcctcccattttcctcttcagtttttcctgctgtcaaacagaagagtgcctttgcccctgtcatcaggccccaaggctccccttcacctgcctgctccagcggcaatggaaatggattcagagccatgaccggacttgttgtacccccgatgtaa

SEQ ID NO: 6197 - DNA, 4375 bp, Homo sapiens
  source 1..4375: mol_type = unassigned DNA; mol_type = unassigned DNA
ccgccaagccccgagcgccgctgctcgaggaaacgctttcggccgggagctgcggccgccgccagcagttttcatgtttgggattcaggagaatattccgcgcggggggacgaccatgaaggaggagccgctgggcagcggcatgaacccggtgcgctcgtggatgcacacggcgggcgtggtggacgccaacacggccgcccagagcggcgtggggctggcgcgggcgcacttcgagaagcagccgccttccaacctccggaaatccaatttcttccacttcgtgctggcgctctacgataggcaggggcagccggtggagattgaaaggaccgcttttgtggactttgtggagaaagagaaagagccaaacaacgagaaaaccaacaacggcatccactataaactccagttattgtacagcaacggagtcagaacagagcaagatctgtatgttcgcctcatagattcaatgaccaaacaggccatcgtctacgagggccaggacaagaacccggagatgtgccgtgtgctgctgacccacgagatcatgtgcagccggtgctgtgacaagaaaagttgtggcaatagaaacgaaacgccctcagaccctgtaatcattgacagattctttctaaagtttttcctcaagtgcaatcagaactgtttgaagaatgcaggcaaccctcgagatatgcggagattccaggttgttgtatcgacaacagtcaacgtggacggccacgtgctggccgtgtcagacaacatgtttgtgcacaacaattccaaacacgggaggcgggcccgccgcctagacccgtcagaagccactccgtgcatcaaggccatcagtcccagtgaaggctggaccacggggggtgccaccgtcatcataattggcgacaacttctttgacgggctgcaagttgtattcggaactatgttggtgtggagcgagctgataactccccatgccatccgagtccagaccccgccgaggcacattcctggcgtcgtcgaagtgaccctctcctacaaatccaagcagttctgcaaaggtgctcctgggcgctttgtctacaccgcccttaatgaaccaaccatagattacggctttcagaggttgcagaaagtgatcccaagacatccgggtgatcccgaaaggttacccaaggaggtgttactgaagcgggcggcggacctggtggaagccttatacggaatgcctcacaacaaccaggagatcatcttgaagcgagcggcggacatcgccgaggcgctgtacagcgttccccgcaatcacaaccagatccccaccctgggcaacaaccctgcacacacgggcatgatgggcgtcaactccttcagcagccagctagccgtcaacgtgtcagagacgtcacaagccaacgaccaagtcggctacagtcgcaatacaagcagcgtgtccccgcgaggctacgtccccagcagtactccccagcagtccaattacaacacagtcagcactagcatgaatggatatggaagtggcgccatggccagtctaggggtccctggctcgcctggatttcttaatggctcctccgctaactctccctacggcatgaaacagaagagcgccttcgcgcccgtggtccggccccaagcctctcctcctccttcctgcaccagcgccaacgggaatggactgcaagctatgtctgggctggtagtcccgccaatgtgagggacttctgtttaccttccgcagcacccagcatcaaaggacggacttcaggggacacgtttagtatattaagacatgctgatggaaacagtatcttcaaaaaaatcagcagcaattgaaatgctacaaaagactttgtttaaagattttatttaaactattaagaatcaacatgcaaacagcctacttcttcatgaacaattccattttattgactgaacttttctcatattttcacatttctcagtcctgaagaataaggaaaacaaagcgacgcctattttgtataaagtttccgactccgtcttggccatgtctagtaattgctatgtgttgggagaaactttgtgaatgcaccattttgatgatcatgaaacgctgatgaaaaatgcctccaaacatttttctgtactcatacttagattcacaatggttgtgtatctctataatgtgaaatatttttttgtggtgataaaaagagggccaaggaggtatgagccatcagactggaaaaaaggatgactatatgatgaggagaaactggggtggcagggagggagggagggtttatcactgcttaacttcatcttcatgaaatgaaactttgtaacttattgtagttagaaattgtaactttgatattgaattctcttgccttcaacaagcacactgacagagaaaaaatgctactgtctgttggttccaatattctcccactgctagagcttcctgttaagcaagtgtgatctgcaacattttttcaacttttgctagcactgtatactattgcattcttaggctactgtgaggtctatgtttcttgtaccagaaattgtccttttgacttctagatccttcttccctaatgtgttttgtatgtggttataaaattgtagacttttgtgattttgccaaagttgtagctaaatatttatacacttgtcttgaatttttttcagatccacttaaaatatttagaaaaacaagttttattccttatgtgtcttataaggaataaaatggtcttcatttgacacttactttcccatgaacacttgcagttgctaagggactttattttgtaacatatcaattataaatattgtatttatctttgaaattttgtacattgcttttcccaccttttcctttttcttctttcttgtctgtattggtttttgatcacggcctggtgttgtgatactgggaagagcattagccaagaacttgtctctttgatctgtttcgttaagctgaaccagtgtctttacatttcatttgtacttcaaaaaatatgctattgtttagactttccatcctttttttttttattttgaggaaaagtcaaattcattgtttatttttatattatttttaagttatctgaacaaatacttttgaaaaaaaagtttgttgtatagtcaaaacaaatcggtgccacccggccgtgacaaatcctagtagattctgtgcatgtggagcggccgcgaagaggtgacaccgtttggggctgtgtccttattttattttatttttttgtagaatgtaaaaagtcattttagatgccacccattgactttgccacatagctgaactgtgtttactggaaaaattcagaggcctaaagtttaaaataaaatttacttctgatgttttaattaaaatgtttgccacattaacttttctgatgccttaaaagtgaacttctttaaagaacctttgtgctattttatcacaggcttacactacaattgttaataaatacttcatttggagatgtatggtgtaaaacacacaaacacacacaaaaaagcacaagcccgctgcatgacccgtctctcctttctgggactatttctgctgcgtcctgcaccctcctgggcccacctccgattcacagaggtttcagggggacccaaatcactgctggttttcaatttttttttaacaatacatttttgtggtcagttccaacagcactgtccgtacttttaaaactggaatgacctccttcagatatcgtgcctcttagtgccaaacccacagtgagaccaaaagtgtcaggtgtttttttttttttctttctcctttgcactaagtgctttgcagacacggcacagcaaacattttgcaaactgcagcagaaatcgaatttaaaacaaaaaggagggactttaaaataccttcttgacaaaaatcaacaatgcacaacttacaaagtgttcattctagggacaaaattaaataaacagaatgtccccaggagtcagcaggtcacagtctggctttgtgatggttgacaaggtctagctacatgggaaagcctgagaagtcactttggaactaaattgcctccattttattttgtacgagtaagggtttgatctacaaaagagctcacatggacgcactgagaacgcctgccagcttccccatgccctcacttggtttgtgttttaggttaagtagtcaatgcccacatcacttcactgtctcaagactgagcacttcactaaatggtagattttactgttaaagaccctacaataagattgttttatctgtacattttttcagatatttaactgtataaaaatgttcattttacacaatatttaattaaagtatttcttgtctgtgaatttc

SEQ ID NO: 6198 - DNA, 2993 bp, Homo sapiens
  source 1..2993: mol_type = unassigned DNA; mol_type = unassigned DNA
ccgccaagccccgagcgccgctgctcgaggaaacgctttcggccgggagctgcggccgccgccagcagttttcatgtttgggattcaggagaatattccgcgcggggggacgaccatgaaggaggagccgctgggcagcggcatgaacccggtgcgctcgtggatgcacacggcgggcgtggtggacgccaacacggccgcccagagcggcgtggggctggcgcgggcgcacttcgagaagcagccgccttccaacctccggaaatccaatttcttccacttcgtgctggcgctctacgataggcaggggcagccggtggagattgaaaggaccgcttttgtggactttgtggagaaagagaaagagccaaacaacgagaaaaccaacaacggcatccactataaactccagttattgtacagcaacggagtcagaacagagcaagatctgtatgttcgcctcatagattcaatgaccaaacaggccatcgtctacgagggccaggacaagaacccggagatgtgccgtgtgctgctgacccacgagatcatgtgcagccggtgctgtgacaagaaaagttgtggcaatagaaacgaaacgccctcagaccctgtaatcattgacagattctttctaaagtttttcctcaagtgcaatcagaactgtttgaagaatgcaggcaaccctcgagatatgcggagattccaggttgttgtatcgacaacagtcaacgtggacggccacgtgctggccgtgtcagacaacatgtttgtgcacaacaattccaaacacgggaggcgggcccgccgcctagacccgtcagaaggtacggccccttcttatctggaaaatgccactccgtgcatcaaggccatcagtcccagtgaaggctggaccacggggggtgccaccgtcatcataattggcgacaacttctttgacgggctgcaagttgtattcggaactatgttggtgtggagcgagctgataactccccatgccatccgagtccagaccccgccgaggcacattcctggcgtcgtcgaagtgaccctctcctacaaatccaagcagttctgcaaaggtgctcctgggcgctttgtctacaccgcccttaatgaaccaaccatagattacggctttcagaggttgcagaaagtgatcccaagacatccgggtgatcccgaaaggttacccaaggaggtgttactgaagcgggcggcggacctggtggaagccttatacggaatgcctcacaacaaccaggagatcatcttgaagcgagcggcggacatcgccgaggcgctgtacagcgttccccgcaatcacaaccagatccccaccctgggcaacaaccctgcacacacgggcatgatgggcgtcaactccttcagcagccagctagccgtcaacgtgtcagagacgtcacaagccaacgaccaagtcggctacagtcgcaatacaagcagcgtgtccccgcgaggctacgtccccagcagtactccccagcagtccaattacaacacagtcagcactagcatgaatggatatggaagtggcgccatggccagtctaggggtccctggctcgcctggatttcttaatggctcctccgctaactctccctacggcatagtgccgtccagccccaccatggcagcctcttcggtcaccctcccttcaaactgtagcagcacacacggcattttctcattctcacctgccaatgtcatctccgcagtgaaacagaagagcgccttcgcgcccgtggtccggccccaagcctctcctcctccttcctgcaccagcgccaacgggaatggactgcaagctatgtctgggctggtagtcccgccaatgtgagggacttctgtttaccttccgcagcacccagcatcaaaggacggacttcaggggacacgtttagtatattaagacatgctgatggaaacagtatcttcaaaaaaatcagcagcaattgaaatgctacaaaagactttgtttaaagattttatttaaactattaagaatcaacatgcaaacagcctacttcttcatgaacaattccattttattgactgaacttttctcatattttcacatttctcagtcctgaagaataaggaaaacaaagcgacgcctattttgtataaagtttccgactccgtcttggccatgtctagtaattgctatgtgttgggagaaactttgtgaatgcaccattttgatgatcatgaaacgctgatgaaaaatgcctccaaacatttttctgtactcatacttagattcacaatggttgtgtatctctataatgtgaaatatttttttgtggtgataaaaagagggccaaggaggtatgagccatcagactggaaaaaaggatgactatatgatgaggagaaactggggtggcagggagggagggagggtttatcactgcttaacttcatcttcatgaaatgaaactttgtaacttattgtagttagaaattgtaactttgatattgaattctcttgccttcaacaagcacactgacagagaaaaaatgctactgtctgttggttccaatattctcccactgctagagcttcctgttaagcaagtgtgatctgcaacattttttcaacttttgctagcactgtatactattgcattcttaggctactgtgaggtctatgtttcttgtaccagaaattgtccttttgacttctagatccttcttccctaatgtgttttgtatgtggttataaaattgtagacttttgtgattttgccaaagttgtagctaaatatttatacacttgtcttgaatttttttcagatccacttaaaatatttagaaaaacaagttttattccttatgtgtcttataaggaataaaatggtcttcatttgacacttactttcccatgaacacttgcagttgctaagggactttattttgtaacatatcaattataaatattgtatttatctttgaaattttgtaca

SEQ ID NO: 6199 - DNA, 817 bp, Homo sapiens
  source 1..817: mol_type = unassigned DNA; mol_type = unassigned DNA
cttcagcagccagctagccgtcaacgtgtcagagacgtcacaagccaacgaccaagtcggctacagtcgcaatacaagcagcgtgtccccgcgaggctacgtccccagcagtactccccagcagtccaattacaacacagtcagcactagcatgaatggatatggaagtggcgccatggccagtctaggggtccctggctcgcctggatttcttaatggctcctccgctaactctccctacggcatagtgccgtccagccccaccatggcagcctcttcggtcaccctcccttcaaactgtagcagcacacacggcattttctcattctcacctgccaatgtcatctccgcagtgaaacagaagagcgccttcgcgcccgtggtccggccccaagcctctcctcctccttcctgcaccagcgccaacgggaatggactgcaaggctctctgctgggtgctgaggacgtagccgcggagaagacaaactggcccttttgtgaagtcggtggcatatttcactttgatgaactaatgctcaaaaaaggaactggaaagctatgtctgggctggtagtcccgccaatgtgagggacttctgtttaccttccgcagcacccagcatcaaaggacggacttcaggggacacgtttagtatattaagacatgctgatggaaacagtatcttcaaaaaaatcagcagcaattgaaatgctacaaaagactttgtttaaagattttatttaaactattaagaatcaacatgcaaacagcctacttcttcatgaacaattccattttattgactgaacttttctca

SEQ ID NO: 6200 - DNA, 2788 bp, Homo sapiens
  source 1..2788: mol_type = unassigned DNA; mol_type = unassigned DNA
gcggccgcggcggggcggcgcgggaaccgggccccggggggagtcggccgggctgctgctgctgctgctccaggtgctgccgcccggggctacggcagggccgggacgccggggcacgcggggcgctggcgctggcggcggcggcgtctgctggcccggcgcggccccagcctttccccgggacgcgcggctgctgctgctcctgccgccgctgccgccactgtcgccgccgccgccgagctccgcgcccgcagcctccgcctcccggatggacgctctgccccgcagcgggctgaacctgaaggaggagccgctgctgcccgccggcctgggctcagtgcgctcctggatgcagggcgcgggcatcctggacgccagcaccgcggcgcagagtggcgtgggtctggcacgagcacattttgagaagcagcctccctccaacctcaggaaatccaacttcttccacttcgtgctggccatgtacgaccggcaggggcagcccgtggaggtggagcgcacagccttcatcgacttcgtggaaaaggaccgagagcccggggcggaaaagactaacaatgggatccattaccgcctccggctggtgtataacaatggactgcggacagagcaagacctctacgtgcgtctcatcgactccatgtccaaacaggccatcatctatgaggggcaggacaagaaccccgaaatgtgccgagtgctgctcacccatgagatcatgtgcagccggtgctgtgaccggaagagctgtggcaaccggaatgagacgccctcagaccccgtcatcattgacaggttcttcctcaagttcttcctcaaatgcaaccagaactgcctgaagaatgcggggaatcccagagacatgcgccgcttccaggtggtggtgtccacgacggtgagcgtggacggacacgtgctggccgtgtccgacaacatgtttgtgcacaacaactccaagcatggccgcagggcgcgccgcctggacccctccgaagctgccaccccctgcatcaaggccatcagccccggggagggctggaccacgggcggcgccaccgtcattgtcatcggcgacaacttcttcgacgggttgcaggtcgtgttcggaaacgtgctcgtgtggagcgagctcatcacgccccacgccatccgggtgcagacgcccccgcggcacatccccggggtggtggaggtgaccctctcctacaagtccaagcagttttgcaagggatgccccggccgctttgtctacacagctctgaacgagcccaccattgactacggattccagaggctacagaaagtcattcccagacaccccggagaccccgagaggctgcccaaggaagtgctgctgaagcgggcggccgacttggcagaagccctgtacggagtgcccggcagtaaccaggagctgctcctgaagcgcgcggcggacgtggccgaggctctgtacagcaccccccgcgcacccgggccgctcgcacccctggccccgagccacccacaccccgccgtcgtgggcatcaacgccttcagcagcccgctggccatcgccgtcggggacgccaccccggggcccgagccgggctacgcgcgcagctgcagcagcgcgtccccccgcgggttcgcgcccagccccggctcgcagcagagcggctacggcggcggcctcggagctggcctgggcggctacggcgcgccgggcgtggccggcctcggcgtgcctgggtcccccagcttcctcaatggctccaccgccacctcgcccttcgccaaggagcgccttcgcccccgtgctgcgccccccaagctccccaccccaggcctgccccagagcccacggagaggggcttccagaccagtcttttgaggattctgacaagtttcactctccagcccgggggcttcagggcctggcatactcctaattacggtctgcagctgttcccatggagcccggactggaggtccctctgggattcacagccacaccccggatggtggcacagacagatgcagggccagggccatgggcggacctcaacccgtgagctgaacggggagaggccttcaccccatgctcaagcctccccgctagcagccccacaggcttctctcgcctccctgtcttggggtagtcagaagccccagcactgtgcagatgctcttggcaggacagcatcgcagggaggtgctgggattctgggcctcactgtctgggtcttggttcctctgaaagagatggatcttgtgcagaccagggttgttgagtgaggggagcgtgggatggggaccgtgggaaagaggacagctcagggagaagtgacctggaaaggtcctgtttgcatctgacccatctcaactggcccagcatcccaacttctctgcagcgaaagggtggcgccccgcagcctcgggaggcctgcccaggctcccgtggagcttccaacagctgcttggccccgcagctgcccccacttcctttgagacctgcactctcatgcttgccgcatcatgcctccctgtgggggctttgggcatggaggaggcagaagagggggtgccaggcctcctgtatttggggtcttcccccagtggatgtctcatggactctggccccacacactcacaatgactctggctggccccacgcagcgggcccagccgccccccaggtggcctcacattctgctctgctaagtttggagaaaacagaacaataaaccagatgcaggtggtgcccgcccggcctctcacctgcctcctt

SEQ ID NO: 6201 - DNA, 444 bp, Homo sapiens
  source 1..444: mol_type = unassigned DNA; mol_type = unassigned DNA
cggccgcggcggggcggcgcgggaaccgggccccggggggagtcggccgggctgctgctgctgctgctccaggacgctctgccccgcagcgggctgaacctgaaggaggagccgctgctgcccgccggcctgggctcagtgcgctcctggatgcagggcgcgggcatcctggacgccagcaccgcggcgcagagtggcgtgggtctggcacgagcacattttgagaagcagcctccctccaacctcaggaaatccaacttcttccacttcgtgctggccatgtacgaccggcaggggcagcccgtggaggtggagcgcacagccttcatcgacttcgtggaaaaggaccgagagcccggggcggaaaagactaacaatgggatccattaccgcctccggctggtgtataacaatggactgcggacagagcaagacctctacgtg

SEQ ID NO: 6202 - DNA, 2705 bp, Homo sapiens
  source 1..2705: mol_type = unassigned DNA; mol_type = unassigned DNA
cggccgcggcggggcggcgcgggaaccgggccccggggggagtcggccgggctgctgctgctgctgctccaggacgctctgccccgcagcgggctgaacctgaaggaggagccgctgctgcccgccggcctgggctcagtgcgctcctggatgcagggcgcgggcatcctggacgccagcaccgcggcgcagagtggcgtgggtctggcacgagcacattttgagaagcagcctccctccaacctcaggaaatccaacttcttccacttcgtgctggccatgtacgaccggcaggggcagcccgtggaggtggagcgcacagccttcatcgacttcgtggaaaaggaccgagagcccggggcggaaaagactaacaatgggatccattaccgcctccggctggtgtataacaatggactgcggacagagcaagacctctacgtgcgtctcatcgactccatgtccaaacaggccatcatctatgaggggcaggacaagaaccccgaaatgtgccgagtgctgctcacccatgagatcatgtgcagccggtgctgtgaccggaagagctgtggcaaccggaatgagacgccctcagaccccgtcatcattgacaggttcttcctcaagttcttcctcaaatgcaaccagaactgcctgaagaatgcggggaatcccagagacatgcgccgcttccaggtggtggtgtccacgacggtgagcgtggacggacacgtgctggccgtgtccgacaacatgtttgtgcacaacaactccaagcatggccgcagggcgcgccgcctggacccctccgaagctgccaccccctgcatcaaggccatcagccccggggagggctggaccacgggcggcgccaccgtcattgtcatcggcgacaacttcttcgacgggttgcaggtcgtgttcggaaacgtgctcgtgtggagcgagctcatcacgccccacgccatccgggtgcagacgcccccgcggcacatccccggggtggtggaggtgaccctctcctacaagtccaagcagttttgcaagggatgccccggccgctttgtctacacagctctgaacgagcccaccattgactacggattccagaggctacagaaagtcattcccagacaccccggagaccccgagaggctgcccaaggaagtgctgctgaagcgggcggccgacttggcagaagccctgtacggagtgcccggcagtaaccaggagctgctcctgaagcgcgcggcggacgtggccgaggctctgtacagcaccccccgcgcacccgggccgctcgcacccctggccccgagccacccacaccccgccgtcgtgggcatcaacgccttcagcagcccgctggccatcgccgtcggggacgccaccccggggcccgagccgggctacgcgcgcagctgcagcagcgcgtccccccgcgggttcgcgcccagccccggctcgcagcagagcggctacggcggcggcctcggagctggcctgggcggctacggcgcgccgggcgtggccggcctcggcgtgcctgggtcccccagcttcctcaatggctccaccgccacctcgcccttcgccatcatgccctctagccccccgctggcggctgcctcctccatgtccctcccggccgctgcccccaccaccagcgtgttctccttctcgcctgtcaacatgatctccgccgtcaaacagaggagcgccttcgcccccgtgctgcgccccccaagctccccaccccaggcctgccccagagcccacggagaggggcttccagaccagtcttttgaggattctgacaagtttcactctccagcccgggggcttcagggcctggcatactcctaattacggtctgcagctgttcccatggagcccggactggaggtccctctgggattcacagccacaccccggatggtggcacagacagatgcagggccagggccatgggcggacctcaacccgtgagctgaacggggagaggccttcaccccatgctcaagcctccccgctagcagccccacaggcttctctcgcctccctgtcttggggtagtcagaagccccagcactgtgcagatgctcttggcaggacagcatcgcagggaggtgctgggattctgggcctcactgtctgggtcttggttcctctgaaagagatggatcttgtgcagaccagggttgttgagtgaggggagcgtgggatggggaccgtgggaaagaggacagctcagggagaagtgacctggaaaggtcctgtttgcatctgacccatctcaactggcccagcatcccaacttctctgcagcgaaagggtggcgccccgcagcctcgggaggcctgcccaggctcccgtggagcttccaacagctgcttggccccgcagctgcccccacttcctttgagacctgcactctcatgcttgccgcatcatgcctccctgtgggggctttgggcatggaggaggcagaagagggggtgccaggcctcctgtatttggggtcttcccccagtggatgtctcatggactctggccccacacactcacaatgactctggctggccccacgcagcgggcccagccgccccccaggtggcctcacattctgctctgctaagtttggagaaaacagaacaataaaccagatgcaggtggtgcccgcccggcctctcacctgcctcctt

SEQ ID NO: 6203 - DNA, 2012 bp, Homo sapiens
  source 1..2012: mol_type = unassigned DNA
tgagctagacgcccgcagcctcagcgggaccggatccggggcggcgggggcgctcactcaccgcgcgccctcatgttccctgcgcaggacgctctgccccgcagcgggctgaacctgaaggaggagccgctgctgcccgccggcctgggctcagtgcgctcctggatgcagggcgcgggcatcctggacgccagcaccgcggcgcagagtggcgtgggtctggcacgagcacattttgagaagcagcctccctccaacctcaggaaatccaacttcttccacttcgtgctggccatgtacgaccggcaggggcagcccgtggaggtggagcgcacagccttcatcgacttcgtggaaaaggaccgagagcccggggcggaaaagactaacaatgggatccattaccgcctccggctggtgtataacaatggactgcggacagagcaagacctctacgtgcgtctcatcgactccatgtccaaacaggccatcatctatgaggggcaggacaagaaccccgaaatgtgccgagtgctgctcacccatgagatcatgtgcagccggtgctgtgaccggaagagctgtggcaaccggaatgagacgccctcagaccccgtcatcattgacaggttcttcctcaagttcttcctcaaatgcaaccagaactgcctgaagaatgcggggaatcccagagacatgcgccgcttccaggtggtggtgtccacgacggtgagcgtggacggacacgtgctggccgtgtccgacaacatgtttgtgcacaacaactccaagcatggccgcagggcgcgccgcctggacccctccgaagctgccaccccctgcatcaaggccatcagccccggggagggctggaccacgggcggcgccaccgtcattgtcatcggcgacaacttcttcgacgggttgcaggtcgtgttcggaaacgtgctcgtgtggagcgagctcatcacgccccacgccatccgggtgcagacgcccccgcggcacatccccggggtggtggaggtgaccctctcctacaagtccaagcagttttgcaagggatgccccggccgctttgtctacacagctctgaacgagcccaccattgactacggattccagaggctacagaaagtcattcccagacaccccggagaccccgagaggctgcccaaggaagtgctgctgaagcgggcggccgacttggcagaagccctgtacggagtgcccggcagtaaccaggagctgctcctgaagcgcgcggcggacgtggccgaggctctgtacagcaccccccgcgcacccgggccgctcgcacccctggccccgagccacccacaccccgccgtcgtgggcatcaacgccttcagcagcccgctggccatcgccgtcggggacgccaccccggggcccgagccgggctacgcgcgcagctgcagcagcgcgtccccccgcgggttcgcgcccagccccggctcgcagcagagcggctacggcggcggcctcggagctggcctgggcggctacggcgcgccgggcgtggccggcctcggcgtgcctgggtcccccagcttcctcaatggctccaccgccacctcgcccttcgccatcatgccctctagccccccgctggcggctgcctcctccatgtccctcccggccgctgcccccaccaccagcgtgttctccttctcgcctgtcaacatgatctccgccgtcaaacagaggagcgccttcgcccccgtgctgcgccccccaagctccccaccccaggcctgccccagagcccacggagaggggcttccagaccagtcttttgaggattctgacaagtttcactctccagcccgggggcttcagggcctggcatactcctaattacggtctgcagctgttcccatggagcccggactggaggtccctctgggattcacagccacaccccggatggtggcacagacagatgcagggccagggccatgggcggacctcaacccgtgagctgaacg

SEQ ID NO: 6204 - DNA, 2861 bp, Homo sapiens
  source 1..2861: mol_type = unassigned DNA; mol_type = unassigned DNA
tgagctagacgcccgcagcctcagcgggaccggatccggggcggcgggggcgctcactcaccgcgcgccctcatgttccctgcgcaggacgctctgccccgcagcgggctgaacctgaaggaggagccgctgctgcccgccggcctgggctcagtgcgctcctggatgcagggcgcgggcatcctggacgccagcaccgcggcgcagagtggcgtgggtctggcacgagcacattttgagaagcagcctccctccaacctcaggaaatccaacttcttccacttcgtgctggccatgtacgaccggcaggggcagcccgtggaggtggagcgcacagccttcatcgacttcgtggaaaaggaccgagagcccggggcggaaaagactaacaatgggatccattaccgcctccggctggtgtataacaatggactgcggacagagcaagacctctacgtgcgtctcatcgactccatgtccaaacaggccatcatctatgaggggcaggacaagaaccccgaaatgtgccgagtgctgctcacccatgagatcatgtgcagccggtgctgtgaccggaagagctgtggcaaccggaatgagacgccctcagaccccgtcatcattgacaggttcttcctcaagttcttcctcaaatgcaaccagaactgcctgaagaatgcggggaatcccagagacatgcgccgcttccaggtggtggtgtccacgacggtgagcgtggacggacacgtgctggccgtgtccgacaacatgtttgtgcacaacaactccaagcatggccgcagggcgcgccgcctggacccctccgaagctgccaccccctgcatcaaggccatcagccccggggagggctggaccacgggcggcgccaccgtcattgtcatcggcgacaacttcttcgacgggttgcaggtcgtgttcggaaacgtgctcgtgtggagcgagctcatcacgccccacgccatccgggtgcagacgcccccgcggcacatccccggggtggtggaggtgaccctctcctacaagtccaagcagttttgcaagggatgccccggccgctttgtctacacagctctgaacgagcccaccattgactacggattccagaggctacagaaagtcattcccagacaccccggagaccccgagaggctgcccaaggaagtgctgctgaagcgggcggccgacttggcagaagccctgtacggagtgcccggcagtaaccaggtatggcgcctccgccctcccagcgccgccgggaccggggccccccagcacgcggcgcccgcggctgccccggccgtgccccgctcttgtcttcgcaggagctgctcctgaagcgcgcggcggacgtggccgaggctctgtacagcaccccccgcgcacccgggccgctcgcacccctggccccgagccacccacaccccgccgtcgtgggcatcaacgccttcagcagcccgctggccatcgccgtcggggacgccaccccggggcccgagccgggctacgcgcgcagctgcagcagcgcgtccccccgcgggttcgcgcccagccccggctcgcagcagagcggctacggcggcggcctcggagctggcctgggcggctacggcgcgccgggcgtggccggcctcggcgtgcctgggtcccccagcttcctcaatggctccaccgccacctcgcccttcgccatcatgccctctagccccccgctggcggctgcctcctccatgtccctcccggccgctgcccccaccaccagcgtgttctccttctcgcctgtcaacatgatctccgccgtcaaacagaggagcgccttcgcccccgtgctgcgccccccaagctccccaccccaggcctgccccagagcccacggagaggggcttccagcccagagagtgacaggcaggtggcttcccaggtggcacatggcttatggctcctttttccttgactactgcagaccagtcttttgaggattctgacaagtttcactctccagcccgggggcttcagggcctggcatactcctaattacggtctgcagctgttcccatggagcccggactggaggtccctctgggattcacagccacaccccggatggtggcacagacagatgcagggccagggccatgggcggacctcaacccgtgagctgaacggggagaggccttcaccccatgctcaagcctccccgctagcagccccacaggcttctctcgcctccctgtcttggggtagtcagaagccccagcactgtgcagatgctcttggcaggacagcatcgcagggaggtgctgggattctgggcctcactgtctgggtcttggttcctctgaaagagatggatcttgtgcagaccagggttgttgagtgaggggagcgtgggatggggaccgtgggaaagaggacagctcagggagaagtgacctggaaaggtcctgtttgcatctgacccatctcaactggcccagcatcccaacttctctgcagcgaaagggtggcgccccgcagcctcgggaggcctgcccaggctcccgtggagcttccaacagctgcttggccccgcagctgcccccacttcctttgagacctgcactctcatgcttgccgcatcatgcctccctgtgggggctttgggcatggaggaggcagaagagggggtgccaggcctcctgtatttggggtcttcccccagtggatgtctcatggactctggccccacacactcacaatgactctggctggccccacgcagcgggcccagccgccccccaggtggcctcacattctgctctgctaagtttggagaaaacagaacaataaaccagatgcaggtg

SEQ ID NO: 6205 - DNA, 547 bp, Homo sapiens
  source 1..547: mol_type = unassigned DNA; mol_type = unassigned DNA
tgaaggaggagccgctgctgcccgccggcctgggctcagtgcgctcctggatgcagggcgcgggcatcctggacgccagcaccgcggcgcagagtggcgtgggtctggcacgagcacattttgagaagcagcctccctccaacctcaggaaatccaacttcttccacttcgtgctggccatgtacgaccggcaggggcagcccgtggaggtggagcgcacagccttcatcgacttcgtggaaaaggaccgagagcccggggcggaaaagactaacaatgggatccattaccgcctccggctggtgtataacaatggactgcggacagagcaagacctctacgtgcgtctcatcgactccatgtccaaacaggccatcatctatgaggggcaggacaagaaccccgaaatgtgccgagtgctgctcacccatgagatcatgtgcaggttcttcctcaagttcttcctcaaatgcaaccagaactgcctgaagaatgcggggaatcccagagacatgcgccgcttccaggtggtggtgtccacgacggt

SEQ ID NO: 6206 - DNA, 642 bp, Homo sapiens
  source 1..642: mol_type = unassigned DNA; mol_type = unassigned DNA
ctcatcgactccatgtccaaacaggccatcatctatgaggggcaggacaagaaccccgaaatgtgccgagtgctgctcacccatgagatcatgtgcagccggtgctgtgaccggaagagctgtggcaaccggaatgagacgccctcagaccccgtcatcattgacaggttcttcctcaagttcttcctcaaatgcaaccagaactgcctgaagaatgcggggaatcccagagacatgcgccgcttccaggtggtggtgtccacgacggtgagcgtggacggacacgtgctggccgtgtccgacaacatgtttgtgcacaacaactccaagcatggccgcagggcgcgccgcctggacccctccgaagctgcccccacttcctttgagacctgcactctcatgcttgccgcatcatgcctccctgtgggggctttgggcatggaggaggcagaagagggggtgccaggcctcctgtatttggggtcttcccccagtggatgtctcatggactctggccccacacactcacaatgactctggctggccccacgcagcgggcccagccgccccccaggtggcctcacattctgctctgctaagtttggagaaaacagaacaataaaccagatgcaggtggtgccc

SEQ ID NO: 6207 - DNA, 665 bp, Homo sapiens
  source 1..665: mol_type = unassigned DNA; mol_type = unassigned DNA
cttccccagctctgaacgagcccaccattgactacggattccagaggctacagaaagtcattcccagacaccccggagaccccgagaggctgcccaaggaagtgctgctgaagcgggcggccgacttggcagaagccctgtacggagtgcccggcagtaaccaggtatggcgcctccgccctcccagcgccgccgggaccggggccccccagcacgcggcgcccgcggctgccccggccgtgccccgctcttgtcttcgcaggagctgctcctgaagcgcgcggcggacgtggccgaggctctgtacagcaccccccgcgcacccgggccgctcgcacccctggccccgagccacccacaccccgccgtcgtgggcatcaacgccttcagcagcccgctggccatcgccgtcggggacgccaccccggggcccgagccgggctacgcgcgcagctgcagcagcgcgtccccccgcgggttcgcgcccagccccggctcgcagcagagcggctacggcggcggcctcggagctggcctgggcggctacggcgcgccgggcgtggccggcctcggcgtgcctgggtcccccagcttcctcaatggctccaccgccacctcgcccttcgccatcatgccctctagccccccgctggcggctgcctcct

SEQ ID NO: 6208 - DNA, 299 bp, Homo sapiens
  source 1..299: mol_type = unassigned DNA; mol_type = unassigned DNA
tgggtcccccagcttcctcaatggctccaccgccacctcgcccttcgccatcatgccctctagccccccgctggcagaagagggggtgccaggcctcctgtatttggggtcttcccccagtggatgtctcatggactctggccccacacactcacaatgactctggctggccccacgcagcgggcccagccgccccccaggtggcctcacattctgctctgctaagtttggagaaaacagaacaataaaccagatgcaggtggtgcccgcccggcctctcacctgcctccttggtgtga

SEQ ID NO: 6209 - DNA, 1647 bp, Homo sapiens
  source 1..1647: mol_type = unassigned DNA; mol_type = unassigned DNA
tggcaaggagagcatatttgaggaggaagttggagtgctgtttgtgatgctgggcagagaggcttataacaggagcctgtgcgttcccccaaacttcatccctaactacttgttccagctcttctgtgactcctgaactatgactctagccttggcaccccaagcaaggctcataaatgtttcctagcatctcagaatcccaggggttttcagcagaaatcctgaagtagtccagctgttgctcatctcatttttggggggtacctcccactgtttgttttttttgaatgttctggttttgcttttgtctttacctggtctggccctgtcatccccagccccgagaaaaggtctccagaaccgctgagaggtcagggctggcccaggaccctcacagctcccagtgagatctgagcctggtacctgtgtcagcagcccatgtggggccccagccaagctgctcactctggtgctgtctccctgttgtgtctcccaccaccttccctgctgcgcctgcccctccccgccccgccccggagtcatgccctctagccccccgctggcggctgcctcctccatgtccctcccggccgctgcccccaccaccagcgtgttctccttctcgcctgtcaacatgatctccgccgtcaaacagaggagcgccttcgcccccgtgctgcgccccccaagctccccaccccaggcctgccccagagcccacggagaggggcttccagaccagtcttttgaggattctgacaagtttcactctccagcccgggggcttcagggcctggcatactcctaattacggtctgcagctgttcccatggagcccggactggaggtccctctgggattcacagccacaccccggatggtggcacagacagatgcagggccagggccatgggcggacctcaacccgtgagctgaacggggagaggccttcaccccatgctcaagcctccccgctagcagccccacaggcttctctcgcctccctgtcttggggtagtcagaagccccagcactgtgcagatgctcttggcaggacagcatcgcagggaggtgctgggattctgggcctcactgtctgggtcttggttcctctgaaagagatggatcttgtgcagaccagggttgttgagtgaggggagcgtgggatggggaccgtgggaaagaggacagctcagggagaagtgacctggaaaggtcctgtttgcatctgacccatctcaactggcccagcatcccaacttctctgcagcgaaagggtggcgccccgcagcctcgggaggcctgcccaggctcccgtggagcttccaacagctgcttggccccgcagctgcccccacttcctttgagacctgcactctcatgcttgccgcatcatgcctccctgtgggggctttgggcatggaggaggcagaagagggggtgccaggcctcctgtatttggggtcttcccccagtggatgtctcatggactctggccccacacactcacaatgactctggctggccccacgcagcgggcccagccgccccccaggtggcctcacattctgctctgctaagtttggagaaaacagaacaataaaccagatgcaggtggtgcccgcccggcctctcacctgcctcctt

SEQ ID NO: 6210 - DNA, 2910 bp, Homo sapiens
  source 1..2910: mol_type = unassigned DNA; mol_type = unassigned DNA
gcggccgcggcggggcggcgcgggaaccgggccccggggggagtcggccgggctgctgctgctgctgctccaggtgctgccgcccggggctacggcagggccgggacgccggggcacgcggggcgctggcgctggcggcggcggcgtctgctggcccggcgcggccccagcctttccccgggacgcgcggctgctgctgctcctgccgccgctgccgccactgtcgccgccgccgccgagctccgcgcccgcagcctccgcctcccggatggacgctctgccccgcagcgggctgaacctgaaggaggagccgctgctgcccgccggcctgggctcagtgcgctcctggatgcagggcgcgggcatcctggacgccagcaccgcggcgcagagtggcgtgggtctggcacgagcacattttgagaagcagcctccctccaacctcaggaaatccaacttcttccacttcgtgctggccatgtacgaccggcaggggcagcccgtggaggtggagcgcacagccttcatcgacttcgtggaaaaggaccgagagcccggggcggaaaagactaacaatgggatccattaccgcctccggctggtgtataacaatggactgcggacagagcaagacctctacgtgcgtctcatcgactccatgtccaaacaggccatcatctatgaggggcaggacaagaaccccgaaatgtgccgagtgctgctcacccatgagatcatgtgcagccggtgctgtgaccggaagagctgtggcaaccggaatgagacgccctcagaccccgtcatcattgacaggttcttcctcaagttcttcctcaaatgcaaccagaactgcctgaagaatgcggggaatcccagagacatgcgccgcttccaggtggtggtgtccacgacggtgagcgtggacggacacgtgctggccgtgtccgacaacatgtttgtgcacaacaactccaagcatggccgcagggcgcgccgcctggacccctccgaagctgccaccccctgcatcaaggccatcagccccggggagggctggaccacgggcggcgccaccgtcattgtcatcggcgacaacttcttcgacgggttgcaggtcgtgttcggaaacgtgctcgtgtggagcgagctcatcacgccccacgccatccgggtgcagacgcccccgcggcacatccccggggtggtggaggtgaccctctcctacaagtccaagcagttttgcaagggatgccccggccgctttgtctacacagctctgaacgagcccaccattgactacggattccagaggctacagaaagtcattcccagacaccccggagaccccgagaggctgcccaaggaagtgctgctgaagcgggcggccgacttggcagaagccctgtacggagtgcccggcagtaaccaggagctgctcctgaagcgcgcggcggacgtggccgaggctctgtacagcaccccccgcgcacccgggccgctcgcacccctggccccgagccacccacaccccgccgtcgtgggcatcaacgccttcagcagcccgctggccatcgccgtcggggacgccaccccggggcccgagccgggctacgcgcgcagctgcagcagcgcgtccccccgcgggttcgcgcccagccccggctcgcagcagagcggctacggcggcggcctcggagctggcctgggcggctacggcgcgccgggcgtggccggcctcggcgtgcctgggtcccccagcttcctcaatggctccaccgccacctcgcccttcgccatcatgccctctagccccccgctggcggctgcctcctccatgtccctcccggccgctgcccccaccaccagcgtgttctccttctcgcctgtcaacatgatctccgccgtcaaacagaggagcgccttcgcccccgtgctgcgccccccaagctccccaccccaggcctgccccagagcccacggagaggggcttccagaccagtcttttgaggattctgacaagtttcactctccagcccgggggcttcagggcctggcatactcctaattacggtctgcagctgttcccatggagcccggactggaggtccctctgggattcacagccacaccccggatggtggcacagacagatgcagggccagggccatgggcggacctcaacccgtgagctgaacggggagaggccttcaccccatgctcaagcctccccgctagcagccccacaggcttctctcgcctccctgtcttggggtagtcagaagccccagcactgtgcagatgctcttggcaggacagcatcgcagggaggtgctgggattctgggcctcactgtctgggtcttggttcctctgaaagagatggatcttgtgcagaccagggttgttgagtgaggggagcgtgggatggggaccgtgggaaagaggacagctcagggagaagtgacctggaaaggtcctgtttgcatctgacccatctcaactggcccagcatcccaacttctctgcagcgaaagggtggcgccccgcagcctcgggaggcctgcccaggctcccgtggagcttccaacagctgcttggccccgcagctgcccccacttcctttgagacctgcactctcatgcttgccgcatcatgcctccctgtgggggctttgggcatggaggaggcagaagagggggtgccaggcctcctgtatttggggtcttcccccagtggatgtctcatggactctggccccacacactcacaatgactctggctggccccacgcagcgggcccagccgccccccaggtggcctcacattctgctctgctaagtttggagaaaacagaacaataaaccagatgcaggtggtgcccgcccggcctctcacctgcctccttggtgtg

SEQ ID NO: 6211 - DNA, 457 bp, Homo sapiens
  source 1..457: mol_type = unassigned DNA; mol_type = unassigned DNA
atctgttatggcaccagtagatgtagacctgaacctggtttcaaatatattggaatcctatagctcccaagctggactggcaggacctgcttccaatcttttacaaagcatgggagtgcagctgcctgacaacaccgatcacagaccaacaaacggagtctctctctgttgcccaggctggagtgcagtggcgctatcttggctcaatgcaagctccacctcccaggttcacgccattctcctgcctcagcctcctgagtagctgggactacaggcgcccgccaccatgcccggctaattttttgtattttttagtagagacagggtttcaccgtgtcagccaggatggtctcgatctcctgatcttgtgatccacccgccttggccccccaaagtgctgggattacaggtgtgagccactgtgcccggccgagttaaatatatttctaacatagta

SEQ ID NO: 6212 - DNA, 3069 bp, Homo sapiens
  source 1..3069: mol_type = unassigned DNA; mol_type = unassigned DNA
caaggtttcggggactgagtgggtttcagactttctctcaggatttccgctggcttcaggttccggtcaggcgtcgggacagagcctgatccaggcttcggcggccggtggcagctctcgatcagctctcgcagtcggagaggcggctaaggaaaggtgccacagcagagacgcgaaggagaggccctagaaccttttcaaagaagaatggaagaaaccatgaagcttgctacgatggaagacacagtggagtactgcctgttcctgataccagatgagtcaagggactcagataaacataaagagattcttcagaagtacattgagagaataatcactcggtttgcacctatgctggtcccctacatctggcagaatcagcctttcaatcttaaatataaacctgggaaaggaggtgttcctgctcatatgtttggcgtgacaaagtttggggataacattgaggatgaatggtttattgtttatgtaataaagcagatcacaaaggaatttccagagttagtagcaaggattgaagacaatgatggtgaattcttgttaatagaagctgctgactttctccctaaatggctggatcctgaaaatagcaccaatagggtatttttctgccatggggaattgtgtattatccctgcaccaagaaaatctggagcagaatcttggttacccaccacacccccaacaattccacaagcattgaatataatcacagcacattcagaaaaaatacttgcttcagaatctatacgagctgctgtgaataggcgcatcagagggtacccagaaaaaattcaggcctcacttcatcgagcacactgcttccttccagctggcattgtggcagtgctaaagcagcgccccagattggtggctgcagcagtccaggcattttacctacgagaccctattgacctgcgagcttgtcgtgttttcaagacattcttgcctgaaacacgaataatgacatcggtcacattcactaaatgtctatatgcacaattggtgcaacaaaggtttgtgccagaccggcggagtggatacaggctgcctcctccatctgatccccagtaccgagcccatgaattgggcatgaaattggctcatggatttgagatcttatgctccaaatgtagcccacatttttctgactgcaagaaatcccttgtgactgcctcaccactctgggccagtttccttgaaagtctgaaaaagaatgattactttaagggactgatagaaggttctgctcagtaccgggaaaggctagaaatggcagagaattacttccagctctcagtagactggccagaaagttctcttgctatgagccctggtgaagaaatcttaaccttattacagacaataccatttgatatagaagaccttaagaaagaagcagctaatcttcccccagaggatgatgaccagtggttagatctctcaccagatcagctggaccagctgctgcaggaagctgttggcaaaaaagaatccgagtctgtttccaaggaggagaaggagcagaactatgacttaactgaagtctcagagagcatgaaagctttcatatccaaagtctcaacccacaagggagcagagctgcctcgagaaccttctgaggctccaatcacttttgatgcagattcttttcttaattattttgataagattttagggccaaggcctaatgagtcagattctgatgatctggatgatgaagactttgaatgtttagatagtgatgatgacttggactttgaaacacacgaacctggcgaagaggcttccctgaaaggaacacttgataatctcaagtcatacatggcccagatggaccaggaactagcacacacctgcatcagcaaaagtttcaccactaggaaccaagtggaacctgtatcccagactaccgataacaattcagatgaggaagattctggtacgggagaatctgttatggcaccagtagatgtagacctgaacctggtttcaaatatattggaatcctatagctcccaagctggactggcaggacctgcttccaatcttttacaaagcatgggagtgcagctgcctgacaacaccgatcacagaccaacaagtaagccaacaaaaaattaaccagcacatttagcttctcttttttctttttaaataaatattgaatatgattctgttcatttctagtttagattactcatttagtaaaaatgtttcttcattacaagttttacagattgacttctccatgagccccaaatgtggccctcttggcacaagtctttgtgatctcagctgtgggttatacacaggttttgaactcggcagggtagaatctagcccctagacaaccttgagatgaaattcacacacttcatgctaaagacataccctaccacaatatacccttggagtaattctaaatatttaaatttctcccttactgctattcatcctcagatcaaaatttcaagttgacaaatttggatttgaaaactcattcactttttcaatttttttaatgaggcataacatgcatatggttaagtgcacaaatcttaagtgtacagtcagtgaatttttgcatgtatgtatgtacctgaagcaagatatagaacttatttacttgtaaataacagctatattgatatgtcacataccaaaaaatttaccctttaaattatacaattcagtggtttttagtatatttacaaaattgtgcaaccatccctaccatctaattctagaatattagaaaccccatactcactaatagtctctcattcccttctactcccagcccctagaaaccactagtctactttctgtctctatggatttgcctattttggatatttcatacctgatactgtacttaattgttttaattaattaattggtttgatatttaatataactgatatatcttttgctaagatgaaatgtttatttcttaaaatgatgctcatattcctcctaaaataaatcaagtattatctatatatcataaaattcaccattaaaagcaaaaaaaaagtcttctttaca

SEQ ID NO: 6213 - DNA, 1679 bp, Homo sapiens
  source 1..1679: mol_type = unassigned DNA; mol_type = unassigned DNA
cagctctcgatcagctctcgcagtcggagaggcggctaaggaaaggtgccacagcagagacgcgaaggagaggccctagaaccgaggtgttcctgctcatatgtttggcgtgacaaagtttggggataacattgaggatgaatggtttattgtttatgtaataaagcagatcacaaaggaatttccagagttagtagcaaggattgaagacaatgatggtgaattcttgttaatagaagctgctgactttctccctaaatggctggatcctgaaaatagcaccaatagggtatttttctgccatggggaattgtgtattatccctgcaccaagaaaatctggagcagaatcttggttacccaccacacccccaacaattccacaagcattgaatataatcacagcacattcagaaaaaatacttgcttcagaatctatacgagctgctgtgaataggcgcatcagagggtcacattcactaaatgtctatatgcacaattggtgcaacaaaggtttgtgccagaccggcggagtggatacaggctgcctcctccatctgatccccagtaccgagcccatgaattgggcatgaaattggctcatggatttgagatcttatgctccaaatgtagcccacatttttctgactgcaagaaatcccttgtgactgcctcaccactctgggccagtttccttgaaagtctgaaaaagaatgattactttaagggactgatagaaggttctgctcagtaccgggaaaggctagaaatggcagagaattacttccagctctcagtagactggccagaaagttctcttgctatgagccctggtgaagaaatcttaaccttattacagacaataccatttgatatagaagaccttaagaaagaagcagctaatcttcccccagaggatgatgaccagtggttagatctctcaccagatcagctggaccagctgctgcaggaagctgttggcaaaaaagaatccgagtctgtttccaaggaggagaaggagcagaactatgacttaactgaagtctcagagagcatgaaagctttcatatccaaagtctcaacccacaagggagcagagctgcctcgagaaccttctgaggctccaatcacttttgatgcagattcttttcttaattattttgataagattttagggccaaggcctaatgagtcagattctgatgatctggatgatgaagactttgaatgtttagatagtgatgatgacttggactttgaaacacacgaacctggcgaagaggcttccctgaaaggaacacttgataatctcaagtcatacatggcccagatggaccaggaactagcacacacctgcatcagcaaaagtttcaccactaggaaccaagtggaacctgtatcccagactaccgataacaattcagatgaggaagattctggtacgggagaatctgttatggcaccagtagatgtagacctgaacctggtttcaaatatattggaatcctatagctcccaagctggactggcaggacctgcttccaatcttttacaaagcatgggagtgcagctgcctgacaacaccgatcacagaccaacaagtaagccaacaaaaaattaaccagcacatttagcttctcttttttctttttaaataaatattgaatatgattctgttca

SEQ ID NO: 6214 - DNA, 2084 bp, Homo sapiens
  source 1..2084: mol_type = unassigned DNA; mol_type = unassigned DNA
agtgacgacacacaaggtttcggggactgagtgggtttcagactttctctcaggatttccgctggcttcaggttccggtcaggcgtcgggacagagcctgatccaggcttcggcggccggtggcagctctcgatcagctctcgcagtcggagaggcggctaaggaaaggtgccacagcagagacgcgaaggagaggccctagaaccttttcaaagaagaatggaagaaaccatgaagcttgctacgatggaagacacagtggagtactgcctgttcctgataccagatgagtcaagggactcagataaacataaagagattcttcagaagtacattgagagaataatcactcggtttgcacctatgctggtcccctacatctggcagaatcagcctttcaatcttaaatataaacctgggaaaggaggtgttcctgctcatatgtttggcgtgacaaagtttggggataacattgaggatgaatggtttattgtttatgtaataaagcagatcacaaaggaatttccagagttagtagcaaggattgaagacaatgatggtgaattcttgttaatagaagctgctgactttctccctaaatggctggatcctgaaaatagcaccaatagggtatttttctgccatggggaattgtgtattatccctgcaccaagaaaatctggagcagaatcttggttacccaccacacccccaacaattccacaagcattgaatataatcacagcacattcagaaaaaatacttgcttcagaatctatacgagctgctgtgaataggcgcatcagagggtacccagaaaaaattcaggcctcacttcatcgagcacactgcttccttccagctggcattgtggcagtgctaaagcagcgccccagattggtggctgcagcagtccaggcattttacctacgagaccctattgacctgcgagcttgtcgtgttttcaagacattcttgcctgaaacacgaataatgacatcggctcatggatttgagatcttatgctccaaatgtagcccacatttttctgactgcaagaaatcccttgtgactgcctcaccactctgggccagtttccttgaaagtctgaaaaagaatgattactttaagggactgatagaaggttctgctcagtaccgggaaaggctagaaatggcagagaattacttccagctctcagtagactggccagaaagttctcttgctatgagccctggtgaagaaatcttaaccttattacagacaataccatttgatatagaagaccttaagaaagaagcagctaatcttcccccagaggatgatgaccagtggttagatctctcaccagatcagctggaccagctgctgcaggaagctgttggcaaaaaagaatccgagtctgtttccaaggaggagaaggagcagaactatgacttaactgaagtctcagagagcatgaaagctttcatatccaaagtctcaacccacaagggagcagagctgcctcgagaaccttctgaggctccaatcacttttgatgcagattcttttcttaattattttgataagattttagggccaaggcctaatgagtcagattctgatgatctggatgatgaagactttgaatgtttagatagtgatgatgacttggactttgaaacacacgaacctggcgaagaggcttccctgaaaggaacacttgataatctcaagtcatacatggcccagatggaccaggaactagcacacacctgcatcagcaaaagtttcaccactaggaaccaagtggaacctgtatcccagactaccgataacaattcagatgaggaagattctggtacgggagaatctgttatggcaccagtagatgtagacctgaacctggtttcaaatatattggaatcctatagctcccaagctggactggcaggacctgcttccaatcttttacaaagcatgggagtgcagctgcctgacaacaccgatcacagaccaacaagtaagccaacaaaaaattaaccagcacatttagcttctcttttttctttttaaataaatattgaatatgattctgttca

SEQ ID NO: 6215 - DNA, 2246 bp, Homo sapiens
  source 1..2246: mol_type = unassigned DNA; mol_type = unassigned DNA
acacacaaggtttcggggactgagtgggtttcagactttctctcaggatttccgctggcttcaggttccggtcaggcgtcgggacagagcctgatccaggcttcggcggccggtggcagctctcgatcagctctcgcagtcggagaggcggctaaggaaaggtgccacagcagagacgcgaaggagaggccctagaaccttttcaaagaagaatggaagaaaccatgaagcttgctacgatggaagacacagtggagtactgcctgttcctgataccagatgagtcaagggactcagataaacataaagagattcttcagaagtacattgagagaataatcactcggtttgcacctatgctggtcccctacatctggcagaatcagcctttcaatcttaaatataaacctgggaaaggaggtgttcctgctcatatgtttggcgtgacaaagtttggggataacattgaggatgaatggtttattgtttatgtaataaagcagatcacaaaggaatttccagagttagtagcaaggattgaagacaatgatggtgaattcttgttaatagaagctgctgactttctccctaaatggctggatcctgaaaatagcaccaatagggtatttttctgccatggggaattgtgtattatccctgcaccaagaaaatctggagcagaatcttggttacccaccacacccccaacaattccacaagcattgaatataatcacagcacattcagaaaaaatacttgcttcagaatctatacgagctgctgtgaataggcgcatcagagggtacccagaaaaaattcaggcctcacttcatcgagcacactgcttccttccagctggcattgtggcagtgctaaagcagcgccccagattggtggctgcagcagtccaggcattttacctacgagaccctattgacctgcgagcttgtcgtgttttcaagacattcttgcctgaaacacgaataatgacatcggtcacattcactaaatgtctatatgcacaattggtgcaacaaaggtttgtgccagaccggcggagtggatacaggctgcctcctccatctgatccccagtaccgagcccatgaattgggcatgaaattggctcatggatttgagatcttatgctccaaatgtagcccacatttttctgactgcaagaaatcccttgtgactgcctcaccactctgggccagtttccttgaaagtctgaaaaagaatgattactttaagggactgatagaaggttctgctcagtaccgggaaaggctagaaatggcagagaattacttccagctctcagtagactggccagaaaggttggaggtgcagtggcgcgatcctggcttactgcaagctccacctcctgggttcacgccattcatctgcctcagcctcctgagtacctgggacaacagttctcttgctatgagccctggtgaagaaatcttaaccttattacagacaataccatttgatatagaagaccttaagaaagaagcagctaatcttcccccagaggatgatgaccagtggttagatctctcaccagatcagctggaccagctgctgcaggaagctgttggcaaaaaagaatccgagtctgtttccaaggaggagaaggagcagaactatgacttaactgaagtctcagagagcatgaaagctttcatatccaaagtctcaacccacaagggagcagagctgcctcgagaaccttctgaggctccaatcacttttgatgcagattcttttcttaattattttgataagattttagggccaaggcctaatgagtcagattctgatgatctggatgatgaagactttgaatgtttagatagtgatgatgacttggactttgaaacacacgaacctggcgaagaggcttccctgaaaggaacacttgataatctcaagtcatacatggcccagatggaccaggaactagcacacacctgcatcagcaaaagtttcaccactaggaaccaagtggaacctgtatcccagactaccgataacaattcagatgaggaagattctggtacgggagaatctgttatggcaccagtagatgtagacctgaacctggtttcaaatatattggaatcctatagctcccaagctggactggcaggacctgcttccaatcttttacaaagcatgggagtgcagctgcctgacaacaccgatcacagaccaacaagtaagccaacaaaaaattaa

SEQ ID NO: 6216 - DNA, 884 bp, Homo sapiens
  source 1..884: mol_type = unassigned DNA; mol_type = unassigned DNA
aaaatgctcccgccgacgcacagcagtgacgacacacaaggtttcggggactgagtgggtttcagactttctctcaggatttccgctggcttcaggttccggtcaggcgtcgggacagagcctgatccaggcttcggcggccggtggcagctctcgatcagctctcgcagtcggagaggcggctaaggaaaggtgccacagcagagacgcgaaggagaggccctagaaccgaggtgttcctgctcatatgtttggcgtgacaaagtttggggataacattgaggatgaatggtttattgtttatgtaataaagcagatcacaaaggaatttccagagttagtagcaaggattgaagacaatgatggtgaattcttgttaatagaagctgctgactttctccctaaatggctggatcctgaaaatagcaccaatagggtatttttctgccatggggaattgtgtattatccctgcaccaagaaaatctggagcagaatcttggttacccaccacacccccaacaattccacaagcattgaatataatcacagcacattcagaaaaaatacttgcttcagaatctatacgagctgctgtgaataggcgcatcagagggtacccagaaaaaattcaggcctcacttcatcgagcacactgcttccttccagctggcattgtggcagtgctaaagcagcgccccagattggtggctgcagcagtccaggcattttacctacgagaccctattgacctgcgagcttgtcgtgttttcaagacattcttgcctgaaacacgaataatgacatcggtcacattcactaaatgtctatatgcacaattggtgcaacaaaggtttgtgccagaccggcggagtggatacaggc

SEQ ID NO: 6217 - DNA, 877 bp, Homo sapiens
  source 1..877: mol_type = unassigned DNA; mol_type = unassigned DNA
gcacagcagtgacgacacacaaggtttcggggactgagtgggtttcagactttctctcaggatttccgctggcttcaggttccggtcaggcgtcgggacagagcctgatccaggcttcggcggccggtggcagctctcgatcagctctcgcagtcggagaggcggctaaggaaaggtgccacagcagagacgcgaaggagaggccctagaaccttttcaaagaagaatggaagaaaccatgaagcttgctacgatggaagacacagtggagtactgcctgttcctgataccagatgagtcaagggactcagataaacataaagagattcttcagaagtacattgagagaataatcactcggtttgcacctatgctggtcccctacatctggcagaatcagcctttcaatcttaaatataaacctgggaaaggaggtgttcctgctcatatgtttggcgtgacaaagtttggggataacattgaggatgaatggtttattgtttatgtaataaagcagatcacaaaggaatttccagagttagtagcaagcaccaatagggtatttttctgccatggggaattgtgtattatccctgcaccaagaaaatctggagcagaatcttggttacccaccacacccccaacaattccacaagcattgaatataatcacagcacattcagaaaaaatacttgcttcagaatctatacgagctgctgtgaataggcgcatcagagggtacccagaaaaaattcaggcctcacttcatcgagcacactgcttccttccagctggcattgtggcagtgctaaagcagcgccccagattggtggctgcagcagtccaggcattttacctacgagaccctattgacctg

SEQ ID NO: 6218 - DNA, 581 bp, Homo sapiens
  source 1..581: mol_type = unassigned DNA; mol_type = unassigned DNA
aagcgtgagccaccacggccggccgtgagggtggatctttttaaagccagaaatatttgctctttaaagtctcaaaagcaaaactgatctttatggattctggtgcttaattgcagaggtggggaggcagtatgtgtgatggttatgaccacaggcttcggaatcagatcgacatcagttttcaaagaagaatggaagaaaccatgaagcttgctacgatggaagacacagtggagtactgcctgttcctgataccagatgagtcaagggactcagataaacataaagagattcttcagaagtacattgagagaataatcactcggtttgcacctatgctggtcccctacatctggcagaatcagcctttcaatcttaaatataaacctgggaaaggaggtgttcctgctcatatgtttggcgtgacaaagtttggggataacattgaggatgaatggtttattgtttatgtaataaagcagatcacaaaggaatttccagagttagtagcaaggattgaagacaatgatggtgaattcttgttaatagaagctgctgactttctccctaaatggctggat

SEQ ID NO: 6219 - DNA, 5099 bp, Homo sapiens
  source 1..5099: mol_type = unassigned DNA; mol_type = unassigned DNA
gagcgcgccgcctgggccaggcagccgagccgtccgagcagctgggctgggagcagggaacccggagctgggaatcgggagccgggcgcggggagctgcgcgaagccggggcggagcacgcgagctatgatgtcgacgtacaagcgggccacgctggacgaggaggacctggtggactcgctctccgagggcgacgcataccccaacggcctgcaggtgaacttccacagcccccggagtggccagaggtgctgggctgcacggacccaggtggagaagcggctggtggtgttggtggtacttctggcggcaggactggtggcctgcttggcagcactgggcatccagtaccagacaagatccccctctgtgtgcctgagcgaagcttgtgtctcagtgaccagctccatcttgagctccatggaccccacagtggacccctgccatgacttcttcagctacgcctgtgggggctggatcaaggccaacccagtccctgatggccactcacgctgggggaccttcagcaacctctgggaacacaaccaagcaatcatcaagcacctcctcgaaaactccacggccagcgtgagcgaggcagagagaaaggcgcaagtatactaccgtgcgtgcatgaacgagaccaggatcgaggagctcagggccaaacctctaatggagttgattgagaggctcgggggctggaacatcacaggtccctgggccaaggacaacttccaggacaccctgcaggtggtcaccgcccactaccgcacctcacccttcttctctgtctatgtcagtgccgattccaagaactccaacagcaacgtgatccaggtggaccagtctggcctgggcttgccctcgagagactattacctgaacaaaactgaaaacgagaaggtgctgaccggatatctgaactacatggtccagctggggaagctgctgggcggcggggacgaggaggccatccggccccagatgcagcagatcttggactttgagacggcactggccaacatcaccatcccacaggagaagcgccgtgatgaggagctcatctaccacaaagtgacggcagccgagctgcagaccttggcacccgccatcaactggttgccttttctcaacaccatcttctaccccgtggagatcaatgaatccgagcctattgtggtctatgacaaggaataccttgagcagatctccactctcatcaacaccaccgacagatgcctgctcaacaactacatgatctggaacctggtgcggaaaacaagctccttccttgaccagcgctttcaggacgccgatgagaagttcatggaagtcatgtacgggaccaagaagacctgtcttcctcgctggaagttttgcgtgagtgacacagaaaacaacctgggctttgcgttgggccccatgtttgtcaaagcaaccttcgccgaggacagcaagagcatagccaccgagatcatcctggagattaagaaggcatttgaggaaagcctgagcaccctgaagtggatggatgaggaaacccgaaaatcagccaaggaaaaggccgatgccatctacaacatgataggataccccaacttcatcatggatcccaaggagctggacaaagtgtttaatgactacactgcagttccagacctctactttgaaaatgccatgcggtttttcaacttctcatggagggtcactgccgatcagctcaggaaagcccccaacagagatcagtggagcatgaccccgcccatggtgaacgcctactactcgcccaccaagaatgagattgtgtttccggccgggatcctgcaggcaccattctacacacgctcctcacccaaggccttaaactttggtggcataggtgtcgtcgtgggccatgagctgactcatgcttttgatgatcaaggacgggagtatgacaaggacgggaacctccggccatggtggaagaactcatccgtggaggccttcaagcgtcagaccgagtgcatggtagagcagtacagcaactacagcgtgaacggggagccggtgaacgggcggcacaccctgggggagaacatcgccgacaacgggggtctcaaggcggcctatcgggcttaccagaactgggtgaagaagaacggggctgagcactcgctccccaccctgggcctcaccaataaccagctcttcttcctgggctttgcacaggtctggtgctccgtccgcacacctgagagctcccacgaaggcctcatcaccgatccccacagcccctctcgcttccgggtcatcggctccctctccaattccaaggagttctcagaacacttccgctgcccacctggctcacccatgaacccgcctcacaagtgcgaagtctggtaaggacgaagcggagagagccaagacggaggaggggaaggggctgaggacgagacccccatccagcctccagggcattgctcagcccgcttggccacccggggccctgcttcctcacactggcgggttttcagccggaaccgagcccatggtgttggctctcaacgtgacccgcagtctgatcccctgtgaagagccggacatcccaggcacacgtgtgcgccaccttcagcaggcattcgggtgctgggctggtggctcatcaggcctgggccccacactgacaagcgccagatacgccacaaataccactgtgtcaaatgctttcaagatatatttttggggaaactattttttaaacactgtggaatacactggaaatcttcagggaaaaacacatttaaacacttttttttttaaggaaagaattggtatatttattatgttctgtttttctaaataacctgtggacaagggaagccccactgatttactccctctcttccccactccctgtgaggctgggctgaggcacggatccctgggccacagagcaagtctccaaatcagacagctgcctcagcccctgggatgtgtgatttcagctcctgtcacctcatgcaagggcgtggagaccagtagaggtgtggaggccaggcagagagaggagcctgctctgcggggggcccagctcatgggcactgccccttcagctagcctgcctccgtcccctgagtccaacagtgggagccctagctgggaagttctgatccccaaagccacagcaggggactgatggctatagcagaatgaggtcgggtcaggaccctcaaacaccatctgggaacaccaagcaccctgaatcgagactgcaggagccctgcggggtgagactgtgtcagagatacactgctggccacaagtgtcccctctcagtcccaccttttcgggctgtcccatgtctatctcaggggcccgttacctctctgcagcagtcccccatcccagccacaccagggtctgtccggccaaccctcttccccagggaaaggagaaaagagaaaacaggctgggcccggtggctcactcctgtaatcccagcactttgggaggttgaggtgggcggatcacctgaggtcaggagtttgagaccagcctggccaacgtggtgaaaccccatctctactaaaaaaaattacaaaaattagccgggagtggtggtgggcacctgtaatcccagttactcgggaggctgaggcaagagaatctcttgagctcaggaggcagaggttgcagtgagctgagattgcgccactgcactccagcctgggtgacagagggagactccgtcccaaaaaaaagaaaagagaaacagctgtcacctcccgcaggacccaaatcctctctctgagcaccgtcatccaccacatggctgggcctggctcccaggaccagtccagtcctctagtgccttatctgaggctgcagccgccagtctccaccccaaggagacagcccctgctcctagatgcccttggcctccgcagtgcagcccccaggtgtcctgactgaagcacaggccatagccccatttccccggtgcctgcagggctaacctccacgggagcccaggagctctggccggcaggtccatggcacagggcatcggaagactgcaaaactgctggacttaccctgggctgcagtccattgtcggcccctgggttgaatcaagatagtacttgcagctagatggatgcttttagccaggggacattgtgaggggaagattcctccacccagtctggcctgtggtgtctgtctcctccctgagaccacagcttctccagtagcagactcatgggcgccaccaagtggaagcacctggagcggcctctgccatccagtggggaagccaggccccgagacggaggtgggggcagcacgtgccctccacagccaccgctttcccgcctcagcagcccaggcctcctggcccagccctgcctggacagtgctctcccctcacccgggaagctggaatcctcctgcccgagaggaagcagacggcacagggacacccctgccaccttgggatctgcctccaagctggtgcagggtatcgagagtggattccagatggaggtcctggtcccagcacgcagcagtcctggtagctctgcagaggagacaggaacccgagaagtagctgaagcagaagccagccgcagtccccttgccacatagaggcgggcttctcccagccatggtgtcccctctgcctcccctcccccgaccctcctgccttccgcgtggagggtggtggtcctgtagtgtcagcaccagcaccatgggcttggaccccctccctggacacaggcaggtgtcctagggctgggggtgcagcccgagggaatggagaccacactcatggctcaggtctgccggggccggcagggggttggggaagaagagggctcaggcccagcaggggtggaagcccctgccactgccactacccgctccagagctttaaggaaaatgaagtgagacccctccccttaggcctggggagccatagggctggcttctctgtgggtgcgtggacgtggggttgggagctgggaatctattttttgtattatgttttgagctactgtagttttggcgtggcactattgtaatggaaataaaatacttgtacggagggc

SEQ ID NO: 6220 - DNA, 3763 bp, Homo sapiens
  source 1..3763: mol_type = unassigned DNA; mol_type = unassigned DNA
gactctctgatgtttgggagcagatccgagcagctgagcagggtggctgttcctttcctggattagggctgaatctgtgggaaccagaccacccctgagacaggaggcagccctgatgcctctccagggcctgggcctgcagcggaaccccttcctccaagggaagcggggcccggggctcacgtcttccccgcccctcctgcctccttccctgcaggtgaacttccacagcccccggagtggccagaggtgctgggctgcacggacccaggtggagaagcggctggtggtgttggtggtacttctggcggcaggactggtggcctgcttggcagcactgggcatccagtaccagacaagatccccctctgtgtgcctgagcgaagcttgtgtctcagtgaccagctccatcttgagctccatggaccccacagtggacccctgccatgacttcttcagctacgcctgtgggggctggatcaaggccaacccagtccctgatggccactcacgctgggggaccttcagcaacctctgggaacacaaccaagcaatcatcaagcacctcctcgaaaactccacggccagcgtgagcgaggcagagagaaaggcgcaagtatactaccgtgcgtgcatgaacgagaccaggatcgaggagctcagggccaaacctctaatggagttgattgagaggctcgggggctggaacatcacaggtccctgggccaaggacaacttccaggacaccctgcaggtggtcaccgcccactaccgcacctcacccttcttctctgtctatgtcagtgccgattccaagaactccaacagcaacgtgatccaggtggaccagtctggcctgggcttgccctcgagagactattacctgaacaaaactgaaaacgagaaggtgctgaccggatatctgaactacatggtccagctggggaagctgctgggcggcggggacgaggaggccatccggccccagatgcagcagatcttggactttgagacggcactggccaacatcaccatcccacaggagaagcgccgtgatgaggagctcatctaccacaaagtgacggcagccgagctgcagaccttggcacccgccatcaactggttgccttttctcaacaccatcttctaccccgtggagatcaatgaatccgagcctattgtggtctatgacaaggaataccttgagcagatctccactctcatcaacaccaccgacagatgcctgctcaacaactacatgatctggaacctggtgcggaaaacaagctccttccttgaccagcgctttcaggacgccgatgagaagttcatggaagtcatgtacgggaccaagaagacctgtcttcctcgctggaagttttgcgtgagtgacacagaaaacaacctgggctttgcgttgggccccatgtttgtcaaagcaaccttcgccgaggacagcaagagcatagccaccgagatcatcctggagattaagaaggcatttgaggaaagcctgagcaccctgaagtggatggatgaggaaacccgaaaatcagccaaggaaaaggccgatgccatctacaacatgataggataccccaacttcatcatggatcccaaggagctggacaaagtgtttaatgactacactgcagttccagacctctactttgaaaatgccatgcggtttttcaacttctcatggagggtcactgccgatcagctcaggaaagcccccaacagagatcagtggagcatgaccccgcccatggtgaacgcctactactcgcccaccaagaatgagattgtgtttccggccgggatcctgcaggcaccattctacacacgctcctcacccaaggccttaaactttggtggcataggtgtcgtcgtgggccatgagctgactcatgcttttgatgatcaaggacgggagtatgacaaggacgggaacctccggccatggtggaagaactcatccgtggaggccttcaagcgtcagaccgagtgcatggtagagcagtacagcaactacagcgtgaacggggagccggtgaacgggcggcacaccctgggggagaacatcgccgacaacgggggtctcaaggcggcctatcgggcttaccagaactgggtgaagaagaacggggctgagcactcgctccccaccctgggcctcaccaataaccagctcttcttcctgggctttgcacaggtctggtgctccgtccgcacacctgagagctcccacgaaggcctcatcaccgatccccacagcccctctcgcttccgggtcatcggctccctctccaattccaaggagttctcagaacacttccgctgcccacctggctcacccatgaacccgcctcacaagtgcgaagtctggtaaggacgaagcggagagagccaagacggaggaggggaaggggctgaggacgagacccccatccagcctccagggcattgctcagcccgcttggccacccggggccctgcttcctcacactggcgggttttcagccggaaccgagcccatggtgttggctctcaacgtgacccgcagtctgatcccctgtgaagagccggacatcccaggcacacgtgtgcgccaccttcagcaggcattcgggtgctgggctggtggctcatcaggcctgggccccacactgacaagcgccagatacgccacaaataccactgtgtcaaatgctttcaagatatatttttggggaaactattttttaaacactgtggaatacactggaaatcttcagggaaaaacacatttaaacacttttttttttaaggaaagaattggtatatttattatgttctgtttttctaaataacctgtggacaagggaagccccactgatttactccctctcttccccactccctgtgaggctgggctgaggcacggatccctgggccacagagcaagtctccaaatcagacagctgcctcagcccctgggatgtgtgatttcagctcctgtcacctcatgcaagggcgtggagaccagtagaggtgtggaggccaggcagagagaggagcctgctctgcggggggcccagctcatgggcactgccccttcagctagcctgcctccgtcccctgagtccaacagtgggagccctagctgggaagttctgatccccaaagccacagcaggggactgatggctatagcagaatgaggtcgggtcaggaccctcaaacaccatctgggaacaccaagcaccctgaatcgagactgcaggagccctgcggggtgagactgtgtcagagatacactgctggccacaagtgtcccctctcagtcccaccttttcgggctgtcccatgtctatctcaggggcccgttacctctctgcagcagtcccccatcccagccacaccagggtctgtccggccaaccctcttccccagggaaaggagaaaagagaaaacaggctgggcccggtggctcactcctgtaatcccagcactttgggaggttgaggtgggcggatcacctgaggtcaggagtttgagaccagcctggccaacgtggtgaaaccccatctctactaaaaaaaattacaaaaattagccgggagtggtggtgggcacctgtaatcccagttactcgggaggctgaggcaagagaatctcttgagctcaggaggcagaggttgcagtgagctgagattgcgccactgcactccagcctgggtgacagagggagactccgtcccaaaaaaaagaaaagagaaaca

SEQ ID NO: 6221 - DNA, 653 bp, Homo sapiens
  source 1..653: mol_type = unassigned DNA; mol_type = unassigned DNA
gaagaggctggagcagaaggtgtaaatgtgagagccatcagtgcgtagaaggtattttaagccatagggctaaacgagtgcacatcaagaagagggctcccctaggctgagcccaggcccagatccccagaaactagtccttgccccaacacgggggagctccctgagacctccataccagtcccctccttcaccacctgccatgggaacccctgagctttggttttctctcctcccaggcttaccagaactgggtgaagaagaacggggctgagcactcgctccccaccctgggcctcaccaataaccagctcttcttcctgggctttgcacaggtctggtgctccgtccgcacacctgagagctcccacgaaggcctcatcaccgatccccacagcccctctcgcttccgggtcatcggctccctctccaattccaaggagttctcagaacacttccgctgcccacctggctcacccatgaacccgcctcacaagtgcgaagtctggtaaggacgaagcggagagagccaagacggaggaggggaaggggctgaggacgagacccccatccagcctccagggcattgctcagcccgcttggccacccggggccctgcttcctcacactggcgggttttcagccggaaccga

SEQ ID NO: 6222 - DNA, 2484 bp, Homo sapiens
  source 1..2484: mol_type = unassigned DNA; mol_type = unassigned DNA
aggtggtgcaacgcctggcccggcccatcccatcccggccacccgggcagcgggaccaggcgtctggggcacagcatgcggggcgtgtggccgcccccggtgtccgccctgctgtcggcgctggggatgtcgacgtacaagcgggccacgctggacgaggaggacctggtggactcgctctccgagggcgacgcataccccaacggcctgcaggtgaacttccacagcccccggagtggccagaggtgctgggctgcacggacccaggtggagaagcggctggtggtgttggtggtacttctggcggcaggactggtggcctgcttggcagcactgggcatccagtaccagacaagatccccctctgtgtgcctgagcgaagcttgtgtctcagtgaccagctccatcttgagctccatggaccccacagtggacccctgccatgacttcttcagctacgcctgtgggggctggatcaaggccaacccagtccctgatggccactcacgctgggggaccttcagcaacctctgggaacacaaccaagcaatcatcaagcacctcctcgaaaactccacggccagcgtgagcgaggcagagagaaaggcgcaagtatactaccgtgcgtgcatgaacgagaccaggatcgaggagctcagggccaaacctctaatggagttgattgagaggctcgggggctggaacatcacaggtccctgggccaaggacaacttccaggacaccctgcaggtggtcaccgcccactaccgcacctcacccttcttctctgtctatgtcagtgccgattccaagaactccaacagcaacgtgatccaggtggaccagtctggcctgggcttgccctcgagagactattacctgaacaaaactgaaaacgagaaggtgctgaccggatatctgaactacatggtccagctggggaagctgctgggcggcggggacgaggaggccatccggccccagatgcagcagatcttggactttgagacggcactggccaacatcaccatcccacaggagaagcgccgtgatgaggagctcatctaccacaaagtgacggcagccgagctgcagaccttggcacccgccatcaactggttgccttttctcaacaccatcttctaccccgtggagatcaatgaatccgagcctattgtggtctatgacaaggaataccttgagcagatctccactctcatcaacaccaccgacagatgcctgctcaacaactacatgatctggaacctggtgcggaaaacaagctccttccttgaccagcgctttcaggacgccgatgagaagttcatggaagtcatgtacgggaccaagaagacctgtcttcctcgctggaagttttgcgtgagtgacacagaaaacaacctgggctttgcgttgggccccatgtttgtcaaagcaaccttcgccgaggacagcaagagcatagccaccgagatcatcctggagattaagaaggcatttgaggaaagcctgagcaccctgaagtggatggatgaggaaacccgaaaatcagccaaggaaaaggccgatgccatctacaacatgataggataccccaacttcatcatggatcccaaggagctggacaaagtgtttaatgactacactgcagttccagacctctactttgaaaatgccatgcggtttttcaacttctcatggagggtcactgccgatcagctcaggaaagcccccaacagagatcagtggagcatgaccccgcccatggtgaacgcctactactcgcccaccaagaatgagattgtgtttccggccgggatcctgcaggcaccattctacacacgctcctcacccaaggccttaaactttggtggcataggtgtcgtcgtgggccatgagctgactcatgcttttgatgatcaaggacgggagtatgacaaggacgggaacctccggccatggtggaagaactcatccgtggaggccttcaagcgtcagaccgagtgcatggtagagcagtacagcaactacagcgtgaacggggagccggtgaacgggcggcacaccctgggggagaacatcgccgacaacgggggtctcaaggcggcctatcgggcttaccagaactgggtgaagaagaacggggctgagcactcgctccccaccctgggcctcaccaataaccagctcttcttcctgggctttgcacaggtctggtgctccgtccgcacacctgagagctcccacgaaggcctcatcaccgatccccacagcccctctcgcttccgggtcatcggctccctctccaattccaaggagttctcagaacacttccgctgcccacctggctcacccatgaacccgcctcacaagtgcgaagtctggtaaggacgaagcggagagagccaagacggaggaggggaaggggctgaggacgagacccccatccagcctccagggcattgctcagcccgcttggccacc

SEQ ID NO: 6223 - DNA, 2328 bp, Homo sapiens
  source 1..2328: mol_type = unassigned DNA; mol_type = unassigned DNA
catcccatcccggccacccgggcagcgggaccaggcgtctggggcacagcatgcggggcgtgtggccgcccccggtgtccgccctgctgtcggcgctggggatgtcgacgtacaagcgggccacgctggacgaggaggacctggtggactcgctctccgagggcgacgcataccccaacggcctgcaggtgaacttccacagcccccggagtggccagaggtgctgggctgcacggacccaggtggagaagcggctggtggtgttggtggtacttctggcggcaggactggtggcctgcttggcagcactgggcatccagtaccagacaagatccccctctgtgtgcctgagcgaagcttgtgtctcagtgaccagctccatcttgagctccatggaccccacagtggacccctgccatgacttcttcagctacgcctgtgggggctggatcaaggccaacccagtccctgatggccactcacgctgggggaccttcagcaacctctgggaacacaaccaagcaatcatcaagcacctcctcgaaaactccacggccagcgtgagcgaggcagagagaaaggcgcaagtatactaccgtgcgtgcatgaacgagaccaggatcgaggagctcagggccaaacctctaatggagttgattgagaggctcgggggctggaacatcacaggtccctgggccaaggacaacttccaggacaccctgcaggtggtcaccgcccactaccgcacctcacccttcttctctgtctatgtcagtgccgattccaagaactccaacagcaacgtgatccaggtggaccagtctggcctgggcttgccctcgagagactattacctgaacaaaactgaaaacgagaaggtgctgaccggatatctgaactacatggtccagctggggaagctgctgggcggcggggacgaggaggccatccggccccagatgcagcagatcttggactttgagacggcactggccaacatcaccatcccacaggagaagcgccgtgatgaggagctcatctaccacaaagtgacggcagccgagctgcagaccttggcacccgccatcaactggttgccttttctcaacaccatcttctaccccgtggagatcaatgaatccgagcctattgtggtctatgacaaggaataccttgagcagatctccactctcatcaacaccaccgacagatgcctgctcaacaactacatgatctggaacctggtgcggaaaacaagctccttccttgaccagcgctttcaggacgccgatgagaagttcatggaagtcatgtacgggaccaagaagacctgtcttcctcgctggaagttttgcgtgagtgacacagaaaacaacctgggctttgcgttgggccccatgtttgtcaaagcaaccttcgccgaggacagcaagagcatagccaccgagatcatcctggagattaagaaggcatttgaggaaagcctgagcaccctgaagtggatggatgaggaaacccgaaaatcagccaaggaaaaggccgatgccatctacaacatgataggataccccaacttcatcatggatcccaaggagctggacaaagtgtttaatgactacactgcagttccagacctctactttgaaaatgccatgcggtttttcaacttctcatggagggtcactgccgatcagctcaggaaagcccccaacagagatcagtggagcatgaccccgcccatggtgaacgcctactactcgcccaccaagaatgagattgtgtttccggccgggatcctgcaggcaccattctacacacgctcctcacccaaggccttaaactttggtggcataggtgtcgtcgtgggccatgagctgactcatgcttttgatgatcaaggacgggagtatgacaaggacgggaacctccggccatggtggaagaactcatccgtggaggccttcaagcgtcagaccgagtgcatggtagagcagtacagcaactacagcgtgaacggggagccggtgaacgggcggcacaccctgggggagaacatcgccgacaacgggggtctcaaggcggcctatcgggtctggtgctccgtccgcacacctgagagctcccacgaaggcctcatcaccgatccccacagcccctctcgcttccgggtcatcggctccctctccaattccaaggagttctcagaacacttccgctgcccacctggctcacccatgaacccgcctcacaagtgcgaagtctggtaaggacgaagcggagagagccaagacggaggaggggaaggggctgaggacgagacccccatcc

SEQ ID NO: 6224 - DNA, 2381 bp, Homo sapiens
  source 1..2381: mol_type = unassigned DNA; mol_type = unassigned DNA
ggggcgcggcggcggcggcgccagggtcggggccgcttccccattcgggcgcgagagccatggaggcgctgagggagtccgtgctgcatttggccttgcagatgtcgacgtacaagcgggccacgctggacgaggaggacctggtggactcgctctccgagggcgacgcataccccaacggcctgcaggtgaacttccacagcccccggagtggccagaggtgctgggctgcacggacccaggtggagaagcggctggtggtgttggtggtacttctggcggcaggactggtggcctgcttggcagcactgggcatccagtaccagacaagatccccctctgtgtgcctgagcgaagcttgtgtctcagtgaccagctccatcttgagctccatggaccccacagtggacccctgccatgacttcttcagctacgcctgtgggggctggatcaaggccaacccagtccctgatggccactcacgctgggggaccttcagcaacctctgggaacacaaccaagcaatcatcaagcacctcctcgaaaactccacggccagcgtgagcgaggcagagagaaaggcgcaagtatactaccgtgcgtgcatgaacgagaccaggatcgaggagctcagggccaaacctctaatggagttgattgagaggctcgggggctggaacatcacaggtccctgggccaaggacaacttccaggacaccctgcaggtggtcaccgcccactaccgcacctcacccttcttctctgtctatgtcagtgccgattccaagaactccaacagcaacgtgatccaggtggaccagtctggcctgggcttgccctcgagagactattacctgaacaaaactgaaaacgagaaggtgctgaccggatatctgaactacatggtccagctggggaagctgctgggcggcggggacgaggaggccatccggccccagatgcagcagatcttggactttgagacggcactggccaacatcaccatcccacaggagaagcgccgtgatgaggagctcatctaccacaaagtgacggcagccgagctgcagaccttggcacccgccatcaactggttgccttttctcaacaccatcttctaccccgtggagatcaatgaatccgagcctattgtggtctatgacaaggaataccttgagcagatctccactctcatcaacaccaccgacagatgcctgctcaacaactacatgatctggaacctggtgcggaaaacaagctccttccttgaccagcgctttcaggacgccgatgagaagttcatggaagtcatgtacgggaccaagaagacctgtcttcctcgctggaagttttgcgtgagtgacacagaaaacaacctgggctttgcgttgggccccatgtttgtcaaagcaaccttcgccgaggacagcaagagcatagccaccgagatcatcctggagattaagaaggcatttgaggaaagcctgagcaccctgaagtggatggatgaggaaacccgaaaatcagccaaggaaaaggccgatgccatctacaacatgataggataccccaacttcatcatggatcccaaggagctggacaaagtgtttaatgactacactgcagttccagacctctactttgaaaatgccatgcggtttttcaacttctcatggagggtcactgccgatcagctcaggaaagcccccaacagagatcagtggagcatgaccccgcccatggtgaacgcctactactcgcccaccaagaatgagattgtgtttccggccgggatcctgcaggcaccattctacacacgctcctcacccaaggccttaaactttggtggcataggtgtcgtcgtgggccatgagctgactcatgcttttgatgatcaaggacgggagtatgacaaggacgggaacctccggccatggtggaagaactcatccgtggaggccttcaagcgtcagaccgagtgcatggtagagcagtacagcaactacagcgtgaacggggagccggtgaacgggcggcacaccctgggggagaacatcgccgacaacgggggtctcaaggcggcctatcgggcttaccagaactgggtgaagaagaacggggctgagcactcgctccccaccctgggcctcaccaataaccagctcttcttcctgggctttgcacaggtctggtgctccgtccgcacacctgagagctcccacgaaggcctcatcaccgatccccacagcccctctcgcttccgggtcatcggctccctctccaattccaaggagttctcagaacacttccgctgcccacctggctcacccatgaacccgcctcacaagtgcgaagtctggtaaggacgaagcggagagagc

SEQ ID NO: 6225 - DNA, 2172 bp, Homo sapiens
  source 1..2172: mol_type = unassigned DNA; mol_type = unassigned DNA
atcccatcccggccacccgggcagcgggaccaggcgtctggggcacagcatgcggggcgtgtggccgcccccggtgtccgccctgctgtcggcgctggggatgtcgacgtacaagcgggccacgctggacgaggaggacctggtggactcgctctccgagggcgacgcataccccaacggcctgcaggtgaacttccacagcccccggagtggccagaggtgctgggctgcacggacccaggtggagaagcggctggtggtgttggtggtacttctggcggcaggactggtggcctgcttggcagcactgggcatccagtaccagacaagatccccctctgtgtgcctgagcgaagcttgtgtctcagtgaccagctccatcttgagctccatggaccccacagtggacccctgccatgacttcttcagctacgcctgtgggggctggatcaaggccaacccagtccctgatggccactcacgctgggggaccttcagcaacctctgggaacacaaccaagcaatcatcaagcacctcctcgaaaactccacggccagcgtgagcgaggcagagagaaaggcgcaagtatactaccgtgcgtgcatgaacgagaccaggatcgaggagctcagggccaaacctctaatggagttgattgagaggctcgggggctggaacatcacaggtccctgggccaaggacaacttccaggacaccctgcaggtggtcaccgcccactaccgcacctcacccttcttctctgtctatgtcagtgccgattccaagaactccaacagcaacgtgatccaggtggaccagtctggcctgggcttgccctcgagagactattacctgaacaaaactgaaaacgagaaggtgctgaccggatatctgaactacatggtccagctggggaagctgctgggcggcggggacgaggaggccatccggccccagatgcagcagatcttggactttgagacggcactggccaacatcaccatcccacaggagaagcgccgtgatgaggagctcatctaccacaaagtgacggcagccgagctgcagaccttggcacccgccatcaactggttgccttttctcaacaccatcttctaccccgtggagatcaatgaatccgagcctattgtggtctatgacaaggaataccttgagcagatctccactctcatcaacaccaccgacagatgcctgctcaacaactacatgatctggaacctggtgcggaaaacaagctccttccttgaccagcgctttcaggacgccgatgagaagttcatggaagtcatgtacgggaccaagaagacctgtcttcctcgctggaagttttgcgtgagtgacacagaaaacaacctgggctttgcgttgggccccatgtttgtcaaagcaaccttcgccgaggacagcaagagcatagccaccgagatcatcctggagattaagaaggcatttgaggaaagcctgagcaccctgaagtggatggatgaggaaacccgaaaatcagccaaggaaaaggccgatgccatctacaacatgataggataccccaacttcatcatggatcccaaggagctggacaaagtgtttaatgactacactgcagttccagacctctactttgaaaatgccatgcggtttttcaacttctcatggagggtcactgccgatcagctcaggaaagcccccaacagagatcagtgagttcccccaggccctgccggcaaggtgccagctccccacctgtgggcaagccttgggacgaactggccttcattgcaccctcactgtgcacccgatcagctatcacgagagccgtctgaagagtggatgcccttgttatcccacttttcagatgaagaaaccaagggcaaaagaagtatggcccagctaggagctgggatgggcttgagcctgcccagcctgttggcagggtgagcctggcctctggagcggagccgatctggcaccttgtctccgctccactgctttgggatttggagccttcatttcattttccgcagaataggatgggaggagctggttctggggtcctcatggcagtcaaatgtgaggacctctggggagcgccagaccccaaggaggccccagcaagagcagctttcccattgttcctcactaccacgaatggt

SEQ ID NO: 6226 - DNA, 486 bp, Homo sapiens
  source 1..486: mol_type = unassigned DNA; mol_type = unassigned DNA
cttccagaacaaagcatgggccccacatggtgctacctcccagcaagaaaggggttgggaaacaaagggctggggcccagcgagccccctgacttgtgttttccagacctgtcttcctcgctggaagttttgcgtgagtgacacagaaaacaacctgggctttgcgttgggccccatgtttgtcaaagcaaccttcgccgaggacagcaagagcatagccaccgagatcatcctggagattaagaaggcatttgaggaaagcctgagcaccctgaagtggatggatgaggaaacccgaaaatcagccaaggaaaaggccgatgccatctacaacatgataggataccccaacttcatcatggatcccaaggagctggacaaagtgtttaatgactacactgcagttccagacctctactttgaaaatgccatgcggtttttcaacttctcatggagggtcactgccgatcagctcaggaaagcccc

SEQ ID NO: 6227 - DNA, 576 bp, Homo sapiens
  source 1..576: mol_type = unassigned DNA; mol_type = unassigned DNA
acaagccctggaagacagggaccagcccaggtgctgaccggatatctgaactacatggtccagctggggaagctgctgggcggcggggacgaggaggccatccggccccagatgcagcagatcttggactttgagacggcactggccaacatcaccatcccacaggagaagcgccgtgatgaggagctcatctaccacaaagtgacggcagccgagctgcagaccttggcacccgccatcaactggttgccttttctcaacaccatcttctaccccgtggagatcaatgaatccgagcctattgtggtctatgacaaggaataccttgagcagatctccactctcatcaacaccaccgacagatgcctgctcaacaactacatgatctggaacctggtgcggaaaacaagctccttccttgaccagcgctttcaggacgccgatgagaagttcatggaagtcatgtacgggaccaagaagacctgtcttcctcgctggaagttttgcgtgagtgacacagaaaacaacctgggctttgcgttgggccccatgtttgtcaaagcaaccttcgccgag

SEQ ID NO: 6228 - DNA, 674 bp, Homo sapiens
  source 1..674: mol_type = unassigned DNA; mol_type = unassigned DNA
gtttagctagactgttaggctggagggatttttcctccctttcaggacctgaatggagctatttctccttgcatctctgccaacatctcccaggatccacctctgatccactggtgggctcgggcatcaacagctttgggttccaatcccagctgtccccattcagctgggtggtgagaagccagggtctcacctctctggacctcagtttcctcacttgtaaaaagaaaaataacaaggtgaacttccacagcccccggagtggccagaggtgctgggctgcacggacccaggtggagaagcggctggtggtgttggtggtacttctggcggcaggactggtggcctgcttggcagcactgggcatccagtaccagacaagatccccctctgtgtgcctgagcgaagcttgtgtctcagtgaccagctccatcttgagctccatggaccccacagtggacccctgccatgacttcttcagctacgcctgtgggggctggatcaaggccaacccagtccctgatggccactcacgctgggggaccttcagcaacctctgggaacacaaccaagcaatcatcaagcacctcctcgaaaactccacggccagcgtgagcgaggcagagagaaaggcgcaagtatactaccgtgcgtgcatgaacgagaccaggatc

SEQ ID NO: 6229 - DNA, 578 bp, Homo sapiens
  source 1..578: mol_type = unassigned DNA; mol_type = unassigned DNA
aggacatcacacaggagcacaggagcatgaggaggtgcaggggcatctgtgggtagccctggagtcaggaccagctgctttctggtctgctttgcagtttgtgcttggagaagatcagagtggacaactcagccccttaaacccagctgggaggtgacacctgaagtcgtaaggatggagcagatgtcgacgtacaagcgggccacgctggacgaggaggacctggtggactcgctctccgagggcgacgcataccccaacggcctgcaggtgaacttccacagcccccggagtggccagaggtgctgggctgcacggacccaggtggagaagcggctggtggtgttggtggtacttctggcggcaggactggtggcctgcttggcagcactgggcatccagtaccagacaagatccccctctgtgtgcctgagcgaagcttgtgtctcagtgaccagctccatcttgagctccatggaccccacagtggacccctgccatgacttcttcagctacgcctgtgggggctggatcaaggccaacccagtccctgatggccactcacgctgggggacctt

SEQ ID NO: 6230 - DNA, 580 bp, Homo sapiens
  source 1..580: mol_type = unassigned DNA; mol_type = unassigned DNA
agattcaacccagatttctcctccacggctgcacagtgccaggaagggaactgagaagaccaaagtggaggttctttaccttccccaacacactcggggccaggcgtggcacccacaactgcaaatgagacaattagggagaataagtgctggctgccctgtcagcccagagcctcagtctgcccagggcacccagactctgtgaggttcccacctgaagaagcagttccatcttccacaaggagcacaggaccaagagtccaggacccagatgtcgacgtacaagcgggccacgctggacgaggaggacctggtggactcgctctccgagggcgacgcataccccaacggcctgcaggtgaacttccacagcccccggagtggccagaggtgctgggctgcacggacccaggtggagaagcggctggtggtgttggtggtacttctggcggcaggactggtggcctgcttggcagcactgggcatccagtaccagacaagatccccctctgtgtgcctgagcgaagcttgtgtctcagtgaccagctccatcttgagctccatggaccccacagtggac

SEQ ID NO: 6231 - DNA, 507 bp, Homo sapiens
  source 1..507: mol_type = unassigned DNA; mol_type = unassigned DNA
tggtcccagccggatgtggggggctcggggtccccggttcgctttggggacggttgctgcggtctgttttgggttgttctgaagtccctggactcagcttggcttggagacccagggcagccgggctgggtcgggctcgcgggtggcggcgatttcgaggtgcctggatgcagctggacctgagcgtcccgggacactgagatgtcgacgtacaagcgggccacgctggacgaggaggacctggtggactcgctctccgagggcgacgcataccccaacggcctgcaggtgaacttccacagcccccggagtggccagaggtgctgggctgcacggacccaggtggagaagcggctggtggtgttggtggtacttctggcggcaggactggtggcctgcttggcagcactgggcatccagtaccagacaagatccccctctgtgtgcctgagcgaagcttgtgtctcagtgaccagctccatcttgagctccatggaccccacagtg

SEQ ID NO: 6232 - DNA, 1509 bp, Homo sapiens
  source 1..1509: mol_type = unassigned DNA; mol_type = unassigned DNA
gaaggcttcgcccgacgccggaactgcgagctctcagcgggagccgagacggtgcagggccggagaagcaccttcactcccagcctgcgccccgatgctgcgcgttctgtgcctcctgcgcccctggaggccccttcgggcccgcggctgcgcttccgacggggcggccgggggctcagagatccaagtgcgcgccctggcgggtccggaccaagggatcactgagattctgatgaacagaccttctgcccgcaatgccttggggaatgtcttcgtcagtgagctgctggaaactctggcccagctgcgggaggaccggcaagtgcgtgtcctgctcttcagaagtggagtgaagggcgtgttctgtgcaggtgcagacctgaaggagcgggaacagatgagtgaagcagaggtgggggtgtttgtccagcgactccggggcctgatgaatgacatcgcagccttccctgcacccaccattgcggctatggatgggtttgccttgggcggaggcctagagcttgccctggcctgtgacctccgagtggcagcttcctcggcagtcatgggactgattgagaccacgcgagggctcctcccgggggcaggagggactcagaggctgccccgttgtctgggggtggccctggcgaaggagctcatcttcacgggccgacgactgagtggaactgaggcccacgtactggggctggtgaatcacgctgtggcccagaacgaggagggggacgccgcctaccagcgggcacgagcactggcccaggagatcctgccccaggcccccattgccgtgcggctgggcaaagtagccattgaccgaggaacggaggtggacattgcatctgggatggccattgaagggatgtgctatgcccagaatattccaacccgggaccggctagagggcatggcagccttcagggagaagcggactcccaaatttgttggcaaatgacccccattttaaccttcagcatgggagatgcatgccctgaagagcaggatccagaaggaagatttgtggccagattgccttcatcatttcacctctccagacttccatttcttcacaaggatgatgatggaaataaaatgactggcgtgatgcctggaaccaaggtgctgatcctaccacctactgctaccttccttagcttcaccctggctagaaataatcacgagggttgggtttgctttggaaaatgcctgtctctctacttgaatgataaagaattaaattagatctctctgagtcttggtatcattggctctcagcccctgacctctctcagttatcaggcactcattagagatgtcagaagattttaagatacccctagtttcttcctgtgaacaacagaggtaataaataaactctgacatcggttgaacatgtgtcaggggtcagactgcagatcccagtctctgccagttacttgctgtataaccgtggacaaattgtttaaatgctctgggcctcagcttcctcac

SEQ ID NO: 6233 - DNA, 2645 bp, Homo sapiens
  source 1..2645: mol_type = unassigned DNA; mol_type = unassigned DNA
cttcgcccgacgccggaactgcgagctctcagcgggagccgagacggtgcagggccggagaagcaccttcactcccagcctgcgccccgatgctgcgcgttctgtgcctcctgcgcccctggaggccccttcgggcccgcggctgcgcttccgacggggcggccgggggctcagagatccaagtgcgcgccctggcgggtccggaccaagggatcactgagattctgatgaacagaccttctgcccgcaatgccttggggaatgtcttcgtcagtgagctgctggaaactctggcccagctgcgggaggaccggcaagtgcgtgtcctgctcttcagaagtggagtgaagggcgtgttctgtgcaggtgcagacctgaaggagcgggaacagatgagtgaagcagaggtgggggtgtttgtccagcgactccggggcctgatgaatgacatcgcagccttccctgcacccaccattgcggctatggatgggtttgccttgggcggaggcctagagcttgccctggcctgtgacctccgagtggcaggtactgggccaggactgggggcagggggtggggctagggagtcaggggtgagtgaaacagggtgagtctggacattctgcagtcagccactgttcttggcttccaaccaaaagcaaaactaaggcaaggcagagcacagagggtgctcaggcagaagctgcttcccctcctggtgcagccattagctgctgtagtatctgtgacctgtcagaacctgcttccttcattttgggaatatttgaccaacctcagagcaattgctgttacgagccaaggaggtcaaagagcaatgtccagtcttcccattctgtccaagtcagatttatcgaccatgtttcggaaaaaggtgagcctcagggatagtttgtcaatggctgagctaatcacaaaggtgcctgggcaggaatactggcaccagccaaatttgcattacttgttctgagcaattgagctttgtttgaagaatgggaggggataaagaagataactgatcattttctcaggtgactgacctggtgattaggagcagccttcttggatgcagttaggcaaagtctgaatgtcttcccttctccccccaccgctctctcctgccaccccaggagcaacatataaaaatgtgtagctccaggcatgaaagtagcttctgtctacacaatgcaggtcaaagagaaggaactgaccaggtgtccaggcaccaaaataccaggctggtctagccccaactctccttctcacatgcccacgttcacgcaactaactcacagggttttggggaagactaagacggagtgaatgtaaaacccactcccttctgcccacgttcacatggtccatgctgagggaattcagaaaaggagacagacccgggggggtgcgtcagtcaaggcaagtttctcgaaggaaggaagcagaactcaggaggacatggactggaacagtcagggcaatttcaggctgtgacaaagctggaacggacgactgtagcaggagcaggagtcactgacattctaggccaggccagggctaagccagagaacctattaatagtaatccacaaatagatatggggcacctcctaggaactctccttgttccaagcgtcgtacctcgtgtgatccttagcggctctctgaagcagacagaagagggccagccatctttcttccacctttgaggcttgggaagggtgagacttgctggtgacttacaactccatcaaaggggcatggtgaaataagggcctgggctcctgacttctgggctagggctcttccaaaggcagagtctggagaggcctggctgtggccagaccatggggcaagtggctagaggggcgagtagacagcagaggcagctgtggcccccgggattagcactgggggaccggatgggggagggaggcctcactttgttctatctgagcagcttcctcggcagtcatgggactgattgagaccacgcgagggctcctcccgggggcaggagggactcagaggctgccccgttgtctgggggtggccctggcgaaggagctcatcttcacgggccgacgactgagtggaactgaggcccacgtactggggctggtgaatcacgctgtggcccagaacgaggagggggacgccgcctaccagcgggcacgagcactggcccaggagatcctgccccaggcccccattgccgtgcggctgggcaaagtagccattgaccgaggaacggagaatattccaacccgggaccggctagagggcatggcagccttcagggagaagcggactcccaaatttgttggcaaatgacccccattttaaccttcagcatgggagatgcatgccctgaagagcaggatccagaaggaagatttgtggccagattgccttcatcatttcacctctccagacttccatttcttcacaaggatgatgatggaaataaaatgactggcgtgatgcctggaaccaaggtgctgatcctaccacctactgctaccttccttagcttcaccctggctagaaataatcacgagggttgggtttgctttggaaaatgcctgtctctctacttgaatgataaagaattaaattagatctctctga

SEQ ID NO: 6234 - DNA, 5817 bp, Homo sapiens
  source 1..5817: mol_type = unassigned DNA; mol_type = unassigned DNA
tcttttttttttttaagcttcatcatatataaatgaagagtctgatgctattgcctagacaatattaatgctgtcaagtttctattatacttggttagaaagtctccgaactaatacagaactctgggtcactcaatggagtggctgattgcagctttcatatctagacctgtagactatagggtttgtctttttgccttaactaaataacaatcacaaaataattcagatttccaaatatactaaaatattggtactatataattactgatattttcagtacttaaaagtagctttgtataccaaaacaccagtctaccaaaaacaagtactggcatgagtaatcccagagttgagaccttctgggtcaacctgaaaaacaaaacttcaacttccacctatgttactgggtgctcagaataaaggtttccggataggagagggccagggatggtgtagatggccaccatctagtggacaaaccactctgatagggtagcaaatggttccagagttttctcagcccagaaaaaaactgtcaatatccacagtttgcatcagatttccttcttaaatagtaaatacacattacactttgagaaatggattcagctgtgttttttttcttttctttttagagacaggatcttgctctgttgcccaggctggagtgcagtggcacgatcatagctcaccacagccttgaagccctgggcctgagcagtccttccacctcagcctctgaatagctgggactacaggtgcaagctactgacttggctagaatttggctgttttcactcacaaacatacgtacataccgtttttaactttaataaaaggttactttatttatttatttatttatttatttatttatttttgagacagggtctggctcttttgcccaggctggagtgcagtggcatgatcacagctcactggagcattgacctctcaggcccaagtgatccttccacctaagactactgagtagctgagactacaggtgcaagtcaccacgcccagctaattttttattttttgtagagatgggatctcatgatgatgcccaggctggtctcaaactctttgggcaagcaatcctcctgcctcagcctctcaaagccctgtgattacaggcgtgagccactgcacctggccaagattacttcctttattgggtagttacctaaataataacacatatggcaagcaaatctaaaagaacagaggagtaagaagggcataaggtaaaaatcaaaggcaagatgaccagctagtcctggtttacctgtgactaccccagttttaaaagtggaagtcccatatcccagtaacccttcagtcacaagcaaacccaaacagcccttcatttcccaatccctctctctccccagatcatcactattgtttccatactcttccagaaatttccattgcatatggaaggacgtgtattatgcacatatgcttacatatttaaataaattccttttaatggcttagaggacaagaaatatctttcgaggctaatctgtttctaacaaattttaaaaacaaaatttaaatatgcatagtaaggaattcaaacatggaagaatataaaacaaaaccttcattttatataacaaaacatttataaaccttcgtttataaaacaaaacaaaggtttggttttgttttataaaggcacaccagcattttgccagtttttgccaaattgctctcctgtggcatactcttttacttttctatcaataatgtatgtaaatactggtttccccagtctcggcagtagtaggcatattgatattttagtatttgctggtctgaggtgaaagggcacagtacctcactgttttgatttgcctttcaagcgtgtagcagctgctggacatccttcacgttcgtacttcttttccggtggaccttttacatactcttttgtaaatggtttaaaagttactttatactaacttttttgtaaatcaaggaaattcatctgtcataagcattgcaattctttttcccagttttttttttttttgagacttttcctgagaaagttttataaacacttcaaataatatgatataggaagtaattcctccttgcctggaagtggggctgagactggagtgctagggctggtgtggaaccaaggccagtgacaaagcagacactgttgcttctatgtggctgtattaaaatgcacccgcccctctgcactgccccacagaccaggatttcaacacagccctgtcgacttgaaagcccaagttcctaaccctgactttgtttcactctgctggggtaaaaccttaccgcagaggctggcatttgctgaaatgaggtcgaggaagtgggaaaggtggttgggagtccaatccaagtctcaccaatgattggataaacacagccaagtgcttcacctccctgcactgcaatctcacagctgtaaaatcacagctgggtcatcagtgatgacaccagcctagaagtgtgggtagcaccattagatgagtctgtgggggaggaaagcactttgtaaactagttatgttgtgcatgttggaaggatgggctgaataacaagaaacccaggtgttcagggatcagagtctggcttctttcatgatagaaaaagaacctcagctaacaggttataggactaacgctaaagaaactgtcagcagaatggctggaaccagacccagacatctgcctccctcctttaaaacaaagctgtgcacctcagacctgcaactatcagccttgatgccctcctcaaccaagactttttgcttttccctaggcccccattgccgtgcggctgggcaaagtagccattgaccgaggaacggaggtgagagggttttgggttgggacttgggtccactaaagttggtcgcggctgggacacagtgctttcagagctcagacagcacagctgggaaaaactcaggaagtggactcttctaacagacttgaactctgacctcgtgctctacgtcagtttacacatctgcaaattggccagacagtattattgtttacattctatcctcatctttctcccttggagagaggatgagattgaggttaagaaagggtaaatgatttgcccaaggtctcagaggaagtgagtagaaagaacccgggtctgtgtggctgccagtccatgctgcaagatttgtgctggcagtaatgtggcctcagggcagggcttggggtgatgccttgggtgtggctaatccatctgtccacctcaactctcccatctagttaatccatctgtccacctcaactctcccatctagtcactcatcacacactgaatccagaacaaagctgggaactgggatacagatggatgagttaaacatggtcactgcccccgggagggggcagatacagacacaaatcaaggataatggtaccacgctgacaccccagaaaggttagagctttgcggtccattatgatatccatgtgtggcttttaaattaaaagtaaaatgtggtcaggcgcggtggctcatgcctgtagtcccagcactttgggaggctgaggcgggcgatcacgaggtcaggagatcgagaccatcctggctaacacagtgaaaccccgtctctactaaaaatacaaaaaattagccaggcgtggtggcaggcacctgtagtcccagctactcaggaggctgaggcaggcgaatcgcttgaacccaggaggcggagtttgcagtgagccgagatcgcaccactgcactccagcctgggcgacagagcgagactccgtctcaaaataaataaataaataaataaaataaaatgttcagtttctccttcacgctaatcacagttcacgtgcttgacattcacatgcggctagtggctaccatactgggcagtgctcggttaaagactgttttctacagttggactgtgggaaggataaaaattccagaggaaaagtatgggcaaaggcacagaggaggataagcaagcagctcgtccagatgagagtgagggaagaagagagagtgcaagttcgaggcactaggctgtctgggttcaaagacctgctcttccacatactgttgtgaactttgacaaattatttcacctttctatgcctcaggtttctcagctgtagaatagggatactaacccttgctgtgaaaattaagttcacacacacatggtacttctcttagaatgaggctttcaagtgccagtcagtgggccctagaggctggagcaattgccagggcccaggtcataaaggttcagaaattaacgggtgacaggaagcgtggtgaggcagccggatgggaaggagaactcctcttctctggcaaaatgtctcagtctgtctcgtttctcccagcagttttgtcatagttacgaatggtgtttcttctctaggagggaaattccttctcatagctatctctgctcatatagatgtctgtaggcaatagggtgggctggcttccagtgtgggtgaagatggacaaggtcagaccaatccagggagcacgtctttcttgcaggtggacattgcatctgggatggccattgaagggatgtgctatgcccaggtatgtagcaaccagcccatgcctgcttgttaacataggctgggccaggctagagggactttgtatggtacatgaccaattttagaaggttcttctcaacacaaacagtctgaccgcatccatcgtccctcataagtcacctggagtggcttgaggagagccatagtgcttctctctgggacttttccctcaaccatctaatgtactggggttcatcctgcccacttaatgccgagaatcacagaacacaggtccttaagaggaagaaccacatcttttgcctctgtatcagatgccactgtaaagttcaggatggagttgggaggtcaagggcttggttgtagcctgcaggctgtgttcaatgtaggggctgtacacttgggactgacctattaaatctcttactcatgggtgagtaaaaaatgctaatctccacgttaacagatatccaaaatactcctaaggggtcctgggacttggagaaactagtgtgaacctggattcaaagccagatttcttactgcaaagaatttttttctctactgagcagcctcatgtcagaccactgcagacggcagctgagttctcaggaggcatgaaagcagtgtgcaagtggaggctaatgctgatggggcacagagaatacaaaggctggcctgtcttccccaggagacaaagcagccacggaggcttatacctttgcatgcctcaagatcagagtccagagacaatggaaacacttggaccctggccttgtcttgggctggacaagcttaagcaactctttttgggcctgtggccctgctcccccaaaactaatattttgtaccttgttgcagaatattccaacccgggaccggctagagggcatggcagccttcagggagaagcggactcccaaatttgttggcaaatgacccccattttaaccttcagcatgggagatgcatgccctgaagagcaggatccagaaggaagatttgtggccagattgccttcatcatttcacctctccagacttccatttcttcacaaggatgatgatggaaataaaatgactggcgtgatgcctggaaccaaggtgctgatcctaccacctactgctaccttccttagcttcaccctggctagaaataatcacgagggttgggtttgctttggaaaatgcctgtctctctacttgaatgataaagaattaaattagatctctct

SEQ ID NO: 6235 - DNA, 2356 bp, Homo sapiens
  source 1..2356: mol_type = unassigned DNA; mol_type = unassigned DNA
ctccatcctggtaggagggactcagaggctgccccgttgtctgggggtggccctggcgaaggagctcatcttcacgggccgacgactgagtggaactgaggcccacgtactggggctggtgaatcacgctgtggcccagaacgaggagggggacgccgcctaccagcgggcacgagcactggcccaggagatcctgccccaggcccccattgccgtgcggctgggcaaagtagccattgaccgaggaacggaggtgagagggttttgggttgggacttgggtccactaaagttggtcgcggctgggacacagtgctttcagagctcagacagcacagctgggaaaaactcaggaagtggactcttctaacagacttgaactctgacctcgtgctctacgtcagtttacacatctgcaaattggccagacagtattattgtttacattctatcctcatctttctcccttggagagaggatgagattgaggttaagaaagggtaaatgatttgcccaaggtctcagaggaagtgagtagaaagaacccgggtctgtgtggctgccagtccatgctgcaagatttgtgctggcagtaatgtggcctcagggcagggcttggggtgatgccttgggtgtggctaatccatctgtccacctcaactctcccatctagttaatccatctgtccacctcaactctcccatctagtcactcatcacacactgaatccagaacaaagctgggaactgggatacagatggatgagttaaacatggtcactgcccccgggagggggcagatacagacacaaatcaaggataatggtaccacgctgacaccccagaaaggttagagctttgcggtccattatgatatccatgtgtggcttttaaattaaaagtaaaatgtggtcaggcgcggtggctcatgcctgtagtcccagcactttgggaggctgaggcgggcgatcacgaggtcaggagatcgagaccatcctggctaacacagtgaaaccccgtctctactaaaaatacaaaaaattagccaggcgtggtggcaggcacctgtagtcccagctactcaggaggctgaggcaggcgaatcgcttgaacccaggaggcggagtttgcagtgagccgagatcgcaccactgcactccagcctgggcgacagagcgagactccgtctcaaaataaataaataaataaataaaataaaatgttcagtttctccttcacgctaatcacagttcacgtgcttgacattcacatgcggctagtggctaccatactgggcagtgctcggttaaagactgttttctacagttggactgtgggaaggataaaaattccagaggaaaagtatgggcaaaggcacagaggaggataagcaagcagctcgtccagatgagagtgagggaagaagagagagtgcaagttcgaggcactaggctgtctgggttcaaagacctgctcttccacatactgttgtgaactttgacaaattatttcacctttctatgcctcaggtttctcagctgtagaatagggatactaacccttgctgtgaaaattaagttcacacacacatggtacttctcttagaatgaggctttcaagtgccagtcagtgggccctagaggctggagcaattgccagggcccaggtcataaaggttcagaaattaacgggtgacaggaagcgtggtgaggcagccggatgggaaggagaactcctcttctctggcaaaatgtctcagtctgtctcgtttctcccagcagttttgtcatagttacgaatggtgtttcttctctaggagggaaattccttctcatagctatctctgctcatatagatgtctgtaggcaatagggtgggctggcttccagtgtgggtgaagatggacaaggtcagaccaatccagggagcacgtctttcttgcaggtggacattgcatctgggatggccattgaagggatgtgctatgcccagaatattccaacccgggaccggctagagggcatggcagccttcagggagaagcggactcccaaatttgttggcaaatgacccccattttaaccttcagcatgggagatgcatgccctgaagagcaggatccagaaggaagatttgtggccagattgccttcatcatttcacctctccagacttccatttcttcacaaggatgatgatggaaataaaatgactggcgtgatgcctggaaccaaggtgctgatcctaccacctactgctaccttccttagcttcaccctggctagaaataatcacgagggttgggtttgctttggaaaatgcctgtctctctacttgaatgataaagaattaaattaga

SEQ ID NO: 6236 - DNA, 555 bp, Homo sapiens
  source 1..555: mol_type = unassigned DNA; mol_type = unassigned DNA
agctgctggaaactctggcccagctgcgggaggaccggcaagtgcgtgtcctgctcttcagaagtggagtgaagggcgtgttctgtgcaggcccccattgccgtgcggctgggcaaagtagccattgaccgaggaacggaggtggacattgcatctgggatggccattgaagggatgtgctatgcccagaatattccaacccgggaccggctagagggcatggcagccttcagggagaagcggactcccaaatttgttggcaaatgacccccattttaaccttcagcatgggagatgcatgccctgaagagcaggatccagaaggaagatttgtggccagattgccttcatcatttcacctctccagacttccatttcttcacaaggatgatgatggaaataaaatgactggcgtgatgcctggaaccaaggtgctgatcctaccacctactgctaccttccttagcttcaccctggctagaaataatcacgagggttgggtttgctttggaaaatgcctgtctctctacttgaatgataaagaattaaattaga

SEQ ID NO: 6237 - DNA, 663 bp, Homo sapiens
  source 1..663: mol_type = unassigned DNA; mol_type = unassigned DNA
atctaactgggtgtcctctgtagctgctggaaactctggcccagctgcgggaggaccggcaagtgcgtgtcctgctcttcagaagtggagtgaagggcgtgttctgtgcaggtgcagacctgaaggagcgggaacagatgagtgaagcagaggtgggggtgtttgtccagcgactccggggcctgatgaatgacatcggcccccattgccgtgcggctgggcaaagtagccattgaccgaggaacggaggtggacattgcatctgggatggccattgaagggatgtgctatgcccagaatattccaacccgggaccggctagagggcatggcagccttcagggagaagcggactcccaaatttgttggcaaatgacccccattttaaccttcagcatgggagatgcatgccctgaagagcaggatccagaaggaagatttgtggccagattgccttcatcatttcacctctccagacttccatttcttcacaaggatgatgatggaaataaaatgactggcgtgatgcctggaaccaaggtgctgatcctaccacctactgctaccttccttagcttcaccctggctagaaataatcacgagggttgggtttgctttggaaaatgcctgtctctctacttgaatgataaagaattaaattaga

SEQ ID NO: 6238 - DNA, 1606 bp, Homo sapiens
  source 1..1606: mol_type = unassigned DNA; mol_type = unassigned DNA
gaagcaccttcactcccagcctgcgccccgatgctgcgcgttctgtgcctcctgcgcccctggaggccccttcgggcccgcggctgcgcttccgacggggcggccgggggctcagagatccaagtgcgcgccctggcgggtccggaccaaggtaaatgtgcagttccggggcggcgcatgacgcgactgggactaggccggaggcagcgggggaccggcaggctgtaggttccatgaggacaggccttgagtctgtcctggtctctggaatcacggtgtctagtagaggccagcacacagcaaatatataaatgtacaaatgagtgaatgaagagaatctgattggccttaaggaacttacgcacttaaaataattgggcagaagagaagcagtgaaggagtgcagaggcatcacctgaaagtttacaagtccttccactttctctctgaggcagaaagagcaagggtttttctctccattttatggttgggaaaattgaggcctgcctgagtgtgtgacttgtggcaagtcactctggtcatctagggcagaggctccccagatcccaggcctcctgcctccagtccccagcccgcagcccaggattaggcagagccagctgctttcccgtggctgccctgactccttacagggatcactgagattctgatgaacagaccttctgcccgcaatgccttggggaatgtcttcgtcagtgagctgctggaaactctggcccagctgcgggaggaccggcaagtgcgtgtcctgctcttcagaagtggagtgaagggcgtgttctgtgcaggtgcagacctgaaggagcgggaacagatgagtgaagcagaggtgggggtgtttgtccagcgactccggggcctgatgaatgacatcgcttcctcggcagtcatgggactgattgagaccacgcgagggctcctcccgggggcaggagggactcagaggctgccccgttgtctgggggtggccctggcgaaggagctcatcttcacgggccgacgactgagtggaactgaggcccacgtactggggctggtgaatcacgctgtggcccagaacgaggagggggacgccgcctaccagcgggcacgagcactggcccaggagatcctgccccaggcccccattgccgtgcggctgggcaaagtagccattgaccgaggaacggaggtggacattgcatctgggatggccattgaagggatgtgctatgcccagaatattccaacccgggaccggctagagggcatggcagccttcagggagaagcggactcccaaatttgttggcaaatgacccccattttaaccttcagcatgggagatgcatgccctgaagagcaggatccagaaggaagatttgtggccagattgccttcatcatttcacctctccagacttccatttcttcacaaggatgatgatggaaataaaatgactggcgtgatgcctggaaccaaggtgctgatcctaccacctactgctaccttccttagcttcaccctggctagaaataatcacgagggttgggtttgctttggaaaatgcctgtctctctacttgaatgataaagaattaaattaga

SEQ ID NO: 6239 - DNA, 1126 bp, Homo sapiens
  source 1..1126: mol_type = unassigned DNA; mol_type = unassigned DNA
agccgagacggtgcagggccggagaagcaccttcactcccagcctgcgccccgatgctgcgcgttctgtgcctcctgcgcccctggaggccccttcgggcccgcggctgcgcttccgacggggcggccgggggctcagagatccaagtgcgcgccctggcgggtccggaccaagggatcactgagattctgatgaacagaccttctgcccgcaatgccttggggaatgtcttcgtcagtgagctgctggaaactctggcccagctgcgggaggaccggcaagtgcgtgtcctgctcttcagaagtggagtgaagggcgtgttctgtgcaggtgcagacctgaaggagcgggaacagatgagtgaagcagaggtgggggtgtttgtccagcgactccggggcctgatgaatgacatcgcttcctcggcagtcatgggactgattgagaccacgcgagggctcctcccgggggcaggagggactcagaggctgccccgttgtctgggggtggccctggcgaaggagctcatcttcacgggccgacgactgagtggaactgaggcccacgtactggggctggtgaatcacgctgtggcccagaacgaggagggggacgccgcctaccagcgggcacgagcactggcccaggagatcctgccccaggcccccattgccgtgcggctgggcaaagtagccattgaccgaggaacggaggtggacattgcatctgggatggccattgaagggatgtgctatgcccagaatattccaacccgggaccggctagagggcatggcagccttcagggagaagcggactcccaaatttgttggcaaatgacccccattttaaccttcagcatgggagatgcatgccctgaagagcaggatccagaaggaagatttgtggccagattgccttcatcatttcacctctccagacttccatttcttcacaaggatgatgatggaaataaaatgactggcgtgatgcctggaaccaaggtgctgatcctaccacctactgctaccttccttagcttcaccctggctagaaataatcacgagggttgggtttgctttggaaaatgcctgtctctctacttgaatgataaagaattaaattag

SEQ ID NO: 6240 - DNA, 985 bp, Homo sapiens
  source 1..985: mol_type = unassigned DNA; mol_type = unassigned DNA
agcagaggcagctgtggcccccgggattagcactgggggaccggatgggggagggaggcctcactttgttctatctgagcagcttcctcggcagtcatgggactgattgagaccacgcgagggctcctcccgggggcaggtaatcgcaactacagcacccgcccaattccaccccatccagggtccttcgctgctttccttttttgccctctgttctgggctctgccctcccacctgaaccctgctcctctgagaagtcttggctgagtcccaggctgagccttctctgggttcccacttcccatgctgattcccaccctgctccctccatcctggtaggagggactcagaggctgccccgttgtctgggggtggccctggcgaaggagctcatcttcacgggccgacgactgagtggaactgaggcccacgtactggggctggtgaatcacgctgtggcccagaacgaggagggggacgccgcctaccagcgggcacgagcactggcccaggagatcctgccccaggcccccattgccgtgcggctgggcaaagtagccattgaccgaggaacggaggtggacattgcatctgggatggccattgaagggatgtgctatgcccagaatattccaacccgggaccggctagagggcatggcagccttcagggagaagcggactcccaaatttgttggcaaatgacccccattttaaccttcagcatgggagatgcatgccctgaagagcaggatccagaaggaagatttgtggccagattgccttcatcatttcacctctccagacttccatttcttcacaaggatgatgatggaaataaaatgactggcgtgatgcctggaaccaaggtgctgatcctaccacctactgctaccttccttagcttcaccctggctagaaataatcacgagggttgggtttgctttggaaaatgcctgtctctctacttgaatgataaagaatta

SEQ ID NO: 6241 - DNA, 1676 bp, Homo sapiens
  source 1..1676: mol_type = unassigned DNA; mol_type = unassigned DNA
aatttgcggacttgggcatgggactgagtcaacctgtccccatctctgatcctgtgcttaggttctgtacggattaaaacactgacgctgggaggttgacagagttacaccaaatcacacagaggagctgggcttcccccgacctcctccgctcaagtctccctgtccccgggaggtgcggaaggaggcaacagacgcttggcccataggtggagcaattggcgaaggcttcgcccgacgccggaactgcgagctctcagcgggagccgagacggtgcagggccggagaagcaccttcactcccagcctgcgccccgatgctgcgcgttctgtgcctcctgcgcccctggaggccccttcgggcccgcggctgcgcttccgacggggcggccgggggctcagagatccaagtgcgcgccctggcgggtccggaccaagacaaagctgaggaccctgggagataataataaggggtctttgaaggccaaaggattgggaaacactcctctgggcacctgctggatttcagccctgggaagacctgaaatgtccatcctgatttttcgtaggaggagaaacagcctagaagggatgataagggctgtaggttccatgaggacaggccttgagtctgtcctggtctctggaatcacggtgtctagtagaggccagcacacagcaaatatataaatgtacaaatgagtgaatgaagagaatctgattggccttaaggaacttacgcacttaaaataattgggcagaagagaagcagtgaaggagtgcagaggcatcacctgaaagggatcactgagattctgatgaacagaccttctgcccgcaatgccttggggaatgtcttcgtcagtgagctgctggaaactctggcccagctgcgggaggaccggcaagtgcgtgtcctgctcttcagaagtggagtgaagggcgtgttctgtgcaggtgcagacctgaaggagcgggaacagatgagtgaagcagaggtgggggtgtttgtccagcgactccggggcctgatgaatgacatcgcagccttccctgcacccaccattgcggctatggatgggtttgccttgggcggaggcctagagcttgccctggcctgtgacctccgagtggcagcttcctcggcagtcatgggactgattgagaccacgcgagggctcctcccgggggcaggagggactcagaggctgccccgttgtctgggggtggccctggcgaaggagctcatcttcacgggccgacgactgagtggaactgaggcccacgtactggggctggtgaatcacgctgtggcccagaacgaggagggggacgccgcctaccagcgggcacgagcactggcccaggagatcctgccccaggcccccattgccgtgcggctgggcaaagtagccattgaccgaggaacggaggtggacattgcatctgggatggccattgaagggatgtgctatgcccagaatattccaacccgggaccggctagagggcatggcagccttcagggagaagcggactcccaaatttgttggcaaatgacccccattttaaccttcagcatgggagatgcatgccctgaagagcaggatccagaaggaagatttgtggccagattgccttcatcatttcacctctccagacttccatttcttcaca

SEQ ID NO: 6242 - DNA, 766 bp, Homo sapiens
  source 1..766: mol_type = unassigned DNA; mol_type = unassigned DNA
gaagcagtgaaggagtgcagaggcatcacctgaaagggatcactgagattctgatgaacagaccttctgcccgcaatgccttggggaatgtcttcgtcagtgagctgctggaaactctggcccagctgcgggaggaccggcaagtgcgtgtcctgctcttcagaagtggagtgaagggcgtgttctgtgcaggtgcagacctgaaggagcgggaacagatgagtgaagcagaggtgggggtgtttgtccagcgactccggggcctgatgaatgacatcgcagccttccctgcacccaccattgcggctatggatgggtttgccttgggcggaggcctagagcttgccctggcctgtgacctccgagtggcagcttcctcggcagtcatgggactgattgagaccacgcgagggctcctcccgggggcaggagggactcagaggctgccccgttgtctgggggtggccctggcgaaggagctcatcttcacgggccgacgactgagtggaactgaggcccacgtactggggctggtgaatcacgctgtggcccagaacgaggagggggacgccgcctaccagcgggcacgagcactggcccaggagatcctgccccaggcccccattgccgtgcggctgggcaaagtagccattgaccgaggaacggaggtggacattgcatctgggatggccattgaagggatgtgctatgcccagaatattccaacccgggaccggctagagggcatggcagccttcagggagaa

SEQ ID NO: 6243 - DNA, 702 bp, Homo sapiens
  source 1..702: mol_type = unassigned DNA; mol_type = unassigned DNA
cggtgcagggccggagaagcaccttcactcccagcctgcgccccgatgctgcgcgttctgtgcctcctgcgcccctggaggccccttcgggcccgcggctgcgcttccgacggggcggccgggggctcagagatccaagtgcgcgccctggcgggtccggaccaagggatcactgagattctgatgaacagaccttctgcccgcaatgccttggggaatgtcttcgtcagtgagctgctggaaactctggcccagctgcgggaggaccggcaagtgcgtgtcctgctcttcagaagtggagtgaagggcgtgttctgtgcaggtgcagacctgaaggagcgggaacagatgagtgaagcagaggtgggggtgtttgtccagcgactccggggcctgatgaatgacatcgcttcctcggcagtcatgggactgattgagaccacgcgagggctcctcccgggggcaggagggactcagaggctgccccgttgtctgggggtggccctggcgaaggagctcatcttcacgggccgacgactgagtggaactgaggcccacgtactggggctggtgaatcacgctgtggcccagaacgaggagggggacgccgcctaccagcgggcacgagcactggcccaggagatcctgccccaggtggacattgcatctgggatggccattgaagggatgtgctatgcccag

SEQ ID NO: 6244 - DNA, 940 bp, Homo sapiens
  source 1..940: mol_type = unassigned DNA; mol_type = unassigned DNA
ctgtaatcccagctactccggaggctgaggcaggagaatcgcttgaacctgggaggcggaggttgtggtgagccaagtttacaagtccttccactttctctctgaggcagaaagagcaagggtttttctctccattttatggttgggaaaattgaggcctgcctgagtgtgtgacttgtggcaagtcactctggtcatctagggcagaggctccccagatcccaggcctcctgcctccagtccccagcccgcagcccaggattaggcagagccagctgctttcccgtggctgccctgactccttacagggatcactgagattctgatgaacagaccttctgcccgcaatgccttggggaatgtcttcgtcagtgagctgctggaaactctggcccagctgcgggaggaccggcaagtgcgtgtcctgctcttcagaagtggagtgaagggcgtgttctgtgcaggtgcagacctgaaggagcgggaacagatgagtgaagcagaggtgggggtgtttgtccagcgactccggggcctgatgaatgacatcgcagccttccctgcacccaccattgcggctatggatgggtttgccttgggcggaggcctagagcttgccctggcctgtgacctccgagtggcagcttcctcggcagtcatgggactgattgagaccacgcgagggctcctcccgggggcaggagggactcagaggctgccccgttgtctgggggtggccctggcgaaggagctcatcttcacgggccgacgactgagtggaactgaggcccacgtactggggctggtgaatcacgctgtggcccagaacgaggagggggacgccgcctaccagcgggcacgagcactggcccaggagatcctgccccaggcccccattgccgtgcggctgggcaaagtagccattgaccgaggaacggag

SEQ ID NO: 6245 - DNA, 474 bp, Homo sapiens
  source 1..474: mol_type = unassigned DNA; mol_type = unassigned DNA
aagaaaaaaggaaaaaaaagaggccgggcgcagtggctcattcctgtaatcccagcagtttgggaggctgaggcgggcggatcacgagcagccttccctgcacccaccattgcggctatggatgggtttgccttgggcggaggcctagagcttgccctggcctgtgacctccgagtggcagcttcctcggcagtcatgggactgattgagaccacgcgagggctcctcccgggggcaggagggactcagaggctgccccgttgtctgggggtggccctggcgaaggagctcatcttcacgggccgacgactgagtggaactgaggcccacgtactggggctggtgaatcacgctgtggcccagaacgaggagggggacgccgcctaccagcgggcacgagcactggcccaggagatcctgccccaggcccccattgccgtgcggctgggcaaagtagccattgaccgaggaacg

SEQ ID NO: 6246 - DNA, 471 bp, Homo sapiens
  source 1..471: mol_type = unassigned DNA; mol_type = unassigned DNA
acaggccttgagtctgtcctggtctctggaatcacggtgtctagtagaggccagcacacagcaaatatataaatgtacaaatgagtgaatgaagagaatctgattggccttaaggaacttacgcacttaaaataattgggcagaagagaagcagtgaaggagtgcagaggcatcacctgaaagggatcactgagattctgatgaacagaccttctgcccgcaatgccttggggaatgtcttcgtcagtgagctgctggaaactctggcccagctgcgggaggaccggcaagtgcgtgtcctgctcttcagaagtggagtgaagggcgtgttctgtgcaggtgcagacctgaaggagcgggaacagatgagtgaagcagaggtgggggtgtttgtccagcgactccggggcctgatgaatgacatcggagggactcagaggctgccccgttgtctgggggtggccctggcga

SEQ ID NO: 6247 - DNA, 631 bp, Homo sapiens
  source 1..631: mol_type = unassigned DNA; mol_type = unassigned DNA
cggcgcatgacgcgactgggactaggccggaggcagcgggggaccggcagggatcactgagattctgatgaacagaccttctgcccgcaatgccttggggaatgtcttcgtcagtgagctgctggaaactctggcccagctgcgggaggaccggcaagtgcgtgtcctgctcttcagaagtggagtgaagggcgtgttctgtgcaggtgcagacctgaaggagcgggaacagatgagtgaagcagaggtgggggtgtttgtccagcgactccggggcctgatgaatgacatcgggttcaagcctggccattccaaagcagttaagtttccccaagcatgctttcaagttttgacaattgctgttacctttgcctgagataccccttcttggttacttgaacttttacttgtccttcaagccctccagtacctcctcctccaggaagccttcccaacccaccctctgagctttttattggagcactgatgatcctgggtcaataatgcctgatacacatttgtcttccccatgagactgagccccatgggaacaaaggctatgtctgattcattctgtgttcccagttcccagcacccagcacagggcttggcacaaagaaagggaggcccc

SEQ ID NO: 6248 - DNA, 1335 bp, Homo sapiens
  source 1..1335: mol_type = unassigned DNA; mol_type = unassigned DNA
agcgttctctagcccttaggcagccgaatccctaatttgcggacttgggcatgggactgagtcaacctgtccccatctctgatcctgtgcttaggttctgtacggattaaaacactgacgctgggaggttgacagagttacaccaaatcacacagaggagctgggcttcccccgacctcctccgctcaagtctccctgtccccgggaggtgcggaaggaggcaacagacgcttggcccataggtggagcaattggcgaaggcttcgcccgacgccggaactgcgagctctcagcgggagccgagacggtgcagggccggagaagcaccttcactcccagcctgcgccccgatgctgcgcgttctgtgcctcctgcgcccctggaggccccttcgggcccgcggctgcgcttccgacggggcggccgggggctcagagatccaagtgcgcgccctggcgggtccggaccaaggctgtaggttccatgaggacaggccttgagtctgtcctggtctctggaatcacggtgtctagtagaggccagcacacagcaaatatataaatgtacaaatgagtgaatgaagagaatctgattggccttaaggaacttacgcacttaaaataattgggcagaagagaagcagtgaaggagtgcagaggcatcacctgaaagggatcactgagattctgatgaacagaccttctgcccgcaatgccttggggaatgtcttcgtcagtgagctgctggaaactctggcccagctgcgggaggaccggcaagtgcgtgtcctgctcttcagaagtggagtgaagggcgtgttctgtgcaggtgcagacctgaaggagcgggaacagatgagtgaagcagaggtgggggtgtttgtccagcgactccggggcctgatgaatgacatcggtgaggatctgggtgtggggtggaggagggggtttgggggtccctgccgatgacagtcccgctacccccaccagcatctaaggagagtcttctttctgtttggagttctgtgataagacagatgactcacccagggggatggaggaggatgaccgagggcagttctctcagagagggagttctggctcttcagcttttgtgtcccgccccaccctcagggttcaagcctggccattccaaagcagttaagtttccccaagcatgctttcaagttttgacaattgctgttacctttgcctgagataccccttcttggttacttgaacttttacttgtccttcaagccctccagtacctcctcctccaggaagccttcccaacccaccctctgagctttttattggagcactgatgatcctg

SEQ ID NO: 6249 - DNA, 456 bp, Homo sapiens
  source 1..456: mol_type = unassigned DNA; mol_type = unassigned DNA
gcagggccggagaagcaccttcactcccagcctgcgccccgatgctgcgcgttctgtgcctcctgcgcccctggaggccccttcgggcccgcggctgcgcttccgacggggcggccgggggctcagagatccaagtgcgcgccctggcgggtccggaccaagggatcactgagattctgatgaacagaccttctgcccgcaatgccttggggaatgtcttcgtcagtgagctgctggaaactctggcccagctgcgggaggaccggcaagtgcgtgtcctgctcttcagaagtggagtgaagggcgtgttctgtgcaggtgcagacctgaaggagcgggaacagatgagtgaagcagaggtgggggtgtttgtccagcgactccggggcctgatgaatgacatcgggttcaagcctggccattccaaagcagttaagtttccccaagcatgctttc

SEQ ID NO: 6250 - DNA, 370 bp, Homo sapiens
  source 1..370: mol_type = unassigned DNA; mol_type = unassigned DNA
ctccccagatcccaggcctcctgcctccagtccccagcccgcagcccaggattaggcagagccagctgctttcccgtggctgccctgactccttacagggatcactgagattctgatgaacagaccttctgcccgcaatgccttggggaatgtcttcgtcagtgagctgctggaaactctggcccagctgcgggaggaccggcaagtgcgtgtcctgctcttcagaagtggagtgaagggcgtgttctgtgcaggtgcagacctgaaggagcgggaacagatgagtgaagcagaggtgggggtgtttgtccagcgactccggggcctgatgaatgacatcggtgaggatctgggtgtggggtggaggagg

SEQ ID NO: 6251 - DNA, 804 bp, Homo sapiens
  source 1..804: mol_type = unassigned DNA; mol_type = unassigned DNA
gggactaggccggaggcagcgggggaccggcaggtgggccgctcagtgcgttgaaggattcgatccccagtccctccctcccagttctaggcgccccaaaccgctccaggcctgagaggctgtaggttccatgaggacaggccttgagtctgtcctggtctctggaatcacggtgtctagtagaggccagcacacagcaaatatataaatgtacaaatgagtgaatgaagagaatctgattggccttaaggaacttacgcacttaaaataattgggcagaagagaagcagtgaaggagtgcagaggcatcacctgaaagccgggcgtggtggcacatgctgtaatcccagctactccggaggctgaggcaggagaatcgcttgaacctgggaggcggaggttgtggtgagccaagtttacaagtccttccactttctctctgaggcagaaagagcaagggtttttctctccattttatggttgggaaaattgaggcctgcctgagtgtgtgacttgtggcaagtcactctggtcatctagggcagaggctccccagatcccaggcctcctgcctccagtccccagcccgcagcccaggattaggcagagccagctgctttcccgtggctgccctgactccttacagggatcactgagattctgatgaacagaccttctgcccgcaatgccttggggaatgtcttcgtcagtgagctgctggaaactctggcccagctgcgggaggaccggcaagtgcgtgtcctgctcttcagaagtggagtgaagggcgtgttctgtgcaggt

SEQ ID NO: 6252 - DNA, 548 bp, Homo sapiens
  source 1..548: mol_type = unassigned DNA; mol_type = unassigned DNA
atccaagtgcgcgccctggcgggtccggaccaaggtaaatgtgcagttccggggcggcgcatgacgcgactgggactaggccggaggcagcgggggaccggcaggtgggccgctcagtgcgttgaaggattcgatccccagtccctccctcccagttctaggcgccccaaaccgctccaggcctgagaggctgtaggttccatgaggacaggccttgagtctgtcctggtctctggaatcacggtgtctagtagaggccagcacacagcaaatatataaatgtacaaatgagtgaatgaagagaatctgattggccttaaggaacttacgcacttaaaataattgggcagaagagaagcagtgaaggagtgcagaggcatcacctgaaagggatcactgagattctgatgaacagaccttctgcccgcaatgccttggggaatgtcttcgtcagtgagctgctggaaactctggcccagctgcgggaggaccggcaagtgcgtgtcctgctcttcagaagtggagtgaagggcgtgttctgtgcaggt

SEQ ID NO: 6253 - DNA, 714 bp, Homo sapiens
  source 1..714: mol_type = unassigned DNA; mol_type = unassigned DNA
taccaagaagcttggctgttgctggtgaaagaatattacacaagtagggccaggattactgtcttgccaaacaggacagaacactaagcctctgtatttagttgctaatttattgtgacagaggagcatattgatctgtccccgtgattgtgcagttagcaaaacccaggctttgagaaaccctgtaggtcaaataccccaggctcctccacagataatctctgagggaaagacagagttgtggggagcatgtgggggttgtaccaggatttaaaagatacacggcaattttagaaattagcaagtctaaactatgatacctaaggatgcacacctgggtgataaaattataaagaaatggccgggtgtggtggctcacacctgtaatcccagcacttttagaggccgaggtgggtggatcacctgaggtcaggagttcgagacaagcctgaccaacatggagaaacctcatctctactaaaaatacaaaattagccgggcgtggtggcacatgctgtaatcccagctactccggaggctgaggcaggagaatcgcttgaacctgggaggcggaggttgtggtgagccaagggatcactgagattctgatgaacagaccttctgcccgcaatgccttggggaatgtcttcgtcagtgagctgctggaaactctggcccagctgcgggaggaccggcaagtgcgtgtcctgctct

SEQ ID NO: 6254 - DNA, 557 bp, Homo sapiens
  source 1..557: mol_type = unassigned DNA; mol_type = unassigned DNA
aaaaaaaaaaaaaaaacagcaaaactctcccccgccaaaaataaaaaaaaaaaagatgaatatggagggagttgtaaaattaaagaaggtacatgggtgcatgtgtgcttgtgtgtgtgtgtgtctgtctgtctaacaacagcagaagcaggcaagggctactgtggtagtcactgttgttcctctccccattttgcttcacagtttacaagtccttccactttctctctgaggcagaaagagcaagggtttttctctccattttatggttgggaaaattgaggcctgcctgagtgtgtgacttgtggcaagtcactctggtcatctagggcagaggctccccagatcccaggcctcctgcctccagtccccagcccgcagcccaggattaggcagagccagctgctttcccgtggctgccctgactccttacagggatcactgagattctgatgaacagaccttctgcccgcaatgccttggggaatgtcttcgtcagtgagctgctggaaactctggcccagctgcgggaggaccggcaagtgcgtgtcctgctc

SEQ ID NO: 6255 - DNA, 981 bp, Homo sapiens
  source 1..981: mol_type = unassigned DNA; mol_type = unassigned DNA
ataggtggagcaattggcgaaggcttcgcccgacgccggaactgcgagctctcagcgggagccgagacggtgcagggccggagaagcaccttcactcccagcctgcgccccgatgctgcgcgttctgtgcctcctgcgcccctggaggccccttcgggcccgcggctgcgcttccgacggggcggccgggggctcagagatccaagtgcgcgccctggcgggtccggaccaagctgggcactaaggttctccaccacaagctgacctttccatcctccctcctctacccatgggctcatttgaaggctgtaggttccatgaggacaggccttgagtctgtcctggtctctggaatcacggtgtctagtagaggccagcacacagcaaatatataaatgtacaaatgagtgaatgaagagaatctgattggccttaaggaacttacgcacttaaaataattgggcagaagagaagcagtgaaggagtgcagaggcatcacctgaaaggtaggaggaaggagaatgggggcctgccaaagccaaggcagatacgtgtcattatgcatctgtgtaaacccacagagtgtacaccaccaagagcgaaccccagtgtacactagggcccccgggtggcgacagtgcatcagtgtaggttcgtcagttgcaacacgtgcctctggtgggggatggggattgcggaaggggctgtgcctgtgtagggccagggagtataggtgaactgtattgaattgtattttccactccattttgctgtgaccctaaaactgctctaagaaaatcatctatttataaacaaataaatattcttctaagaagccaaagcagaaaacgatcaagtggagtgtgttaatgtcagcaaaggtttttgctgccacgaggttgaggcaaggagagaaacgtgtcccttggttagtgatgtggctatattcatcactttaatgagaataatgtctgctgagtg

SEQ ID NO: 6256 - DNA, 545 bp, Homo sapiens
  source 1..545: mol_type = unassigned DNA; mol_type = unassigned DNA
agacggtgcagggccggagaagcaccttcactcccagcctgcgccccgatgctgcgcgttctgtgcctcctgcgcccctggaggccccttcgggcccgcggctgcgcttccgacggggcggccgggggctcagagatccaagtgcgcgccctggcgggtccggaccaaggctgtaggttccatgaggacaggccttgagtctgtcctggtctctggaatcacggtgtctagtagaggccagcacacagcaaatatataaatgtacaaatgagtgaatgaagagaatctgattggccttaaggaacttacgcacttaaaataattgggcagaagagaagcagtgaaggagtgcagaggcatcacctgaaaggtaggaggaaggagaatgggggcctgccaaagccaaggcagatacgtgtcattatgcatctgtgtaaacccacagagtgtacaccaccaagagcgaaccccagtgtacactagggcccccgggtggcgacagtgcatcagtgtaggttcgtcagttgcaacacgtgcctctggtg

SEQ ID NO: 6257 - DNA, 1446 bp, Homo sapiens
  source 1..1446: mol_type = unassigned DNA; mol_type = unassigned DNA
aattggcgaaggcttcgcccgacgccggaactgcgagctctcagcgggagccgagacggtgcagggccggagaagcaccttcactcccagcctgcgccccgatgctgcgcgttctgtgcctcctgcgcccctggaggccccttcgggcccgcggctgcgcttccgacggggcggccgggggctcagagatccaagtgcgcgccctggcgggtccggaccaagggatcactgagattctgatgaacagaccttctgcccgcaatgccttggggaatgtcttcgtcagtgagctgctggaaactctggcccagctgcgggaggaccggcaagtgcgtgtcctgctcttcagaagtggagtgaagggcgtgttctgtgcaggtgcagacctgaaggagcgggaacagatgagtgaagcagaggtgggggtgtttgtccagcgactccggggcctgatgaatgacatcgcttcctcggcagtcatgggactgattgagaccacgcgagggctcctcccgggggcaggagggactcagaggctgccccgttgtctgggggtggccctggcgaaggagctcatcttcacgggccgacgactgagtggaactgaggcccacgtactggggctggtgaatcacgctgtggcccagaacgaggagggggacgccgcctaccagcgggcacgagcactggcccaggagatcctgccccaggtggacattgcatctgggatggccattgaagggatgtgctatgcccagaatattccaacccgggaccggctagagggcatggcagccttcagggagaagcggactcccaaatttgttggcaaatgacccccattttaaccttcagcatgggagatgcatgccctgaagagcaggatccagaaggaagatttgtggccagattgccttcatcatttcacctctccagacttccatttcttcacaaggatgatgatggaaataaaatgactggcgtgatgcctggaaccaaggtgctgatcctaccacctactgctaccttccttagcttcaccctggctagaaataatcacgagggttgggtttgctttggaaaatgcctgtctctctacttgaatgataaagaattaaattagatctctctgagtcttggtatcattggctctcagcccctgacctctctcagttatcaggcactcattagagatgtcagaagattttaagatacccctagtttcttcctgtgaacaacagaggtaataaataaactctgacatcggttgaacatgtgtcaggggtcagactgcagatcccagtctctgccagttacttgctgtataaccgtggacaaattgtttaaatgctctgggcctcagcttcctcacctacaaaacaaaacttgtgaagatttagcaaaataaaaacacttcatattcaataaatatgttttaattgttaa

SEQ ID NO: 6258 - DNA, 978 bp, Homo sapiens
  source 1..978: mol_type = unassigned DNA; mol_type = unassigned DNA
cggagagcctgggggttggggacgatgggctagttcctgctgcgtgcccagatgcgcgacctggcacggggcatgttcgtctttggctacgacaactacatggctcacgccttcccccaggacgagctcaaccccatccactgccgcggccgtgggcccgaccgcggggacccttcaaatctgaacatcaatgatgtactagggaactactcattgactcttgttgatgcattggatacacttgcaggtcctgggaagcctcctttctgctcacagaataataactgactccaagcagccctttggtgacatgacaattaaggactatgataatgagttgttatacatggcccatgacctggcggtgcggctcctccctgcttttgaaaacaccaagacagggattccatatcctcgggtgaatctaaagacaggagttcctcctgacaccaataatgagacatgcacagcgggagccggttccctcctggtggaatttgggattctgagtcgactcctgggggactccacatttgagtgggtggccagacgagcagtgaaagccctttggaacctccggagcaatgatacaggattactaggcaatgtcgtgaacattcagacgggccactgggttggaaagcagagtggcctgggtgccgggctggactccttctatgaatacctcttgaaatcttacattctctttggagaaaaagaagacctagaaatgtttaatgctgcatatcagagtattcagaactacttaagaagagggcgggaagcctgcaatgaaggagaaggagaccctccactctatgtcaacgtgaacatgttcagtgggcagctgatgaacacctggattgactctctgcaggcctttttccctggactgcaggtgctgataggagatgtggaagatgccatctgccttcatgccttctactatgccatatggaaacgatatggtgccctccc

SEQ ID NO: 6259 - DNA, 6146 bp, Homo sapiens
  source 1..6146: mol_type = unassigned DNA; mol_type = unassigned DNA
ggctagttcctggtgcgtcacgggggagttccttaaaggggaagcgagccgggctacggggcgagcgcggggtgcggtggtcggcggggaggcccccgcgctttaaaataatgcccgcggcgcccgcgcgaccatgcaatggcgagcgctcgtcctggggctggtgctcctccggcttggcctccatggagtattgtggctcgtcttcgggctggggcccagcatgggcttctaccagcgctttccgctcagcttcggcttccagcgtctgaggagccccgacggccccgcgtcgcccacctcggggcccgtgggccggcctgggggggtatccgggccgtcgtggctgcagccgccggggaccggggcagcgcagagcccgcgcaaggctccgcggcgtcctgggccggggatgtgcggcccagccaactggggctacgtgctgggcggccggggccgcggcccggacgagtacgagaagcgctacagcggcgccttccctccgcagctgcgtgcccagatgcgcgacctggcacggggcatgttcgtctttggctacgacaactacatggctcacgccttcccccaggacgagctcaaccccatccactgccgcggccgtgggcccgaccgcggggacccttcaaatctgaacatcaatgatgtactagggaactactcattgactcttgttgatgcattggatacacttgcaataatgggaaattcatccgagttccagaaagccgtcaagttagtgatcaacacagtttcatttgacaaagattccaccgtccaagtctttgaggccacgataagggtcctgggaagcctcctttctgctcacagaataataactgactccaagcagccctttggtgacatgacaattaaggactatgataatgagttgttatacatggcccatgacctggcggtgcggctcctccctgcttttgaaaacaccaagacagggattccatatcctcgggtgaatctaaagacaggagttcctcctgacaccaataatgagacatgcacagcgggagccggttccctcctggtggaatttgggattctgagtcgactcctgggggactccacatttgagtgggtggccagacgagcagtgaaagccctttggaacctccggagcaatgatacaggattactaggcaatgtcgtgaacattcagacgggccactgggttggaaagcagagtggcctgggtgccgggctggactccttctatgaatacctcttgaaatcttacattctctttggagaaaaagaagacctagaaatgtttaatgctgcatatcagagtattcagaactacttaagaagagggcgggaagcctgcaatgaaggagaaggagaccctccactctatgtcaacgtgaacatgttcagtgggcagctgatgaacacctggattgactctctgcaggcctttttccctggactgcaggtgctgataggagatgtggaagatgccatctgccttcatgccttctactatgccatatggaaacgatatggtgccctccctgagagatataactggcagctgcaggcccctgacgttctcttctacccactgagaccagagttagtggaatccacatatctcctctaccaggcaaccaagaatcccttctacctccatgtaggaatggatattctgcagagtctggaaaagtacacaaaagtcaagtgtgggtacgccacgctgcatcacgtcattgacaagtccacagaagaccggatggagagcttctttctcagtgagacctgtaaatatttgtatctgctgtttgatgaagacaatccagtacacaagtctggaaccagatacatgttcacaacagagggacacattgtatctgtggatgagcatcttcgggaattgccatggaaggaattcttctctgaagagggagggcaggaccaagggggaaagtctgtgcacaggccgaaacctcatgagttaaaagtcatcaactccagctccaactgcaatcgtgtacctgatgagaggaggtactccctgcccttaaagagcatctacatgcgacagattgaccagatggttggtttgatttgatctgctctctgtgaggcctcatcttgaaccagaccttaacgaccaaacccagaccatgccaaagtccagtctgaaatgaaaggggacagaagtcttgctgtccatggtggtgtaggaatttctgtgcaacacctcaccacgtctggttaatccttgcacacttcagtgtttctctcctgttcaataaaatgccctgttaaggatataatttgaagtgagaagatacatggaaattgccctcttatgacatgttgatgttataagcacaatagatggggcatctttggattgatgttcacagctttatacttcagaacctaagtctcttcactttgctggcacctgctatactggagtattgctatgtctttaaaaaattttttttattatattttatttttttgagacagggtcttgatatttttttgggacagggttacctgggctcaagtgatccttctgcctcagcctcccgagtagctgggattacaggtgagcaccactgtacctggctagctacttctttgttagaggattgagaatgaaatttctgcaaaagggcccatggttcatttggtatccctatttaattgcattgaaaatgtcatcctttctgttgttagataattggggtcttcccctgatatccaaccgtgattttggatcacatgggagaaaaagtcatccagtttttcatgtttgcctcaagtaatctttacagtgttacaaattatttgcttaagaagaatggtcttaaccagaattcttaacagatagtctcttaggttattatgttatggtctaagaggttaactgacatcttttgggtggtattttgcattttgaatatgaacttacctgaggaactcccatagttccagaatcaggtgccttttagggagagaacaatacctaagattgtctgagcttccatctttctcatatttcctaagcaaggattctcacttctgaccatatttgggttagagttctgttttgtttctgttttctgtgtctagtgccaattagctaaatcagggagaaagaaatgatcacatgacttttagcatccttgagccatttctctgtgtaatacaggctttagattagtgccttatattggttttggtttggggcactggatgtcgcagctactgctatggtttcaggaggcctgtttagccacatggtgagaccgtggtgaaagggggatggaaattgcttggccagtctttgcctttcatcctgtaaaagtaagcatgtagaaggaggaagttgtgctaaaatgcctttgtttttttgttattattttcttagccagaacatctctctttgaactcacactgatacacacctgctactcttacacagtgcagcagggttgactcttagtctggcttccatgaagcgtcatgggtggaaacgcattctagtaaaaaaggtaggaaatccctaaaacttccagcctcacatagcacggttctcacctgtcactgttttcccacctctaaggatttcatgtacatcttttcaaagctagaaataagcactgtctaagtttatgttgcatttttagtcaaaagggagaaatcttattccttcttgaaaattttaagtgttatggttttatatagttcagttctttgagatttttgaaaagagtattttcagtaataaacgtgccatctctatctcttaaacatttattacaacaattgttttaaaatagaaaaaataaaatgcttctattttaccttttttcatttcagaagcattattctgtttattaacagtgtcccatctactgaatagaaaactttgagaataatatatatatatattttaaatgttttcactgactcattgaaaatgttaattacacacacatgcatgcatgcacacacgagcatacttgtacctttgtctctgggcaaacaggtgggactgttagtgacccatttgggaaaatagagcatctcagagaaggaggtgagttcttcctgcctgtgatttctcttggcgctcccctcctctcccgctctggcttctgtggcggcagtggtgggtaagcactccagtgttctcttaatgaggcactttgcctgtcactcgagcaagcctgggtgttccttcctcctcatgctcctggaatagggaatagggatctcatgcttgcaaactacacaatgctgcaggtgcttcccaggggccacaggctgtcaggaaacgtgttttatgttaagtcacaaacccacttgacttctgggtactggaattaataccagtgggtgagactgagggtgagtgagttagtacatattaatcctggttgttgagcttccagactaccccgtccaaagtttgatgctatgtagtcagtggtttgtggggctggatgccagaaggttctttgagccagtttcaaaggttacttgttttttttttttttttttaaagtcagaatgttaacagctgtgatatatcctgcagggcttttgcagtttcttctgttctgtgttctgaaatactgggtagagaatggctgaggaggagattaccagagaagttgctttgctcagtgctttgccccaggattgcctcaaatctgagtggacttcatcctttgcggcggctctgagcctggcccatcttcctattcccacgtgtagctagtgtctagtgtcagctttgctcagtgtggtggaaacattttgcagaactgttgtagaaagctgccttatagttggcttgacaaagcataattctctcataacaaactttcaaatcattacagtagcttagctactttagttgatgtgaccgaggaatcccttctagaatcataggtggcaagggagggtttgctagctctccatttgcactggccattgtgaaaaaccagcttctgtattcaaatctttccttcatttttttaaattttttttttggcagcgcttgtgctggaacttactcattgtaactgaatcctcagggcttttcttgttttagatcatggactgtgcacgtgacacttaaataattttctatgtatttaaagaaaaatgcaccaggatggtgtctgtgcacgtgactattagaggagcgtctgtagaagtacctggtttggtcagtgcagttgtgcaatctgagggccttgtttcctcctcccctttccccttctccccaccaaaggaaaatatccctcttaatgatttcgtagttcagtttactgaatgattaccacctgtaattcctctttggattgtgtagactcaacatgagacattcctttctgctttctggagggcaccaggggcctttctctttgataaattttttttgtctgttgacaaaaacaaaaatcttttttcaaatgtagtgctggtgaaaaggtagggctgagtgattaccttagccacagggtggctgagcaggaactttagaagaaaatcctgagctttcctgtccattcccagcatccagctcctattctagtgcctcttccctgcagggcagggaccccttgggaaatcgaggaggtgggacgggctgggccctgtgtcccaggtttcacagggctcagggttatgctcccgcttgaatctggacgtgaatctggtaaaaatatcaagtacctgtggaactccctgattctataccctcttccttctttctgcaaggcagaggaataatatttttaaaggttattttgttttagttttaaatagcaaaacacaagctgcatttttatttattttgcataagaaaggtaaatctttttacaaaaaaaagtatagagttggaaactctgggaaaacttacggaaatacacaaatgcttctctgtaatgtgcaatatgctttgcaactgtagatgatattttatgtttaatctgtaaataagaaatgtatttaaattaaaagggatctttttgtaaaaggaccaaatgttcttttataaatgtaataaggaatatcttgctctttaaaatttattaggatttttatgagtaatttttattaaaagatttctttttttg

SEQ ID NO: 6260 - DNA, 1956 bp, Homo sapiens
  source 1..1956: mol_type = unassigned DNA; mol_type = unassigned DNA
gccgggctacggggcgagcgcggggtgcggtggtcggcggggaggcccccgcgctttaaaataatgcccgcggcgcccgcgcgaccatgcaatggcgagcgctcgtcctggggctggtgctcctccggcttggcctccatggagtattgtggctcgtcttcgggctggggcccagcatgggcttctaccagcgctttccgctcagcttcggcttccagcgtctgaggagccccgacggccccgcgtcgcccacctcggggcccgtgggccggcctgggggggtatccgggccgtcgtggctgcagccgccggggaccggggcagcgcagagcccgcgcaaggctccgcggcgtcctgggccggggatgtgcggcccagccaactggggctacgtgctgggcggccggggccgcggcccggacgagtacgagaagcgctacagcggcgccttccctccgcagctgcgtgcccagatgcgcgacctggcacggggcatgttcgtctttggctacgacaactacatggctcacgccttcccccaggacgagctcaaccccatccactgccgcggccgtgggcccgaccgcggggacccttcaaatctgaacatcaatgatgtactagggaactactcattgactcttgttgatgcattggatacacttgcaataatgggaaattcatccgagttccagaaagccgtcaagttagtgatcaacacagtttcatttgacaaagattccaccgtccaagtctttgaggccacgataagggtcctgggaagcctcctttctgctcacagaataataactgactccaagcagccctttggtgacatgacaattaaggactatgataatgagttgttatacatggcccatgacctggcggtgcggctcctccctgcttttgaaaacaccaagacagggattccatatcctcgggtgaatctaaagacaggagttcctcctgacaccaataatgagacatgcacagcgggagccggttccctcctggtggaatttgggattctgagtcgactcctgggggactccacatttgagtgggtggccagacgagcagtgaaagccctttggaacctccggagcaatgatacaggattactaggcaatgtcgtgaacattcagacgggccactgggttggaaagcagagtggcctgggtgccgggctggactccttctatgaatacctcttgaaatcttacattctctttggagaaaaagaagacctagaaatgtttaatgctgcatatcagagtattcagaactacttaagaagagggcgggaagcctgcaatgaaggagaaggagaccctccactctatgtcaacgtgaacatgttcagtgggcagctgatgaacacctggattgactctctgcaggcctttttccctggactgcaggtgctgataggagatgtggaagatgccatctgccttcatgccttctactatgccatatggaaacgatatggtgccctccctgagagatataactggcagctgcaggcccctgacgttctcttctacccactgagaccagagttagtggaatccacatatctcctctaccaggcaaccaagaatcccttctacctccatgtaggaatggatattctgcagagtctggaaaagtacacaaaagtcaagtgtgggtacgccacgctgcatcacgtcattgacaagtccacagaagaccggatggagagcttctttctcagtgagacctgtaaatatttgtatctggtatgtgtgttgcaagatgaacccaggaatatttagtattgcttagagcaagcattcgcatagtcttccatctgacaggtacttactggctaaagctatgtgctggacattgtgcattcccaggatgcaaacgctgtcagaaccaaaggatattactatcttctttcatggtttccaaccttgttgaaaa

SEQ ID NO: 6261 - DNA, 730 bp, Homo sapiens
  source 1..730: mol_type = unassigned DNA; mol_type = unassigned DNA
gcccccgcgctttaaaataatgcccgcggcgcccgcgcgaccatgcaatggcgagcgctcgtcctggggctggtgctcctccggcttggcctccatggagtattgtggctcgtcttcgggctggggcccagcatgggcttctaccagcgctttccgctcagcttcggcttccagcgtctgaggagccccgacggccccgcgtcgcccacctcggggcccgtgggccggcctgggggggtatccgggccgtcgtggctgcagccgccggggaccggggcagcgcagagcccgcgcaaggctccgcggcgtcctgggccggggatgtgcggcccagccaactggggctacgtgctgggcggccggggccgcggcccggacgagtacgagaagcgctacagcggcgccttccctccgcagctgcgtgcccagatgcgcgacctggcacggggcatgttcgtctttggctacgacaactacatggctcacgccttcccccaggacgagctcaaccccatccactgccgcggccgtgggcccgaccgcggggaccctttgagagcatgatttctaccgaagcaaggggacatcccaagctaaattcaaaggactgagccttttcaaaattctaggaaaccgatgagtttttcttgcttaaccatagcgtttatacgtataagtgtattttctatctcaatttttttgagaaaaaatattaaattttgaaaaaaaa

SEQ ID NO: 6262 - DNA, 585 bp, Homo sapiens
  source 1..585: mol_type = unassigned DNA; mol_type = unassigned DNA
atgcaatggcgagcgctcgtcctggggctggtgctcctccggcttggcctccatggagtattgtggctcgtcttcgggctggggcccagcatgggcttctaccagcgctttccgctcagcttcggcttccagcgtctgaggagccccgacggccccgcgtcgcccacctcggggcccgtgggccggcctgggggggtatccgggccgtcgtggctgcagccgccggggaccggggcagcgcagagcccgcgcaaggctccgcggcgtcctgggccggggatgtgcggcccagccaactggggctacgtgctgggcggccggggccgcggcccggacgagtacgagaagcgctacagcggcgccttccctccgcagctgcgtgcccagatgcgcgacctggcacggggcatgttcgtctttggctacgacaactacatggctcacgccttcccccaggacgagctcaaccccatccactgccgcggccgtgggcccgaccgcggggacccttcaaatctgaacatcaatgatgtactagggaactactcattgactcttgttgatgcattggatacacttgcagta

SEQ ID NO: 6263 - DNA, 1363 bp, Homo sapiens
  source 1..1363: mol_type = unassigned DNA; mol_type = unassigned DNA
acgcgcttccttccgccctccgcgccggggtgcagccctctgtcctccggggcccccgagggcgccagggccgttagggtcccgggcagcgctcccgcgccctgtcccgtttcaaatctgaacatcaatgatgtactagggaactactcattgactcttgttgatgcattggatacacttgcaataatgggaaattcatccgagttccagaaagccgtcaagttagtgatcaacacagtttcatttgacaaagattccaccgtccaagtctttgaggccacgataagggtcctgggaagcctcctttctgctcacagaataataactgactccaagcagccctttggtgacatgacaattaaggactatgataatgagttgttatacatggcccatgacctggcggtgcggctcctccctgcttttgaaaacaccaagacagggattccatatcctcgggtgaatctaaagacaggagttcctcctgacaccaataatgagacatgcacagcgggagccggttccctcctggtggaatttgggattctgagtcgactcctgggggactccacatttgagtgggtggccagacgagcagtgaaagccctttggaacctccggagcaatgatacaggattactaggcaatgtcgtgaacattcagacgggccactgggttggaaagcagagtggcctgggtgccgggctggactccttctatgaatacctcttgaaatcttacattctctttggagaaaaagaagacctagaaatgtttaatgctgcatatcagagtattcagaactacttaagaagagggcgggaagcctgcaatgaaggagaaggagaccctccactctatgtcaacgtgaacatgttcagtgggcagctgatgaacacctggattgactctctgcaggcctttttccctggactgcaggtgctgataggagatgtggaagatgccatctgccttcatgccttctactatgccatatggaaacgatatggtgccctccctgagagatataactggcagctgcaggcccctgacgttctcttctacccactgagaccagagttagtggaatccacatatctcctctaccaggcaaccaagaatcccttctacctccatgtaggaatggatattctgcagagtctggaaaagtacacaaaagtcaagtgtgggtacgccacgctgcatcacgtcattgacaagtccacagaagaccggatggagagcttctttctcagtgagacctgtaaatatttgtatctggtatgtgtgttgcaagatgaacccaggaatatttagtattgcttagagcaagcattcgcatagtcttccatctgacaggtac

SEQ ID NO: 6264 - DNA, 307 bp, Homo sapiens
  source 1..307: mol_type = unassigned DNA; mol_type = unassigned DNA
aaataagagttgctggcaattatagtttctgatgggtgtttacttttattgtcttctcttttgaaataaagtctttttgttgaattttaattttctttttcagttcaaatctgaacatcaatgatgtactagggaactactcattgactcttgttgatgcattggatacacttgcaataatgggaaattcatccgagttccagaaagccgtcaagttagtgatcaacacagtttcatttgacaaagattccaccgtccaagtctttgaggccacgataagggtcctgggaagcctcctttctgctca

SEQ ID NO: 6265 - DNA, 4727 bp, Homo sapiens
  source 1..4727: mol_type = unassigned DNA; mol_type = unassigned DNA
agaagccccgcagccgccgcgcggagaacagcgacagccgagcgcccggtccgcctgtctgccggtgggtctgcctgcccgcgcagcagacccggggcggccgcgggagcccgcgccccgcccgccgcgcctctgccgggacccacccgcagcggagggctgagcccgccggcggctccccggagctcacccacctccgcgcgccggagcgcaggcaaaaggggaggaaaggctcctctctttagtcaccactctcgccctctccaagaatttgtttaacaaagcgctgaggaaagagaacgtcttcttgaattctttagtaggggcggagtctgctgctgccctgcgctgccacctcggctacactgccctccgcgacgacccctgaccagccggggtcacgtccgggagacgggatcatgaagcgctcggtagccgtctggctcttggtcgggctcagcctcggtgtcccccagttcggcaaaggtgatatttgtgatcccaatccatgtgaaaatggaggtatctgtttgccaggattggctgatggttccttttcctgtgagtgtccagatggcttcacagaccccaactgttctagtgttgtggaggttgcatcagatgaagaagaaccaacttcagcaggtccctgcactcctaatccatgccataatggaggaacctgtgaaataagtgaagcataccgaggggatacattcataggctatgtttgtaaatgtccccgaggatttaatgggattcactgtcagcacaacataaatgaatgcgaagttgagccttgcaaaaatggtggaatatgtacagatcttgttgctaactattcctgtgagtgcccaggcgaatttatgggaagaaattgtcaatacaaatgctcaggcccactgggaattgaaggtggaattatatcaaaccagcaaatcacagcttcctctactcaccgagctctttttggactccaaaaatggtatccctactatgcacgtcttaataagaaggggcttataaatgcgtggacagctgcagaaaatgacagatggccgtggattcagataaatttgcaaaggaaaatgagagttactggtgtgattacccaaggagccaagaggattggaagcccagagtatataaaatcctacaaaattgcctacagtaatgatggaaagacttgggcaatgtacaaagtgaaaggcaccaatgaagacatggtgtttcgtggaaacattgataacaacactccatatgctaactctttcacaccccccataaaagctcagtatgtaagactctatccccaagtttgtcgaagacattgcactttgcgaatggaacttcttggctgtgaactgtcgggttgttctgagcctctgggtatgaaatcaggacatatacaagactatcagatcactgcctccagcatcttcagaacgctcaacatggacatgttcacttgggaaccaaggaaagctcggctggacaagcaaggcaaagtgaatgcctggacctctggccacaatgaccagtcacaatggttacaggtggatcttcttgttccaaccaaagtgactggcatcattacacaaggagctaaagattttggtcatgtacagtttgttggctcctacaaactggcttacagcaatgatggagaacactggactgtataccaggatgaaaagcaaagaaaagataaggttttccagggaaattttgacaatgacactcacagaaaaaatgtcatcgaccctcccatctatgcacgacacataagaatccttccttggtcctggtacgggaggatcacattgcggtcagagctgctgggctgcacagaggaggaatgaggggaggctacatttcacaaccctcttccctatttccctaaaagtatctccatggaatgaactgtgcaaaatctgtaggaaactgaatggtttttttttttttttcatgaaaaagtgctcaaattatggtaggcaactaacggtgtttttaagggggtctaagcctgccttttcaatgatttaatttgattttattttatccgtcaaatctcttaagtaacaacacattaagtgtgaattacttttctctcattgtttcctgaattattcgcattggtagaaatatattagggaaagaaagtagccttctttttatagcaagagtaaaaaagtctcaaagtcatcaaataagagcaagagttgatagagcttttacaatcaatactcacctaattctgataaaaggaatactgcaatgttagcaataagtttttttcttctgtaatgactctacgttatcctgtttccctgtgcctaccaaacactgtcaatgtttattacaaaattttaaagaagaatatgtaacatgcagtactgatattataattctcattttactttcattatttctaataagagattatgtgacttctttttcttttagttctattctacattcttaatattgtatattacctgaataattcaatttttttctaattgaatttcctattagttgactaaaagaagtgtcatgtttactcatatatgtagaacatgactgcctatcagtagattgatctgtatttaatattcgttaattaaatctgcagttttatttttgaaggaagccataactatttaatttccaaataattgcttcataaagaatcccatactctcagtttgcacaaaagaacaaaaaatatatatgtctctttaaatttaaatcttcatttagatggtaattacatatccttatatttactttaaaaaatcggcttatttgtttattttataaaaaatttagcaaagaaatattaatatagtgctgcatagtttggccaagcatactcatcatttctttgttcagctccacatttcctgtgaaactaacatcttattgagatttgaaactggtggtagtttcccaggaaggcacaggtggagttatttgtgagaagcaaagtgtttactaatgacaaagtagtaaaccattttcaagatgaaaactgatttctatttattttgcttcaaaggtcctgaaaaaataagcaattatcataacaatttgttattgatactggaggtttcattgacatgtctctcaaattaaagctcacactgcctccataaaagtcttcaacatctaatttataagctttacaagtatttattttataaggcttagacagaattattggagttttaaattaagtgtattggaaaagaaaggatggtatgtgtatgaaatgttaagatcctacgcaacactgctatttttttcctttaatatttgtgctgcataacaaaagccactagactgttactgtcttgtctgtccatgtgttaacagcatttcttaatgatgtatatatggagtggtcttcaatcatagtgaagaatttaaagagaaagtcaattgtattggcatttttaataagaacaaaattagttcgtctaaggggactggctggccacatatttgttccttgcccatatgctttctacttcttgttcttattatgaaattatgaatttgaagcctctgaaatggtgatcagttttcaacatctttcaaaaacaaaattactatttcctccatattgccttttttagataactttaaagttaggattttaaaatatttgtaactggctaaattttaaagtcgtgacaaataattacttaggttcagaaatatacacacacttactctttagccagtttctttcaaggtttactgtcccatcagatatctagccattttcctttgcaaattacataccttcttaagagtgtatttttaagattattacttacgctttatgatgatatagtttttcaaaattatttatagcttcatatgatgttttgtaattttttctattgatacctgttttaaaaatattttccaaggaagttgattaaaattatatttgttaccttttagaaaaagcattgaaatgagtttctcttgctttttcattttccctctgctttatatgctcttcgcaatacatcatgtccaacgggatacctattgttctcatgacacccaaaattgatgagagcaaaggggtcgcaccatatggaaatgttgaaaactattgtaaagtagtattatgaagtagcttttgtgtcattcatgtcgatgacatgaaagtgaagtaaatttattctatgtaaattcacactaaaaccagtacagtaccataagtagaatacatgtaagaatcacctagtcttcactatattgagtaaatataacatgctaattttacaattaatgaaactaaacttttaaacatctccattatatctacatccttttgaaggtatttatcatagttgccaattttaattttaggattgactttctctttctgaatgacttcataaagtttggtgtgaattttgaagacttgggttactaatgattgtatctttgctagtcaacaacttatgaaatatactcaatgcgtctgatgtgtcattaagtgcagaaataactaagacacaaataacctttgcaaaccttcaagctgtgtaatattccaatgttgtttttttctttgtatatatacttatatcacgtaggatgtaaaaccagtatgaccttgtctagtctccaaacttaaaataaacttttgaaaagctgggattcttttgaagcagttgtaattaaacacatttataagaata

SEQ ID NO: 6266 - DNA, 4244 bp, Homo sapiens
  source 1..4244: mol_type = unassigned DNA; mol_type = unassigned DNA
ggagacgggatcatgaagcgctcggtagccgtctggctcttggtcgggctcagcctcggtgtcccccagttcggcaaaggtgatatttgtgatcccaatccatgtgaaaatggaggtatctgtttgccaggattggctgatggttccttttcctgtgagtgtccagatggcttcacagaccccaactgttctagtgttgtggaggttggtccctgcactcctaatccatgccataatggaggaacctgtgaaataagtgaagcataccgaggggatacattcataggctatgtttgtaaatgtccccgaggatttaatgggattcactgtcagcacaacataaatgaatgcgaagttgagccttgcaaaaatggtggaatatgtacagatcttgttgctaactattcctgtgagtgcccaggcgaatttatgggaagaaattgtcaatacaaatgctcaggcccactgggaattgaaggtggaattatatcaaaccagcaaatcacagcttcctctactcaccgagctctttttggactccaaaaatggtatccctactatgcacgtcttaataagaaggggcttataaatgcgtggacagctgcagaaaatgacagatggccgtggattcagataaatttgcaaaggaaaatgagagttactggtgtgattacccaaggagccaagaggattggaagcccagagtatataaaatcctacaaaattgcctacagtaatgatggaaagacttgggcaatgtacaaagtgaaaggcaccaatgaagacatggtgtttcgtggaaacattgataacaacactccatatgctaactctttcacaccccccataaaagctcagtatgtaagactctatccccaagtttgtcgaagacattgcactttgcgaatggaacttcttggctgtgaactgtcgggttgttctgagcctctgggtatgaaatcaggacatatacaagactatcagatcactgcctccagcatcttcagaacgctcaacatggacatgttcacttgggaaccaaggaaagctcggctggacaagcaaggcaaagtgaatgcctggacctctggccacaatgaccagtcacaatggttacaggtggatcttcttgttccaaccaaagtgactggcatcattacacaaggagctaaagattttggtcatgtacagtttgttggctcctacaaactggcttacagcaatgatggagaacactggactgtataccaggatgaaaagcaaagaaaagataaggttttccagggaaattttgacaatgacactcacagaaaaaatgtcatcgaccctcccatctatgcacgacacataagaatccttccttggtcctggtacgggaggatcacattgcggtcagagctgctgggctgcacagaggaggaatgaggggaggctacatttcacaaccctcttccctatttccctaaaagtatctccatggaatgaactgtgcaaaatctgtaggaaactgaatggtttttttttttttttcatgaaaaagtgctcaaattatggtaggcaactaacggtgtttttaagggggtctaagcctgccttttcaatgatttaatttgattttattttatccgtcaaatctcttaagtaacaacacattaagtgtgaattacttttctctcattgtttcctgaattattcgcattggtagaaatatattagggaaagaaagtagccttctttttatagcaagagtaaaaaagtctcaaagtcatcaaataagagcaagagttgatagagcttttacaatcaatactcacctaattctgataaaaggaatactgcaatgttagcaataagtttttttcttctgtaatgactctacgttatcctgtttccctgtgcctaccaaacactgtcaatgtttattacaaaattttaaagaagaatatgtaacatgcagtactgatattataattctcattttactttcattatttctaataagagattatgtgacttctttttcttttagttctattctacattcttaatattgtatattacctgaataattcaatttttttctaattgaatttcctattagttgactaaaagaagtgtcatgtttactcatatatgtagaacatgactgcctatcagtagattgatctgtatttaatattcgttaattaaatctgcagttttatttttgaaggaagccataactatttaatttccaaataattgcttcataaagaatcccatactctcagtttgcacaaaagaacaaaaaatatatatgtctctttaaatttaaatcttcatttagatggtaattacatatccttatatttactttaaaaaatcggcttatttgtttattttataaaaaatttagcaaagaaatattaatatagtgctgcatagtttggccaagcatactcatcatttctttgttcagctccacatttcctgtgaaactaacatcttattgagatttgaaactggtggtagtttcccaggaaggcacaggtggagttatttgtgagaagcaaagtgtttactaatgacaaagtagtaaaccattttcaagatgaaaactgatttctatttattttgcttcaaaggtcctgaaaaaataagcaattatcataacaatttgttattgatactggaggtttcattgacatgtctctcaaattaaagctcacactgcctccataaaagtcttcaacatctaatttataagctttacaagtatttattttataaggcttagacagaattattggagttttaaattaagtgtattggaaaagaaaggatggtatgtgtatgaaatgttaagatcctacgcaacactgctatttttttcctttaatatttgtgctgcataacaaaagccactagactgttactgtcttgtctgtccatgtgttaacagcatttcttaatgatgtatatatggagtggtcttcaatcatagtgaagaatttaaagagaaagtcaattgtattggcatttttaataagaacaaaattagttcgtctaaggggactggctggccacatatttgttccttgcccatatgctttctacttcttgttcttattatgaaattatgaatttgaagcctctgaaatggtgatcagttttcaacatctttcaaaaacaaaattactatttcctccatattgccttttttagataactttaaagttaggattttaaaatatttgtaactggctaaattttaaagtcgtgacaaataattacttaggttcagaaatatacacacacttactctttagccagtttctttcaaggtttactgtcccatcagatatctagccattttcctttgcaaattacataccttcttaagagtgtatttttaagattattacttacgctttatgatgatatagtttttcaaaattatttatagcttcatatgatgttttgtaattttttctattgatacctgttttaaaaatattttccaaggaagttgattaaaattatatttgttaccttttagaaaaagcattgaaatgagtttctcttgctttttcattttccctctgctttatatgctcttcgcaatacatcatgtccaacgggatacctattgttctcatgacacccaaaattgatgagagcaaaggggtcgcaccatatggaaatgttgaaaactattgtaaagtagtattatgaagtagcttttgtgtcattcatgtcgatgacatgaaagtgaagtaaatttattctatgtaaattcacactaaaaccagtacagtaccataagtagaatacatgtaagaatcacctagtcttcactatattgagtaaatataacatgctaattttacaattaatgaaactaaacttttaaacatctccattatatctacatccttttgaaggtatttatcatagttgccaattttaattttaggattgactttctctttctgaatgacttcataaagtttggtgtgaattttgaagacttgggttactaatgattgtatctttgctagtcaacaacttatgaaatatactcaatgcgtctgatgtgtcattaagtgcagaaataactaagacacaaataacctttgcaaaccttcaagctgtgtaatattccaatgttgtttttttctttgtatatatacttatatcacgtaggatgtaaaaccagtatgaccttgtctagtctccaaacttaaaataaacttttgaaaagc

SEQ ID NO: 6267 - DNA, 1353 bp, Homo sapiens
  source 1..1353: mol_type = unassigned DNA; mol_type = unassigned DNA
gacctctgtattcaacattcctatcacttttgtaggtaactgtgctattgcataatatggccatacttaagtcattttccttgagaatagagaagtaaaggagaaaccaatgatttttcccccacttcagatctcacctgccagcactgatgtaagacttcacctccctatttcaaggcacattattatcatcagtctggataaatttgcaaaggaaaatgagagttactggtgtgattacccaaggagccaagaggattggaagcccagagtatataaaatcctacaaaattgcctacagtaatgatggaaagacttgggcaatgtacaaagtgaaaggcaccaatgaagacatggtgtttcgtggaaacattgataacaacactccatatgctaactctttcacaccccccataaaagctcagtatgtaagactctatccccaagtttgtcgaagacattgcactttgcgaatggaacttcttggctgtgaactgtcgggttgttctgagcctctgggtatgaaatcaggacatatacaagactatcagatcactgcctccagcatcttcagaacgctcaacatggacatgttcacttgggaaccaaggaaagctcggctggacaagcaaggcaaagtgaatgcctggacctctggccacaatgaccagtcacaatggttacaggagaactaaaggaaaggttttcaaaattaagtgaccaccaggccactggaaacatttgtcaatatgaaggattattctgatttccaaatcacagttccaatatttctcatttatgaaggttcacctataaagaagatctaaaagaggtcaagtaatgaaacttgtatatgattgtgagacagcttccgttcttctatagtattgacatatgttggagtgtgctaagtgaatcgaaggatgctcacactttcctaggactataagtcatctttatgtattttttcatttttttaaaccacataccatgaataagaaatctttttgatttttataattttatgatgtcaaagggaatccccactatccaattagaaaaaagaactttttataaacaaaacaaaattgaaaggacatttgtacagaaaatacttaagtgcaaacaaaagtgcagccaatatcaatgtagtataaggagtgcataatttgaggtacaaaatatagatgtgagggctgacaaattatatcaatactctgagacttcaatattctttctttttttatgtaaaatggagatactacaaaaaaagatcagccccagcctatcttctccttttaaaattcctcacacaagtaaaattctggtgtctaaatcatgactggacgaatc

SEQ ID NO: 6268 - DNA, 558 bp, Homo sapiens
  source 1..558: mol_type = unassigned DNA; mol_type = unassigned DNA
acactttcattagcagccacaggtactaaataatctgctgttactttctcaagtttaaaaatgaccatcagcccctcttctctaagtatgcaacttttgacggactgctcgttttagattggcagaaaatgtgcttccccagaggtccctgcactcctaatccatgccataatggaggaacctgtgaaataagtgaagcataccgaggggatacattcataggctatgtttgtaaatgtccccgaggatttaatgggattcactgtcagcacaacataaatgaatgcgaagttgagccttgcaaaaatggtggaatatgtacagatcttgttgctaactattcctgtgagtgcccaggcgaatttatgggaagaaattgtcaatacaaatgctcaggcccactgggaattgaaggtggaattatatcaaaccagcaaatcacagcttcctctactcaccgagctctttttggactccaaaaatggtatccctactatgcacgtcttaataagaaggggcttataaatgcgtggacagctgcagaaaatgacagatggc

SEQ ID NO: 6269 - DNA, 4471 bp, Homo sapiens
  source 1..4471: mol_type = unassigned DNA; mol_type = unassigned DNA
aaacagccttttgggacctgtccccggacgaggactgcccccctccctcgggcaactactactgatgctgtccaggcatcgcccaaggggaaaggttgcagcggggtcggaaggcgcgggaggagtctggcggtgattgatgggaagggatgaatgaataaaagtacttgtctgatggcagcagagaccccgagcaaacggtggaggctacactgtctggcattctcgcagcgtttcgtcagagccggacccgcctgcagctcaagggaggcgtgctcctctcccagagcaggctggaacccagctgggttccgcctcccgggaaggtggtctccattcgtcgctctgcatctggtttgtcagatccgagaggctctgaaactgcggagcggccaccggacgccttctggagcaggtagcagcatgcagccgcctccaagtctgtgcggacgcgccctggttgcgctggttcttgcctgcggcctgtcgcggatctggggagaggagagaggcttcccgcctgacagggccactccgcttttgcaaaccgcagagataatgacgccacccactaagaccttatggcccaagggttccaacgccagtctggcgcggtcgttggcacctgcggaggtgcctaaaggagacaggacggcaggatctccgccacgcaccatctcccctcccccgtgccaaggacccatcgagatcaaggagactttcaaatacatcaacacggttgtgtcctgccttgtgttcgtgctggggatcatcgggaactccacacttctgagaattatctacaagaacaagtgcatgcgaaacggtcccaatatcttgatcgccagcttggctctgggagacctgctgcacatcgtcattgacatccctatcaatgtctacaagctgctggcagaggactggccatttggagctgagatgtgtaagctggtgcctttcatacagaaagcctctgtgggaatcactgtgctgagtctatgtgctctgagtattgacagatatcgagctgttgcttcttggagtagaattaaaggaattggggttccaaaatggacagcagtagaaattgttttgatttgggtggtctctgtggttctggctgtccctgaagccataggttttgatataattacgatggactacaaaggaagttatctgcgaatctgcttgcttcatcccgttcagaagacagctttcatgcagttttacaagacagcaaaagattggtggctattcagtttctatttctgcttgccattggccatcactgcatttttttatacactaatgacctgtgaaatgttgagaaagaaaagtggcatgcagattgctttaaatgatcacctaaagcagagacgggaagtggccaaaaccgtcttttgcctggtccttgtctttgccctctgctggcttccccttcacctcagcaggattctgaagctcactctttataatcagaatgatcccaatagatgtgaacttttgagctttctgttggtattggactatattggtatcaacatggcttcactgaattcctgcattaacccaattgctctgtatttggtgagcaaaagattcaaaaactgctttaagtcatgcttatgctgctggtgccagtcatttgaagaaaaacagtccttggaggaaaagcagtcgtgcttaaagttcaaagctaatgatcacggatatgacaacttccgttccagtaataaatacagctcatcttgaaagaagaactattcactgtatttcattttctttatattggaccgaagtcattaaaacaaaatgaaacatttgccaaaacaaaacaaaaaactatgtatttgcacagcacactattaaaatattaagtgtaattattttaacactcacagctacatatgacattttatgagctgtttacggcatggaaagaaaatcagtgggaattaagaaagcctcgtcgtgaaagcacttaattttttacagttagcacttcaacatagctcttaacaacttccaggatattcacacaacacttaggcttaaaaatgagctcactcagaatttctattctttctaaaaagagatttatttttaaatcaatgggactctgatataaaggaagaataagtcactgtaaaacagaacttttaaatgaagcttaaattactcaatttaaaattttaaaatcctttaaaacaacttttcaattaatattatcacactattatcagattgtaattagatgcaaatgagagagcagtttagttgttgcatttttcggacactggaaacatttaaatgatcaggagggagtaacagaaagagcaaggctgtttttgaaaatcattacactttcactagaagcccaaacctcagcattctgcaatatgtaaccaacatgtcacaaacaagcagcatgtaacagactggcacatgtgccagctgaatttaaaatataatacttttaaaaagaaaattattacatcctttacattcagttaagatcaaacctcacaaagagaaatagaatgtttgaaaggctatcccaaaagacttttttgaatctgtcattcacataccctgtgaagacaatactatctacaattttttcaggattattaaaatcttcttctttcactatcgtagcttaaactctgtttggttttgtcatctgtaaatacttacctacatacactgcatgtagatgattaaatgagggcaggccctgtgctcatagctttacgatggagagatgccagtgacctcataataaagactgtgaactgcctggtgcagtgtccacatgacaaaggggcaggtagcaccctctctcacccatgctgtggttaaaatggtttctagcatatgtataatgctatagttaaaatactatttttcaaaatcatacagattagtacatttaacagctacctgtaaagcttattactaatttttgtattatttttgtaaatagccaatagaaaagtttgcttgacatggtgcttttctttcatctagaggcaaaactgctttttgagaccgtaagaacctcttagctttgtgcgttcctgcctaatttttatatcttctaagcaaagtgccttaggatagcttgggatgagatgtgtgtgaaagtatgtacaagagaaaacggaagagagaggaaatgaggtggggttggaggaaacccatggggacagattcccattcttagcctaacgttcgtcattgcctcgtcacatcaatgcaaaaggtcctgattttgttccagcaaaacacagtgcaatgttctcagagtgactttcgaaataaattgggcccaagagctttaactcggtcttaaaatatgcccaaatttttactttgtttttcttttaataggctgggccacatgttggaaataagctagtaatgttgttttctgtcaatattgaatgtgatggtacagtaaaccaaaacccaacaatgtggccagaaagaaagagcaataataattaattcacacaccatatggattctatttataaatcacccacaaacttgttctttaatttcatcccaatcactttttcagaggcctgttatcatagaagtcattttagactctcaattttaaattaattttgaatcactaatattttcacagtttattaatatatttaatttctatttaaattttagattatttttattaccatgtactgaatttttacatcctgataccttttccttctccatgtcagtatcatgttctctaattatcttgccaaattttgaaactacacacaaaaagcatacttgcattatttataataaaattgcattcagtggctttttaaaaaaatgtttgattcaaaactttaacatactgataagtaagaaacaattataatttctttacatactcaaaaccaagatagaaaaaggtgctatcgttcaacttcaaaacatgtttcctagtattaaggactttaatatagcaacagacaaaattattgttaacatggatgttacagctcaaaagatttataaaagattttaacctattttctcccttattatccactgctaatgtggatgtatgttcaaacaccttttagtattgatagcttacatatggccaaaggaatacagtttatagcaaaacatgggtatgctgtagctaactttataaaagtgtaatataacaatgtaaaaaattatatatctgggaggattttttggttgcctaaagtggctatagttactgattttttattatgtaagcaaaaccaataaaaatttaagtttttttaacaactaccttatttttcactgtacagacactaattcattaaatactaattgattgtttaaaagaaatataaatgtgacaagtggacattatttatgttaaatatacaattatcaagcaagtatgaagttattcaattaaaatgccacatttctggtctctggg

SEQ ID NO: 6270 - DNA, 4277 bp, Homo sapiens
  source 1..4277: mol_type = unassigned DNA; mol_type = unassigned DNA
atcaggaaggagtttcgacccgcgctggcgagtcatgagcgccaagtttcccactggcgcgcaaacttgagttacttttgagcgtggatactggcgaagaggctgcgggcggtattagcgtttgcagcgacttggctcgggcagctgacccaagtgtcctgtcttccttcctctgcttgtctctaggctctgaaactgcggagcggccaccggacgccttctggagcaggtagcagcatgcagccgcctccaagtctgtgcggacgcgccctggttgcgctggttcttgcctgcggcctgtcgcggatctggggagaggagagaggcttcccgcctgacagggccactccgcttttgcaaaccgcagagataatgacgccacccactaagaccttatggcccaagggttccaacgccagtctggcgcggtcgttggcacctgcggaggtgcctaaaggagacaggacggcaggatctccgccacgcaccatctcccctcccccgtgccaaggacccatcgagatcaaggagactttcaaatacatcaacacggttgtgtcctgccttgtgttcgtgctggggatcatcgggaactccacacttctgagaattatctacaagaacaagtgcatgcgaaacggtcccaatatcttgatcgccagcttggctctgggagacctgctgcacatcgtcattgacatccctatcaatgtctacaagctgctggcagaggactggccatttggagctgagatgtgtaagctggtgcctttcatacagaaagcctctgtgggaatcactgtgctgagtctatgtgctctgagtattgacagatatcgagctgttgcttcttggagtagaattaaaggaattggggttccaaaatggacagcagtagaaattgttttgatttgggtggtctctgtggttctggctgtccctgaagccataggttttgatataattacgatggactacaaaggaagttatctgcgaatctgcttgcttcatcccgttcagaagacagctttcatgcagttttacaagacagcaaaagattggtggctattcagtttctatttctgcttgccattggccatcactgcatttttttatacactaatgacctgtgaaatgttgagaaagaaaagtggcatgcagattgctttaaatgatcacctaaagcagagacgggaagtggccaaaaccgtcttttgcctggtccttgtctttgccctctgctggcttccccttcacctcagcaggattctgaagctcactctttataatcagaatgatcccaatagatgtgaacttttgagctttctgttggtattggactatattggtatcaacatggcttcactgaattcctgcattaacccaattgctctgtatttggtgagcaaaagattcaaaaactgctttaagtcatgcttatgctgctggtgccagtcatttgaagaaaaacagtccttggaggaaaagcagtcgtgcttaaagttcaaagctaatgatcacggatatgacaacttccgttccagtaataaatacagctcatcttgaaagaagaactattcactgtatttcattttctttatattggaccgaagtcattaaaacaaaatgaaacatttgccaaaacaaaacaaaaaactatgtatttgcacagcacactattaaaatattaagtgtaattattttaacactcacagctacatatgacattttatgagctgtttacggcatggaaagaaaatcagtgggaattaagaaagcctcgtcgtgaaagcacttaattttttacagttagcacttcaacatagctcttaacaacttccaggatattcacacaacacttaggcttaaaaatgagctcactcagaatttctattctttctaaaaagagatttatttttaaatcaatgggactctgatataaaggaagaataagtcactgtaaaacagaacttttaaatgaagcttaaattactcaatttaaaattttaaaatcctttaaaacaacttttcaattaatattatcacactattatcagattgtaattagatgcaaatgagagagcagtttagttgttgcatttttcggacactggaaacatttaaatgatcaggagggagtaacagaaagagcaaggctgtttttgaaaatcattacactttcactagaagcccaaacctcagcattctgcaatatgtaaccaacatgtcacaaacaagcagcatgtaacagactggcacatgtgccagctgaatttaaaatataatacttttaaaaagaaaattattacatcctttacattcagttaagatcaaacctcacaaagagaaatagaatgtttgaaaggctatcccaaaagacttttttgaatctgtcattcacataccctgtgaagacaatactatctacaattttttcaggattattaaaatcttcttctttcactatcgtagcttaaactctgtttggttttgtcatctgtaaatacttacctacatacactgcatgtagatgattaaatgagggcaggccctgtgctcatagctttacgatggagagatgccagtgacctcataataaagactgtgaactgcctggtgcagtgtccacatgacaaaggggcaggtagcaccctctctcacccatgctgtggttaaaatggtttctagcatatgtataatgctatagttaaaatactatttttcaaaatcatacagattagtacatttaacagctacctgtaaagcttattactaatttttgtattatttttgtaaatagccaatagaaaagtttgcttgacatggtgcttttctttcatctagaggcaaaactgctttttgagaccgtaagaacctcttagctttgtgcgttcctgcctaatttttatatcttctaagcaaagtgccttaggatagcttgggatgagatgtgtgtgaaagtatgtacaagagaaaacggaagagagaggaaatgaggtggggttggaggaaacccatggggacagattcccattcttagcctaacgttcgtcattgcctcgtcacatcaatgcaaaaggtcctgattttgttccagcaaaacacagtgcaatgttctcagagtgactttcgaaataaattgggcccaagagctttaactcggtcttaaaatatgcccaaatttttactttgtttttcttttaataggctgggccacatgttggaaataagctagtaatgttgttttctgtcaatattgaatgtgatggtacagtaaaccaaaacccaacaatgtggccagaaagaaagagcaataataattaattcacacaccatatggattctatttataaatcacccacaaacttgttctttaatttcatcccaatcactttttcagaggcctgttatcatagaagtcattttagactctcaattttaaattaattttgaatcactaatattttcacagtttattaatatatttaatttctatttaaattttagattatttttattaccatgtactgaatttttacatcctgataccttttccttctccatgtcagtatcatgttctctaattatcttgccaaattttgaaactacacacaaaaagcatacttgcattatttataataaaattgcattcagtggctttttaaaaaaatgtttgattcaaaactttaacatactgataagtaagaaacaattataatttctttacatactcaaaaccaagatagaaaaaggtgctatcgttcaacttcaaaacatgtttcctagtattaaggactttaatatagcaacagacaaaattattgttaacatggatgttacagctcaaaagatttataaaagattttaacctattttctcccttattatccactgctaatgtggatgtatgttcaaacaccttttagtattgatagcttacatatggccaaaggaatacagtttatagcaaaacatgggtatgctgtagctaactttataaaagtgtaatataacaatgtaaaaaattatatatctgggaggattttttggttgcctaaagtggctatagttactgattttttattatgtaagcaaaaccaataaaaatttaagtttttttaacaactaccttatttttcactgtacagacactaattcattaaatactaattgattgtttaaaagaaatataaatgtgacaagtggacattatttatgttaaatatacaattatcaagcaagtatgaagttattcaattaaaatgccacatttctgg

SEQ ID NO: 6271 - DNA, 1571 bp, Homo sapiens
  source 1..1571: mol_type = unassigned DNA; mol_type = unassigned DNA
gtttcgacccgcgctggcgagtcatgagcgccaagtttcccactggcgcgcaaacttgagttacttttgagcgtggatactggcgaagaggctgcgggcggtattagcgtttgcagcgacttggctcgggcagctgacccaagtgtcctgtcttccttcctctgcttgtctctaggctctgaaactgcggagcggccaccggacgccttctggagcaggtagcagcatgcagccgcctccaagtctgtgcggacgcgccctggttgcgctggttcttgcctgcggcctgtcgcggatctggggagaggagagaggcttcccgcctgacagggccactccgcttttgcaaaccgcagagataatgacgccacccactaagaccttatggcccaagggttccaacgccagtctggcgcggtcgttggcacctgcggaggtgcctaaaggagacaggacggcaggatctccgccacgcaccatctcccctcccccgtgccaaggacccatcgagatcaaggagactttcaaatacatcaacacggttgtgtcctgccttgtgttcgtgctggggatcatcgggaactccacacttctgagaattatctacaagaacaagtgcatgcgaaacggtcccaatatcttgatcgccagcttggctctgggagacctgctgcacatcgtcattgacatccctatcaatgtctacaagctgctggcagaggactggccatttggagctgagatgtgtaagctggtgcctttcatacagaaagcctctgtgggaatcactgtgctgagtctatgtgctctgagtattgacagatatcgagctgttgcttcttggagtagaattaaaggaattggggttccaaaatggacagcagtagaaattgttttgatttgggtggtctctgtggttctggctgtccctgaagccataggttttgatataattacgatggactacaaaggaagttatctgcgaatctgcttgcttcatcccgttcagaagacagctttcatgcagttttacaagacagcaaaagattggtggctattcagtttctatttctgcttgccattggccatcactgcatttttttatacactaatgacctgtgaaatgttgagaaagaaaagtggcatgcagattgctttaaatgatcacctaaagcagagacgggaagtggccaaaaccgtcttttgcctggtccttgtctttgccctctgctggcttccccttcacctcagcaggattctgaagctcactctttataatcagaatgatcccaatagatgtgaacttttgagctttctgttggtattggactatattggtatcaacatggcttcactgaattcctgcattaacccaattgctctgtatttggtgagcaaaagattcaaaaactgctttaaggctgggccacatgttggaaataagctagtaatgttgttttctgtcaatattgaatgtgatggtacagtaaaccaaaacccaacaatgtggccagaaagaaagagcaataataattaattcacacaccatatggattctatttataaatcac

SEQ ID NO: 6272 - DNA, 643 bp, Homo sapiens
  source 1..643: mol_type = unassigned DNA; mol_type = unassigned DNA
attgattgaaccttattctggggcttcggtttggcttactagtttgggattttaaaaaaataaaaattaagcctatagagagggcaaattaaaattaggttgggtaaaggaaggagcgcgagtgtttgaagccgtttggagggaacagcggtttccaagttcctgctgacttgagaagtctctgcgggtttccgaatctccggcgcactcctgggcgcgctgcgggagctgtagctcagccagccagggagtagcggctttcatccgccgggaggagtctttcgagttcaatcgcggggtatagaggttcccctgcggggcaaaatgcagagcttgacacaagcccttggcctctaggctctgaaactgcggagcggccaccggacgccttctggagcaggtagcagcatgcagccgcctccaagtctgtgcggacgcgccctggttgcgctggttcttgcctgcggcctgtcgcggatctggggagaggagagaggcttcccgcctgacagggccactccgcttttgcaaaccgcagagataatgacgccacccactaagaccttatggcccaagggttccaacgccagtctggcgcggtcgttggcacctgcggaggtgcctaaaggagacaggacggcag

SEQ ID NO: 6273 - DNA, 3815 bp, Homo sapiens
  source 1..3815: mol_type = unassigned DNA; mol_type = unassigned DNA
tttatttggaggacactattgaagccacctgctcaggacaatgaaattcttcagttacattctggtttatcgccgatttctcttcgtggttttcactgtgttggttttactacctctgcccatcgtcctccacaccaaggaagcagaatgtgcctacacactctttgtggtcgccacattttggctcacagaagcattgcctctgtcggtaacagctttgctacctagtttaatgttacccatgtttgggatcatgccttctaagaaggtggcatctgcttatttcaaggattttcacttactgctaattggagttatctgtttagcaacatccatagaaaaatggaatttgcacaagagaattgctctgaaaatggtgatgatggttggtgtaaatcctgcatggctgacgctggggttcatgagcagcactgcctttttgtctatgtggctcagcaacacctcgacggctgccatggtgatgcccattgcggaggctgtagtgcagcagatcatcaatgcagaagcagaggtcgaggccactcagatgacttacttcaacggatcaaccaaccacggactagaaattgatgaaagtgttaatggacatgaaataaatgagaggaaagagaaaacaaaaccagttccaggatacaataatgatacagggaaaatttcaagcaaggtggagttggaaaagaactcaggcatgagaaccaaatatcgaacaaagaagggccacgtgacacgtaaacttacgtgtttgtgcattgcctactcttctaccattggtggactgacaacaatcactggtacctccaccaacttgatctttgcagagtatttcaatacacgctatcctgactgtcgttgcctcaactttggatcatggtttacgttttccttcccagctgcccttatcattctactcttatcctggatctggcttcagtggcttttcctaggattcaattttaaggagatgttcaaatgtggcaaaaccaaaacagtccaacaaaaagcttgtgctgaggtgattaagcaagaataccaaaagcttgggccaataaggtatcaagaaattgtgaccttggtcctcttcattataatggctctgctatggtttagtcgagaccccggatttgttcctggttggtctgcacttttttcagagtaccctggttttgctacagattcaactgttgctttacttatagggctgctattctttcttatcccagctaagacactgactaaaactacacctacaggagaaattgttgcttttgattactctccactgattacttggaaagaattccagtcattcatgccctgggatatagccattcttgttggtggagggtttgccctggcagatggttgtgaggagtctggattatctaagtggataggaaataaattatctcctctgggttcattaccagcatggctaataattctgatatcttctttgatggtgacatctttaactgaggtagccagcaatccagctaccattacactctttctcccaatattatctccattggccgaagccattcatgtgaaccctctttatattctgataccttctactctgtgtacttcatttgcattcctcctaccagtagcaaatccacccaatgctattgtcttttcatatggtcatctgaaagtcattgacatggttaaagctggacttggtgtcaacattgttggtgttgctgtggttatgcttggcatatgtacttggattgtacccatgtttgacctctacacttacccttcgtgggctcctgctatgagtaatgagaccatgccataataagcacaaaatttctgactatcttgcggtaatttctggaagacattaatgattgactgtaaaatgtggctctaaataactaatgacacacatttaaatcagttatggtgtagctgctgcaattcctgtgaatacccgaaacctgctgttataactcagagtccatatttgttattgcagtgcaactaaagagcatctatgtgccttcatcaagaagcccatgttttgagattttgctcatgaaccatctgcaacttgcttcatcataagaataatttataacttgaccttcaaagagattagagcatttgtttcatcttacagttggagttcaatgtaacattttaaatgcaatttattatttcagaaatttcccatgaaactaaaaatagaaaataagatatacaagttaattcggtacttggataaatcatttctgcattgttgttccagagaatttgctgagaaatcaaagccatggtcatctggtgatgaagagaaaagtttaatctaaatgatatgtgcatttcctcatttaaaaaatccaattggattattcttaatatatacatgtaatatgaaaattgagattgaagcactaattccaaaattatggctgaatatactaaataacagaaaagttacagataagaatttatttctactgaactctatagttagtgtaatataattcatatttttatgatattggcacactgagaaattcattttgtagagctatggataaggcttgctatgatttgcactattagtacagtatagttagaaaggaaagctgaacactataaaactattaacatattttcgtatatgagtaacaactttgcttaagtgtttatcttagttcagaaatacataatgtcatatgttaaaaataaagagatgtagaaatctaaatgaattatcactgtgtatacagacagaaaaatcacataactctggtgtgttaacattgcaatgaaaaaatgaaaaaaagaaggaaaaaagaataagaatgaaaactgctgacgtattacaaaacagaaaaataaatgatttaaaatcaaatcaaaaagaaaaaactaaacatttaaacaaaaatgggataagaatagtcttctagaagtgaggatgcgaaaaagaatgagtttccaattaccctgatgtgacaattacacattgtagacaggtagcaaaatatcacatacacccccaaaatatgtacaaatattatatatcaataaataaatttttaaagagtaagtgctattggcattccaaaattcagctaaaggaaaaatgatcaaaaacaaagtaaggtgcacagttagcaaaagatgcagatgttatatcacagcaattctcatgctaaaaatacaacaaaagacaaagcaaaaaataaacctttgcttttttttttttttttttttttttgagacggagtctcgctctgtcgcccaggctggagtgcagtggcgggatctcggctcactgcaagctccgcctcccaggttcacgccattctcctgcctcagccaaacctttgctatttttaatcttcgttggcactttccagctgttactgaccttgtcattttttattcaaataagattatttacaaacttattcttgaaactaaatatagtaaagagggtttttaaaataatatttaacatacgaattattaattggccatgttcattatttatctatgtttattaatgggccaatgcaaaaaatcattttttcaaagaaaaatttgtccatgtaaagcttaaattataatattgctgctttgtataactcttctatgtttattctattcatttgttcctttccctaccatattttacacatgtatttataatctgtagtatttattacatttctgcttttttctagtcattcaatttatcactgctgaattgcatcagatcatggatgcatttttattatgaaaaaataaaatgacttttcaaattataa

SEQ ID NO: 6274 - DNA, 2861 bp, Homo sapiens
  source 1..2861: mol_type = unassigned DNA; mol_type = unassigned DNA
actattgaagccacctgctcaggacaatgaaattcttcagttacattctggtttatcgccgatttctcttcgtggttttcactgtgttggttttactacctctgcccatcgtcctccacaccaagagtaagttgtaataacgatatcggatgtatcagcaacttccagcagacttgggggaagcagaatgtgcctacacactctttgtggtcgccacattttggctcacagaagcattgcctctgtcggtaacagctttgctacctagtttaatgttacccatgtttgggatcatgccttctaagaaggtggcatctgcttatttcaaggattttcacttactgctaattggagttatctgtttagcaacatccatagaaaaatggaatttgcacaagagaattgctctgaaaatggtgatgatggttggtgtaaatcctgcatggctgacgctggggttcatgagcagcactgcctttttgtctatgtggctcagcaacacctcgacggctgccatggtgatgcccattgcggaggctgtagtgcagcagatcatcaatgcagaagcagaggtcgaggccactcagatgacttacttcaacggatcaaccaaccacggactagaaattgatgaaagtgttaatggacatgaaataaatgagaggaaagagaaaacaaaaccagttccaggatacaataatgatacagggaaaatttcaagcaaggtggagttggaaaagaactcaggcatgagaaccaaatatcgaacaaagaagggccacgtgacacgtaaacttacgtgtttgtgcattgcctactcttctaccattggtggactgacaacaatcactggtacctccaccaacttgatctttgcagagtatttcaatacacgctatcctgactgtcgttgcctcaactttggatcatggtttacgttttccttcccagctgcccttatcattctactcttatcctggatctggcttcagtggcttttcctaggattcaattttaaggagatgttcaaatgtggcaaaaccaaaacagtccaacaaaaagcttgtgctgaggtgattaagcaagaataccaaaagcttgggccaataaggtatcaagaaattgtgaccttggtcctcttcattataatggctctgctatggtttagtcgagaccccggatttgttcctggttggtctgcacttttttcagagtaccctggttttgctacagattcaactgttgctttacttatagggctgctattctttcttatcccagctaagacactgactaaaactacacctacaggagaaattgttgcttttgattactctccactgattacttggaaagaattccagtcattcatgccctgggatatagccattcttgttggtggagggtttgccctggcagatggttgtgaggagtctggattatctaagtggataggaaataaattatctcctctgggttcattaccagcatggctaataattctgatatcttctttgatggtgacatctttaactgaggtagccagcaatccagctaccattacactctttctcccaatattatctccattggccgaagccattcatgtgaaccctctttatattctgataccttctactctgtgtacttcatttgcattcctcctaccagtagcaaatccacccaatgctattgtcttttcatatggtcatctgaaagtcattgacatggttaaagctggacttggtgtcaacattgttggtgttgctgtggttatgcttggcatatgtacttggattgtacccatgtttgacctctacacttacccttcgtgggctcctgctatgagtaatgagaccatgccataataagcacaaaatttctgactatcttgcggtaatttctggaagacattaatgattgactgtaaaatgtggctctaaataactaatgacacacatttaaatcagttatggtgtagctgctgcaattcctgtgaatacccgaaacctgctgttataactcagagtccatatttgttattgcagtgcaactaaagagcatctatgtgccttcatcaagaagcccatgttttgagattttgctcatgaaccatctgcaacttgcttcatcataagaataatttataacttgaccttcaaagagattagagcatttgtttcatcttacagttggagttcaatgtaacattttaaatgcaatttattatttcagaaatttcccatgaaactaaaaatagaaaataagatatacaagttaattcggtacttggataaatcatttctgcattgttgttccagagaatttgctgagaaatcaaagccatggtcatctggtgatgaagagaaaagtttaatctaaatgatatgtgcatttcctcatttaaaaaatccaattggattattcttaatatatacatgtaatatgaaaattgagattgaagcactaattccaaaattatggctgaatatactaaataacagaaaagttacagataagaatttatttctactgaactctatagttagtgtaatataattcatatttttatgatattggcacactgagaaattcattttgtagagctatggataaggcttgctatgatttgcactattagtacagtatagttagaaaggaaagctgaacactataaaactattaacatattttcgtatatgagtaacaactttgcttaagtgtttatcttagttcagaaatacataatgtcatatgttaaaaataaagagatgtagaaatctaaatgaattatcactgtgtatacagacagaaaaatcacataactctggtgtgttaacattgcaatgaaaaaatgaaaa

SEQ ID NO: 6275 - DNA, 2457 bp, Homo sapiens
  source 1..2457: mol_type = unassigned DNA; mol_type = unassigned DNA
ctattgaagccacctgctcaggacaatgaaattcttcagttacattctggtttatcgccgatttctcttcgtggttttcactgtgttggttttactacctctgcccatcgtcctccacaccaagcttattctgacttttccaagatgaagatgaagagcaggccagtggcatgggccagatgcagtcagatgactgactgaccaggagggcctccgtccagtgaccagtctcagaatttaaaggacccttcccccttacttatgcttgtactcagcccaggaagcagaatgtgcctacacactctttgtggtcgccacattttggctcacagaagcattgcctctgtcggtaacagctttgctacctagtttaatgttacccatgtttgggatcatgccttctaagaaggtggcatctgcttatttcaaggattttcacttactgctaattggagttatctgtttagcaacatccatagaaaaatggaatttgcacaagagaattgctctgaaaatggtgatgatggttggtgtaaatcctgcatggctgacgctggggttcatgagcagcactgcctttttgtctatgtggctcagcaacacctcgacggctgccatggtgatgcccattgcggaggctgtagtgcagcagatcatcaatgcagaagcagaggtcgaggccactcagatgacttacttcaacggatcaaccaaccacggactagaaattgatgaaagtgttaatggacatgaaataaatgagaggaaagagaaaacaaaaccagttccaggatacaataatgatacagggaaaatttcaagcaaggtggagttggaaaagtacttgcaagtgaggtgaccaaaaaacagctttagactcttaaacttagtgtttaaaatgagaaggctgagagacagtctgcttatggagaaagttggagtatttccccagtgccccaaccccctgccacttgtaccatcacagtcgaaagaagggaagagtctcctacttaacaaggaagaggaagaatcaaaccaacaaagggtgtttacagggtcatgggtgagaaaaagaatgaagttgcttttggcttacaccctagaaagtcatctcttaaataaaacacttacatttggactagtgattccccaagtgaaaccatttcaggatgtgccattgtccaagaactcaggcatgagaaccaaatatcgaacaaagaagggccacgtgacacgtaaacttacgtgtttgtgcattgcctactcttctaccattggtggactgacaacaatcactggtacctccaccaacttgatctttgcagagtatttcaatacacgctatcctgactgtcgttgcctcaactttggatcatggtttacgttttccttcccagctgcccttatcattctactcttatcctggatctggcttcagtggcttttcctaggattcaattttaaggagatgttcaaatgtggcaaaaccaaaacagtccaacaaaaagcttgtgctgaggtgattaagcaagaataccaaaagcttgggccaataaggtatcaagaaattgtgaccttggtcctcttcattataatggctctgctatggtttagtcgagaccccggatttgttcctggttggtctgcacttttttcagagtaccctggttttgctacagattcaactgttgctttacttatagggctgctattctttcttatcccagctaagacactgactaaaactacacctacaggagaaattgttgcttttgattactctccactgattacttggaaagaattccagtcattcatgccctgggatatagccattcttgttggtggagggtttgccctggcagatggttgtgaggagtctggattatctaagtggataggaaataaattatctcctctgggttcattaccagcatggctaataattctgatatcttctttgatggtgacatctttaactgaggtagccagcaatccagctaccattacactctttctcccaatattatctccattggccgaagccattcatgtgaaccctctttatattctgataccttctactctgtgtacttcatttgcattcctcctaccagtagcaaatccacccaatgctattgtcttttcatatggtcatctgaaagtcattgacatggttaaagctggacttggtgtcaacattgttggtgttgctgtggttatgcttggcatatgtacttggattgtacccatgtttgacctctacacttacccttcgtgggctcctgctatgagtaatgagaccatgccataataagcacaaaatttctgactatcttgcggtaatttctggaagacattaatgattgactgtaaaatgtggctctaaataactaatgacacacatttaaatcagttatggtgtagctgctgcaattcctgtgaatacccgaaacc

SEQ ID NO: 6276 - DNA, 2222 bp, Homo sapiens
  source 1..2222: mol_type = unassigned DNA; mol_type = unassigned DNA
ccagcctcataatatcaccttttgctttgcatttgttcttaccaggaagcagaatgtgcctacacactctttgtggtcgccacattttggctcacagaagcattgcctctgtcggtaacagctttgctacctagtttaatgttacccatgtttgggatcatgccttctaagaaggtggcatctgcttatttcaaggattttcacttactgctaattggagttatctgtttagcaacatccatagaaaaatggaatttgcacaagagaattgctctgaaaatggtgatgatggttggtgtaaatcctgcatggctgacgctggggttcatgagcagcactgcctttttgtctatgtggctcagcaacacctcgacggctgccatggtgatgcccattgcggaggctgtagtgcagcagatcatcaatgcagaagcagaggtcgaggccactcagatgacttacttcaacggatcaaccaaccacggactagaaattgatgaaagtgttaatggacatgaaataaatgagaggaaagagaaaacaaaaccagttccaggatacaataatgatacagggaaaatttcaagcaaggtggagttggaaaagtacttgcaagtgaggtgaccaaaaaacagctttagactcttaaacttagtgtttaaaatgagaaggctgagagacagtctgcttatggagaaagttggagtatttccccagtgccccaaccccctgccacttgtaccatcacagtcgaaagaagggaagagtctcctacttaacaaggaagaggaagaatcaaaccaacaaagggtgtttacagggtcatgggtgagaaaaagaatgaagttgcttttggcttacaccctagaaagtcatctcttaaataaaacacttacatttggactagtgattccccaagtgaaaccatttcaggatgtgccattgtccaagaactcaggcatgagaaccaaatatcgaacaaagaagggccacgtgacacgtaaacttacgtgtttgtgcattgcctactcttctaccattggtggactgacaacaatcactggtacctccaccaacttgatctttgcagagtatttcaatacacgctatcctgactgtcgttgcctcaactttggatcatggtttacgttttccttcccagctgcccttatcattctactcttatcctggatctggcttcagtggcttttcctaggattcaattttaaggagatgttcaaatgtggcaaaaccaaaacagtccaacaaaaagcttgtgctgaggtgattaagcaagaataccaaaagcttgggccaataaggtatcaagaaattgtgaccttggtcctcttcattataatggctctgctatggtttagtcgagaccccggatttgttcctggttggtctgcacttttttcagagtaccctggttttgctacagattcaactgttgctttacttatagggctgctattctttcttatcccagctaagacactgactaaaactacacctacaggagaaattgttgcttttgattactctccactgattacttggaaagaattccagtcattcatgccctgggatatagccattcttgttggtggagggtttgccctggcagatggttgtgaggagtctggattatctaagtggataggaaataaattatctcctctgggttcattaccagcatggctaataattctgatatcttctttgatggtgacatctttaactgaggtagccagcaatccagctaccattacactctttctcccaatattatctccattggccgaagccattcatgtgaaccctctttatattctgataccttctactctgtgtacttcatttgcattcctcctaccagtagcaaatccacccaatgctattgtcttttcatatggtcatctgaaagtcattgacatggttaaagctggacttggtgtcaacattgttggtgttgctgtggttatgcttggcatatgtacttggattgtacccatgtttgacctctacacttacccttcgtgggctcctgctatgagtaatgagaccatgccataataagcacaaaatttctgactatcttgcggtaatttctggaagacattaatgattgactgtaaaatgtggctctaaataactaatgacacacatttaaatcagttatggtgtagctgctgcaattcctgtgaatacccgaaacc

SEQ ID NO: 6277 - DNA, 3024 bp, Homo sapiens
  source 1..3024: mol_type = unassigned DNA; mol_type = unassigned DNA
agatgctgtgttcccctcctcagagaagaagaaaacgcactagagagtgggagcatccccaaggctgaagcgcatccaggacatcacatgtcaacgtgtcctctctggcgtggggtccccgcgagtctgggaaacgaggagctggcaagggagggcaagcgggggcggcaaagagggcccctggagcagggggcgcggacctcgctgcgctgcgcgctctaccgccgggctcgcaacgctgggctcagcgctcgcgcctccctcagctctctcctccgccccccttcgccctccccctttccctccctttctcctcctcctcctgccgccgcggccgctgccggacttcgccagatcagacccacggggctgccctcccctgcgcactcccctcgctgcccgggcccggagcgcagcgcggccgcacagattcacaatgttgaaagcccttttcctaactatgctgactctggcgctggtcaagtcacaggacaccgaagaaaccatcacgtacacgcaatgcactgacggatatgagtgggatcctgtgagacagcaatgcaaagatattgatgaatgtgacattgtcccagacgcttgtaaaggtggaatgaagtgtgtcaaccactatggaggatacctctgccttccgaaaacagcccagattattgtcaataatgaacagcctcagcaggaaacacaaccagcagaaggaacctcaggggcaaccaccggggttgtagctgccagcagcatggcaaccagtggagtgttgcccgggggtggttttgtggccagtgctgctgcagtcgcaggccctgaaatgcagactggccgaaataactttgtcatccggcggaacccagctgaccctcagcgcattccctccaacccttcccaccgtatccagtgtgcagcaggctacgagcaaagtgaacacaacgtgtgccaagacatagacgagtgcactgcagggacgcacaactgtagagcagaccaagtgtgcatcaatttacggggatcctttgcatgtcagtgccctcctggatatcagaagcgaggggagcagtgcgtagacatagatgaatgtaccatccctccatattgccaccaaagatgcgtgaatacaccaggctcattttattgccagtgcagtcctgggtttcaattggcagcaaacaactatacctgcgtagatataaatgaatgtgatgccagcaatcaatgtgctcagcagtgctacaacattcttggttcattcatctgtcagtgcaatcaaggatatgagctaagcagtgacaggctcaactgtgaagacattgatgaatgcagaacctcaagctacctgtgtcaatatcaatgtgtcaatgaacctgggaaattctcatgtatgtgcccccagggataccaagtggtgagaagtagaacatgtcaagatataaatgagtgtgagaccacaaatgaatgccgggaggatgaaatgtgttggaattatcatggcggcttccgttgttatccacgaaatccttgtcaagatccctacattctaacaccagagaaccgatgtgtttgcccagtctcaaatgccatgtgccgagaactgccccagtcaatagtctacaaatacatgagcatccgatctgataggtctgtgccatcagacatcttccagatacaggccacaactatttatgccaacaccatcaatacttttcggattaaatctggaaatgaaaatggagagttctacctacgacaaacaagtcctgtaagtgcaatgcttgtgctcgtgaagtcattatcaggaccaagagaacatatcgtggacctggagatgctgacagtcagcagtatagggaccttccgcacaagctctgtgttaagattgacaataatagtggggccattttcattttagtcttttctaagagtcaaccacaggcatttaagtcagccaaagaatattgttaccttaaagcactattttatttatagatatatctagtgcatctacatctctatactgtacactcacccataattcaaacaattacaccatggtataaagtgggcatttaatatgtaaagattcaaagtttgtctttattactatatgtaaattagacattaatccactaaactggtcttcttcaagagagctaagtatacactatctggtgaaacttggattctttcctataaaagtgggaccaagcaatgatgatcttctgtggtgcttaaggaaacttactagagctccactaacagtctcataaggaggcagccatcataaccattgaatagcatgcaagggtaagaatgagtttttaactgctttgtaagaaaatggaaaaggtcaataaagatatatttctttagaaaatggggatctgccatatttgtgttggtttttattttcatatccagcctaaaggtggttgtttattatatagtaataaatcattgctgtacaatatgctggtttctgtagggtatttttaattttgtcagaaattttagattgtgaatattttgtaaaaaacagtaagcaaaattttccagaattcccaaaatgaaccagatatcccctagaaaattatactattgagaaatctatggggaggatatgagaaaataaattccttctaaaccacattggaactgacctgaagaagcaaactcggaaaatataataacatccctgaattcaggacttccacaagatgcagaacaaaatggataaaaggtatttcactggagaagttttaatttctaagtaaaatttaaatcctaacacttcactaatttataactaaaatttctcatcttcgtacttgatgctcacagaggaagaaaatgatgatggtttttattcctggcatccagagtgacagtgaacttaagcaaattaccctcctacccaattctatggaatattttatacgtctccttgtttaaaatgtcactgctttactttgatgtatcatatttttaaataaaaataaatattcctttagaagatca

SEQ ID NO: 6278 - DNA, 1809 bp, Homo sapiens
  source 1..1809: mol_type = unassigned DNA
acggggctgccctcccctgcgcactcccctcgctgcccgggcccggagcgcagcgcggccgcacagattcacaatgttgaaagcccttttcctaactatgctgactctggcgctggtcaagtcacaggacaccgaagaaaccatcacgtacacgcaatgcactgacggatatgagtgggatcctgtgagacagcaatgcaaagaagattcctgacttattttattactgaccacagatattgatgaatgtgacattgtcccagacgcttgtaaaggtggaatgaagtgtgtcaaccactatggaggatacctctgccttccgaaaacagcccagattattgtcaataatgaacagcctcagcaggaaacacaaccagcagaaggaacctcaggggcaaccaccggggttgtagctgccagcagcatggcaaccagtggagtgttgcccgggggtggttttgtggccagtgctgctgcagtcgcaggccctgaaatgcagactggccgaaataactttgtcatccggcggaacccagctgaccctcagcgcattccctccaacccttcccaccgtatccagtgtgcagcaggctacgagcaaagtgaacacaacgtgtgccaagacatagacgagtgcactgcagggacgcacaactgtagagcagaccaagtgtgcatcaatttacggggatcctttgcatgtcagtgccctcctggatatcagaagcgaggggagcagtgcgtagacattgatgaatgcagaacctcaagctacctgtgtcaatatcaatgtgtcaatgaacctgggaaattctcatgtatgtgcccccagggataccaagtggtgagaagtagaacatgtcaagatataaatgagtgtgagaccacaaatgaatgccgggaggatgaaatgtgttggaattatcatggcggcttccgttgttatccacgaaatccttgtcaagatccctacattctaacaccagagaaccgatgtgtttgcccagtctcaaatgccatgtgccgagaactgccccagtcaatagtctacaaatacatgagcatccgatctgataggtctgtgccatcagacatcttccagatacaggccacaactatttatgccaacaccatcaatacttttcggattaaatctggaaatgaaaatggagagttctacctacgacaaacaagtcctgtaagtgcaatgcttgtgctcgtgaagtcattatcaggaccaagagaacatatcgtggacctggagatgctgacagtcagcagtatagggaccttccgcacaagctctgtgttaagattgacaataatagtggggccattttcattttagtcttttctaagagtcaaccacaggcatttaagtcagccaaagaatattgttaccttaaagcactattttatttatagatatatctagtgcatctacatctctatactgtacactcacccataattcaaacaattacaccatggtataaagtgggcatttaatatgtaaagattcaaagtttgtctttattactatatgtaaattagacattaatccactaaactggtcttcttcaagagagctaagtatacactatctggtgaaacttggattctttcctataaaagtgggaccaagcaatgatgatcttctgtggtgcttaaggaaacttactagagctccactaacagtctcataaggaggcagccatcataaccattgaatagcatgcaagggtaagaatgagtttttaactgctttgtaagaaaatggaaaaggtcaataaagatatatttctttag

SEQ ID NO: 6279 - DNA, 1820 bp, Homo sapiens
  source 1..1820: mol_type = unassigned DNA; mol_type = unassigned DNA
agatcagacccacggggctgccctcccctgcgcactcccctcgctgcccgggcccggagcgcagcgcggccgcacaggtatttttgctgtgctgtgcaaggaactctgctagctcaagattcacaatgttgaaagcccttttcctaactatgctgactctggcgctggtcaagtcacaggacaccgaagaaaccatcacgtacacgcaatgcactgacggatatgagtgggatcctgtgagacagcaatgcaaagatattgatgaatgtgacattgtcccagacgcttgtaaaggtggaatgaagtgtgtcaaccactatggaggatacctctgccttccgaaaacagcccagattattgtcaataatgaacagcctcagcaggaaacacaaccagcagaaggaacctcaggggcaaccaccggggttgtagctgccagcagcatggcaaccagtggagtgttgcccgggggtggttttgtggccagtgctgctgcagtcgcaggccctgaaatgcagactggccgaaataactttgtcatccggcggaacccagctgaccctcagcgcattccctccaacccttcccaccgtatccagtgtgcagcaggctacgagcaaagtgaacacaacgtgtgccaagacatagacgagtgcactgcagggacgcacaactgtagagcagaccaagtgtgcatcaatttacggggatcctttgcatgtcagtgccctcctggatatcagaagcgaggggagcagtgcgtagacatagatgaatgtaccatccctccatattgccaccaaagatgcgtgaatacaccaggctcattttattgccagtgcagtcctgggtttcaattggcagcaaacaactatacctgcgtagatataaatgaatgtgatgccagcaatcaatgtgctcagcagtgctacaacattcttggttcattcatctgtcagtgcaatcaaggatatgagctaagcagtgacaggctcaactgtgaagacattgatgaatgcagaacctcaagctacctgtgtcaatatcaatgtgtcaatgaacctgggaaattctcatgtatgtgcccccagggataccaagtggtgagaagtagaacatgtcaagatataaatgagtgtgagaccacaaatgaatgccgggaggatgaaatgtgttggaattatcatggcggcttccgttgttatccacgaaatccttgtcaagatccctacattctaacaccagagaaccgatgtgtttgcccagtctcaaatgccatgtgccgagaactgccccagtcaatagtctacaaatacatgagcatccgatctgataggtctgtgccatcagacatcttccagatacaggccacaactatttatgccaacaccatcaatacttttcggattaaatctggaaatgaaaatggagagttctacctacgacaaacaagtcctgtaagtgcaatgcttgtgctcgtgaagtcattatcaggaccaagagaacatatcgtggacctggagatgctgacagtcagcagtatagggaccttccgcacaagctctgtgttaagattgacaataatagtggggccattttcattttagtcttttctaagagtcaaccacaggcatttaagtcagccaaagaatattgttaccttaaagcactattttatttatagatatatctagtgcatctacatctctatactgtacactcacccataattcaaacaattacaccatggtataaagtgggcatttaatatgtaaagattcaaagtttgtctttattactatatgtaaattagacattaa

SEQ ID NO: 6280 - DNA, 1007 bp, Homo sapiens
  source 1..1007: mol_type = unassigned DNA; mol_type = unassigned DNA
aaataactttgtcatccggcggaacccagctgaccctcagcgcattccctccaacccttcccaccgtatccagtgtgcagcaggctacgagcaaagtgaacacaacgtgtgccaagacatagacgagtgcactgcagggacgcacaactgtagagcagaccaagtgtgcatcaatttacggggatcctttgcatgtcagtgccctcctggatatcagaagcgaggggagcagtgcgtagacattgatgaatgcagaacctcaagctacctgtgtcaatatcaatgtgtcaatgaacctgggaaattctcatgtatgtgcccccagggataccaagtggtgagaagtagaacatgtcaagatataaatgagtgtgagaccacaaatgaatgccgggaggatgaaatgtgttggaattatcatggcggcttccgttgttatccacgaaatccttgtcaagatccctacattctaacaccagagaaccgatgtgtttgcccagtctcaaatgccatgtgccgagaactgccccagtcaatagtctacaaatacatgagcatccgatctgataggtctgtgccatcagacatcttccagatacaggccacaactatttatgccaacaccatcaatacttttcggattaaatctggaaatgaaaatggagagttctacctacgacaaacaagtcctgtaagtgcaatgcttgtgctcgtgaagtcattatcaggaccaagagaacatatcgtggacctggagatgctgacagtcagcagtatagggaccttccgcacaagctctgtgttaagattgacaataatagtggggccattttcattttagtcttttctaagagtcaaccacaggcatttaagtcagccaaagaatattgttaccttaaagcactattttatttatagatatatctagtgcatctacatctctatactgtacactcacccataattcaaacaattacaccatggtataaagtgggcatttaatatgt

SEQ ID NO: 6281 - DNA, 733 bp, Homo sapiens
  source 1..733: mol_type = unassigned DNA; mol_type = unassigned DNA
gacccacggggctgccctcccctgcgcactcccctcgctgcccgggcccggagcgcagcgcggccgcacagcctgctttgtaggtgcagtataaaatgcacgctgaatgtcttttgtatgtaaacagcgtagcaggatggagtaacgtgaaatgcaattctacagcagtttttacgtctttgctgcctcgttcgttggctaccgagaagattcacaatgttgaaagcccttttcctaactatgctgactctggcgctggtcaagtcacaggacaccgaagaaaccatcacgtacacgcaatgcactgacggatatgagtgggatcctgtgagacagcaatgcaaagatattgatgaatgtgacattgtcccagacgcttgtaaaggtggaatgaagtgtgtcaaccactatggaggatacctctgccttccgaaaacagcccagattattgtcaataatgaacagcctcagcaggaaacacaaccagcagaaggaacctcaggggcaaccaccggggttgtagctgccagcagcatggcaaccagtggagtgttgcccgggggtggttttgtggccagtgctgctgcagtcgcaggccctgaaatgcagactggccgaaataactttgtcatccggcggaacccagctgaccctcagcgcattccctccaacccttcccaccgtatccagtgtgcagcaggctacgagcaaagtgaacacaacgtgtgccaag

SEQ ID NO: 6282 - DNA, 563 bp, Homo sapiens
  source 1..563: mol_type = unassigned DNA; mol_type = unassigned DNA
acggggctgccctcccctgcgcactcccctcgctgcccgggcccggagcgcagcgcggccgcacagattcacaatgttgaaagcccttttcctaactatgctgactctggcgctggtcaagtcacaggacaccgaagaaaccatcacgtacacgcaatgcactgacggatatgagtgggatcctgtgagacagcaatgcaaagaagattcctgacttattttattactgaccacagatattgatgaatgtgacattgtcccagacgcttgtaaaggtggaatgaagtgtgtcaaccactatggaggatacctctgccttccgaaaacagcccagattattgtcaataatgaacagcctcagcaggaaacacaaccagcagaaggaacctcaggggcaaccaccggggttgtagctgccagcagcatggcaaccagtggagtgttgcccgggggtggttttgtggccagtgctgctgcagtcgcaggccctgaaatgcagactggccgaaataactttgtcatccggcggaacccagctgaccctcagcgcattccctccaacc

SEQ ID NO: 6283 - DNA, 572 bp, Homo sapiens
  source 1..572: mol_type = unassigned DNA; mol_type = unassigned DNA
acttcgccagatcagacccacggggctgccctcccctgcgcactcccctcgctgcccgggcccggagcgcagcgcggccgcacaggtatttttgctgtgctgtgcaaggaactctgctagctcaagcgtagcaggatggagtaacgtgaaatgcaattctacagcagtttttacgtctttgctgcctcgttcgttggctaccgagaagattcacaatgttgaaagcccttttcctaactatgctgactctggcgctggtcaagtcacaggacaccgaagaaaccatcacgtacacgcaatgcactgacggatatgagtgggatcctgtgagacagcaatgcaaagatattgatgaatgtgacattgtcccagacgcttgtaaaggtggaatgaagtgtgtcaaccactatggaggatacctctgccttccgaaaacagcccagattattgtcaataatgaacagcctcagcaggaaacacaaccagcagaaggaacctcaggggcaaccaccggggttgtagctgccagcagcatggcaaccagtggagtgttgcccgggggtggttttgtg

SEQ ID NO: 6284 - DNA, 559 bp, Homo sapiens
  source 1..559: mol_type = unassigned DNA; mol_type = unassigned DNA
agacccacggggctgccctcccctgcgcactcccctcgctgcccgggcccggagcgcagcgcggccgcacaggtatttttgctgtgctgtgcaaggaactctgctagctcaagcgtagcaggatggagtaacgtgaaatgcaattctacagcagtttttacgtctttgctgcctcgttcgttggctaccgagaaggttcaggagggggaggggagatgagaaagcagattggaaattcacaatgttgaaagcccttttcctaactatgctgactctggcgctggtcaagtcacaggacaccgaagaaaccatcacgtacacgcaatgcactgacggatatgagtgggatcctgtgagacagcaatgcaaagatattgatgaatgtgacattgtcccagacgcttgtaaaggtggaatgaagtgtgtcaaccactatggaggatacctctgccttccgaaaacagcccagattattgtcaataatgaacagcctcagcaggaaacacaaccagcagaaggaacctcaggggcaaccaccggggttgtagctgccagcagc

SEQ ID NO: 6285 - DNA, 558 bp, Homo sapiens
  source 1..558: mol_type = unassigned DNA; mol_type = unassigned DNA
agacccacggggctgccctcccctgcgcactcccctcgctgcccgggcccggagcgcagcgcggccgcacaggtatttttgctgtgctgtgcaaggaactctgctagctcaagcctgctttgtaggtgcagtataaaatgcacgctgaatgtcttttgtatgtaaacagcgtagcaggatggagtaacgtgaaatgcaattctacagcagtttttacgtctttgctgcctcgttcgttggctaccgagaaggttcaggagggggaggggagatgagaaagcagattggaaattcacaatgttgaaagcccttttcctaactatgctgactctggcgctggtcaagtcacaggacaccgaagaaaccatcacgtacacgcaatgcactgacggatatgagtgggatcctgtgagacagcaatgcaaagatattgatgaatgtgacattgtcccagacgcttgtaaaggtggaatgaagtgtgtcaaccactatggaggatacctctgccttccgaaaacagcccagattattgtcaataatgaacagcctcagcaggaa

SEQ ID NO: 6286 - DNA, 552 bp, Homo sapiens
  source 1..552: mol_type = unassigned DNA; mol_type = unassigned DNA
atcagacccacggggctgccctcccctgcgcactcccctcgctgcccgggcccggagcgcagcgcggccgcacaggtatttttgctgtgctgtgcaaggaactctgctagctcaagcgtagcaggatggagtaacgtgaaatgcaattctacagcagtttttacgtctttgctgcctcgttcgttggctaccgagaaggttcaggagggggaggggagatgagaaagcagattggaagttgagtatggtggagcctcagcctctcccaccctcctttcctcgcttgtgctcactgctaaagttttgttactttccccgcagcagatactaaacattagtttgtcctgtattttctttgagattcacaatgttgaaagcccttttcctaactatgctgactctggcgctggtcaagtcacaggacaccgaagaaaccatcacgtacacgcaatgcactgacggatatgagtgggatcctgtgagacagcaatgcaaagatattgatgaatgtgacattgtcccagacgcttgtaaaggtggaatgaagtgtgt

SEQ ID NO: 6287 - DNA, 547 bp, Homo sapiens
  source 1..547: mol_type = unassigned DNA; mol_type = unassigned DNA
acttcgccagatcagacccacggggctgccctcccctgcgcactcccctcgctgcccgggcccggagcgcagcgcggccgcacagcctgctttgtaggtgcagtataaaatgcacgctgaatgtcttttgtatgtaaacagcgtagcaggatggagtaacgtgaaatgcaattctacagcagtttttacgtctttgctgcctcgttcgttggctaccgagaaggttcaggagggggaggggagatgagaaagcagattggaagttgagtatggtggagcctcagcctctcccaccctcctttcctcgcttgtgctcactgctaaagttttgttactttccccgcagcagatactaaacattagtttgtcctgtattttctttgagattcacaatgttgaaagcccttttcctaactatgctgactctggcgctggtcaagtcacaggacaccgaagaaaccatcacgtacacgcaatgcactgacggatatgagtgggatcctgtgagacagcaatgcaaagatattgatgaatgtgacattgtccc

SEQ ID NO: 6288 - DNA, 588 bp, Homo sapiens
  source 1..588: mol_type = unassigned DNA; mol_type = unassigned DNA
ggacttcgccagatcagacccacggggctgccctcccctgcgcactcccctcgctgcccgggcccggagcgcagcgcggccgcacagattcacaatgttgaaagcccttttcctaactatgctgactctggcgctggtcaagtcacaggacaccgaagaaaccatcacgtacacggtaaggggtgatggaatttgaaataagtacggttcagcgggattctgtgacaaaaaaagactttacacacccctgccagtgtatttgggctatactctgctgagggtgataaattaaacaacacttcattcatgcttcatatctaagattcgttgtaaattgcccccttgatcctttcaaaagttcattgggctcaccacctaagataggaaccaacatgtaatcatttgtgcagggctaaaaatgggatccgttcaaaaactaaaaccaaagaaagttacatgtttccaaaacattcaacaaattaatgggtgtaaggaactggaaaacctggactcctaccacatgcagataaaaccaatacgtgcagaataagactcaagtcaagtaagaacgttaaacaccataaagac

SEQ ID NO: 6289 - DNA, 339 bp, Homo sapiens
  source 1..339: mol_type = unassigned DNA; mol_type = unassigned DNA
agacccacggggctgccctcccctgcgcactcccctcgctgcccgggcccggagcgcagcgcggccgcacaggtatttttgctgtgctgtgcaaggaactctgctagctcaagcctgctttgtaggtgcagtataaaatgcacgctgaatgtcttttgtatgtaaacagcgtagcaggatggagtaacgtgaaatgcaattctacagcagtttttacgtctttgctgcctcgttcgttggctaccgagaagattcacaatgttgaaagcccttttcctaactatgctgactctggcgctggtcaagtcacaggacaccgaagaaaccatcacgtacacg

SEQ ID NO: 6290 - DNA, 604 bp, Homo sapiens
  source 1..604: mol_type = unassigned DNA; mol_type = unassigned DNA
agacccacggggctgccctcccctgcgcactcccctcgctgcccgggcccggagcgcagcgcggccgcacaggtatttttgctgtgctgtgcaaggaactctgctagctcaaggtgagtatactgggaaagccttaacgttctagagaacagagttttgcagccccacctccatcccccggggtgtgggactggggggcaggaaatgcaccgtcccctttgaaatggattactgttttttcctttcgaccccctctttctgcagcctgctttgtaggtgcagtataaaatgcacgctgaatgtcttttgtatgtaaacagcgtagcaggatggagtaacgtgaaatgcaattctacagcagtttttacgtctttgctgcctcgttcgttggctaccgagaaggttcaggagggggaggggagatgagaaagcagattggaagttgagtatggtggagcctcagcctctcccaccctcctttcctcgcttgtgctcactgctaaagttttgttactttccccgcagcagatactaaacattagtttgtcctgtattttctttgagattcacaatgttgaaagcccttttcctaactatgctgact

SEQ ID NO: 6291 - DNA, 1484 bp, Homo sapiens
  source 1..1484: mol_type = unassigned DNA; mol_type = unassigned DNA
atctcactcatttgttcatatattggtctctgaggtcccttctaggctctgacaactggaaactctgaaaatagacatattgatgtctttgactgttggaaaccttgcagagcaagaatttgtaaccattgcacgtcactaccgtgtgcctgagggcacatgttcagatatggatttcttaatcgcactggcccacgaaaagttcaagaaaaatatgtttgagaatttcgacactttcatttattcctgtgtgtatgaagatcgagaaaaaaaaaatgtattacccaccaaagacattaaaaggctgtgcaaatcctccagattacctttgagtgatgatcttctagaatccttattgtcaaggtttgaagacagtgaaaaacaaatagattataagtcatttttctctgccctgaactggagaaagaatccagtgcctgaattgcaaccagcatcataccttaaagagagatgtgaagatgtttggcttggtatgccatcacctattcctgcgaaatacattgactactggacctttttgaaggacgcgtttggcttagaggaggaataaccatgccagttttggtcaattctctatgatttacttctctcattttgccacatttactttagtagatataatttcattaaaaacaaaaaagaaacaaggtttatattaaatggaaatccataaaccacaattaatcctattttgtcatgttagttttacagaacatcatgttacattgccgacgtactgttactatttaaaatgccatcttaaaacatgttgaatatttttattatatgtatggtttattaataccaaaaaatcttctgataatttttgatccaacataatttgattcattactatatgaacagaaaatgacttttgaaggttatacatgacaatacaaaatcaaattatatcacagcaataagttgtgattctattaaacatttttgaaacctttttgacacgtttattacttacataattaagttttgtagcaacccacctcatcaaaataattcttaaacctctctagagtaaatatatttatcttttgaacttagtaaagctatgggaagaaaaagaacctccaacacacacacacacacacacacacacgcacgtgcacacacactggaaacatatgcagtatttatatttgtaatgcccttttttctatctaaagtcagcttgttagcttaggaatatatgcatgtgtgtataattatagtttgaccaaaactttattatgtctaaaatatttacaaatgtgaaagctgaagattttgagatttttgttttttttttggtttgttttacacacacatcccacgcgccccaccctagaggtttaaatattcagaaactacaacatttttcccctgcatttttctagttctatttttatttttcttcagcagaactcttgtcatgtagtgtacatttgattaaaacccatagccatgta

SEQ ID NO: 6292 - DNA, 2464 bp, Homo sapiens
  source 1..2464: mol_type = unassigned DNA; mol_type = unassigned DNA
gggggccaaacaacacggccgggaggcgccgctgcctgccgggccctctcttctgggaccctggattttcggacactgagcgccatggccctgcctctgctgccgggcaacagcttcaaccgcaacgtgggaaaggagaagtttcacaaatcccaacattggggcttttgcaacaatgttatgatgttggtgagtgatgaaaagcctggaataggtggagaaccacttctggggcaaaagataaagcctaaatgtagcatatatcctaaaggagatggaagtgatgtaccatcatgggtagcctttgataaacaggtattatcttttgatgcctatttggaagaggaagtacttgataaaagccaaaccaactacagaataagatactataaaatctacttctaccctgaagatgacacaattcaagtaaatgaaccagaggtgaaaaatagtggattacttcaagggacttctatccggcgtcatcggattactcttccgcctcctgatgaggatcagttttatactgtgtatcattttaatgtcggcacagaggttgtcttctatggccggacattcaagatttatgactgtgatgcattcacaagaaactttttgaggaaaataggggtcaaagtgaatcccccagtgcaatgtccagaagatccttacatgaagattcggagagaggttgtagaacacgtagagcccttacgtccctacgaatccctcgacaccctgaaacagttcctccagtatcatggcaagattttgtgtttcttctgcctgtgggatgactcagtctcaatgtttggagaccgtagagaactcatcctgcattacttcttgtgtgatgatactattgaaatcaaagaattgcttccacacagctcaggccgagatgctctaaaaatgttcctccggaggagtaagctacccaagaattgcccacctagagtctatcaaccaggccagataacagatcgagcagttctcaattcatatggtgactttataaagaaccaagcggatggctacctgttcgatagatataagctaggaaaagtagaccaagagttttacaaagatagtgacctgtccctaggagtcaccatcaatgtgtggggaagaaaagtgctcctttatgactgtgatgaatttacgaagtcttattataagtctaaatatggaattgagaactttacctcagtttcatgcaagcctccttctcctcctccaaaaatagaaaggaaatttccaccttacaacggttttggttctgaagaggattctctccgtaactgcatagacctcaagcccacacctcatcggaggaacttcaagaagtttatggaaaaagacagctatggctccaaaagcaatatactccgtttttttgcaaaactagtcacagacaaatgtgttgacttggacaggatgtttgttatttcatattatctcggtgatgacaccatttcagtgtttgaacctatagagaggaattcaggaattgctggtgggatgttcttgaaaagaagtcgcgttaagaagcctggacaagaagtctttaaaagtgaactatctgaatatatcaaggccgaggagctgtacattggagtcacggtgaatgtgaatggttacctatttcgtttgctcaatgctgatgagtataccttaaactacatggagcagaatacagataagtatcctttcagtaacctcaaacttgccctacaaaagctgaagcaagaagaaggaaaatccagagagctcaagcaggtatttaaagctgctgactctaagcacacaaatatggtggattataatacattcagagacatattgatgtctttgactgttggaaaccttgcagagcaagaatttgtaaccattgcacgtcactaccgtgtgcctgagggcacatgttcagatatggatttcttaatcgcactggcccacgaaaagttcaagaaaaatatgtttgagaatttcgacactttcatttattcctgtgtgtatgaagatcgagaaaaaaaaaatgtattacccaccaaagacattaaaaggctgtgcaaatcctccagattacctttgagtgatgatcttctagaatccttattgtcaaggtttgaagacagtgaaaaacaaatagattataagtcatttttctctgccctgaactggagaaagaatccagtgcctgaattgcaaccagcatcataccttaaagagagatgtgaagatgtttggcttggtatgccatcacctattcctgcgaaatacattgactactggacctttttgaaggacgcgtttggcttagaggaggaataaccatgccagttttggtcaattctctatgatttacttctctcattttgccacatttactttagtagatataatttcattaaaaacaaaaaagaaacaaggtttatattaaatggaaatccataaaccacaa

SEQ ID NO: 6293 - DNA, 1156 bp, Homo sapiens
  source 1..1156: mol_type = unassigned DNA; mol_type = unassigned DNA
gctaagtgcaggcggataccccggccttggcggctgcttgcctttctccgtactgtccctgtgaaggccaagatctgtaacgctgacagtccccagacatacgatgggagagttgcagtatgacgctgggcgggatggcttcatcgacctgatggagctgaagctgatgatggagaagctgggggccccccagacccacctgggcctgaagagcatgatcaaggaggtggatgaggacttcgatggcaagctcagcttccgggagttcctgctcattttccacaaggccgcggcaggggagctgcaggaggacagtgggctgatggcgctggcaaagctttctgagatcgatgtggccctggagggtgtcaaaggtgccaagaacttctttgaagccaaggtccaagccttgtcatcggccagtaagtttgaagcagagttgaaagctgagcaagatgagcggaagcgggaggaggaggagaggcggctccgccaggcagccttccagaaactcaaggccaacttcaatacatagtcctgctgaccttgccctctgcccacagctgtgcctcacagatgccccgagaagagatgactaggcatcttcatcactgctgtcggtcccctccctgagccagcatctccatccaccaccccgtgccagctcccgtgccagccttcattcctcccagtgtccaagcccctccaggagggtcctggggtgggccagatgcctgcccacctctgtctcctgcctctgctcctctgcccttcttatagccagaacttgtatcttctcagcaaccttcactttgtccttgtccctttaccattccccatcaaagagtagtctgctatatcaatttgtgtagatatgtctgtctttttgggtcctcagagaaaatgcccattttctcggagaattctctgcactcctctctgcttcacattcaacttccctgttctcatctttggtaggattctgccagttgcttttgcatcttctgttcctgggtaatggtgggtcttaatggaggctgggtggaccactgcccgtccactcttcaacaggaggaacagcatgccaccatagtaacacacattagagaaaggacagaggtctgctccttcctgccacctttctcctggcccctta

SEQ ID NO: 6294 - DNA, 2259 bp, Homo sapiens
  source 1..2259: mol_type = unassigned DNA; mol_type = unassigned DNA
cccagcctgtcccgggccgcgagcgcttccagtcgggttacttctgggggacaagaaaggcaccgtctgaacggtcgagacgctttttcccgctacggttttccccggagctgacaggggcagcaaggtcggagttgatccgagggtccctgcctggtcccggggggacggtcagcctcccgcccggagccgcggggagaggaagcaggtcggggtctccgggacgcgcagacacccagacaccggcggcctcctcccaccaggctggcagtcgctgagccctggcgcctccttaaagccgcagctccgccccgaccgccccgcccgccagtccgtcctcagaccctcccaaccgccgggtccccgccgcctcggcggagtgttgtagagcctcgagcctgcgaggagcgcgccgcccgccagctccctgcgtcccgtcccgcgtccccgcgttcccgcgtcctgcgatccgccgccatggccagtgaggagctggcgtgcaagctggagcgccggctgcggcgcgaggaggccgaggagagtggcccccagctggctcccctcggcgccccagccccggagcccaagcccgagcccgagcctcccgcccgtgcgcccacggccagcgccgacgcggagctgagcgcccagctgagccggcggctggacatcaacgagggcgctgcgcggccccggcgctgcagggtcttcaacccctacacggagttcccggagttcagccgccgcctcatcaaggacctggagagcatgttcaaactgtatgacgctgggcgggatggcttcatcgacctgatggagctgaagctgatgatggagaagctgggggccccccagacccacctgggcctgaagagcatgatcaaggaggtggatgaggacttcgatggcaagctcagcttccgggagttcctgctcattttccacaaggccgcggcaggggagctgcaggaggacagtgggctgatggcgctggcaaagctttctgagatcgatgtggccctggagggtgtcaaaggtgccaagaacttctttgaagccaaggtccaagccttgtcatcggccagtaagtttgaagcagagttgaaagctgagcaagatgagcggaagcgggaggaggaggagaggcggctccgccaggcagccttccagaaactcaaggccaacttcaatacatagtcctgctgaccttgccctctgcccacagctgtgcctcacagatgccccgagaagagatgactaggcatcttcatcactgctgtcggtcccctccctgagccagcatctccatccaccaccccgtgccagctcccgtgccagccttcattcctcccagtgtccaagcccctccaggagggtcctggggtgggccagatgcctgcccacctctgtctcctgcctctgctcctctgcccttcttatagccagaacttgtatcttctcagcaaccttcactttgtccttgtccctttaccattccccatcaaagagtagtctgctatatcaatttgtgtagatatgtctgtctttttgggtcctcagagaaaatgcccattttctcggagaattctctgcactcctctctgcttcacattcaacttccctgttctcatctttggtaggattctgccagttgcttttgcatcttctgttcctgggtaatggtgggtcttaatggaggctgggtggaccactgcccgtccactcttcaacaggaggaacagcatgccaccatagtaacacacattagagaaaggacagaggtctgctccttcctgccacctttctcctggccccttagcattcccccagtccctccctcttcaccttgctccgtctatgtcttcccagctcagccttttccccactcttaaatactgtactacttcactgtaagaacgaaagaatagttaggataccaatgagtaaaagggttcctgttcactctgactctgtgcaaattgtattacagtagaccgctgacgttcccaagtgacagatccagggcctttcaaacatccccaaagtcatggccatactcaccattagccagtttctaacatctgtttcagggtatccagctgtagatgttcttatcccccatacttgtgagttcttggggttgctcacaaatactaggggtttttgttgtatttttaacaaatatatcctaatgtcatatttattctcttttgtaactgctgtctttacaataaagaaatcatctgcctttctatctta

SEQ ID NO: 6295 - DNA, 843 bp, Homo sapiens
  source 1..843: mol_type = unassigned DNA; mol_type = unassigned DNA
ggagctggcgtgcaagctggagcgccggctgcggcgcgaggaggccgaggagagtggcccccagctggctcccctcggcgccccagccccggagcccaagcccgagcccgagcctcccgcccgtgcgcccacggccagcgccgacgcggagctgagcgcccagctgagccggcggctggacatcaacgagggcgctgcgcggccccggcgctgcagggtcttcaacccctacacggagttcccggagttcagccgccgcctcatcaaggacctggagagcatgttcaaactaatctgaaacggtgatgtcatggatgtcctgccagtgccagagtcccgcgttaccaagacaccagtgaaacccaaaaaggtatgacgctgggcgggatggcttcatcgacctgatggagctgaagctgatgatggagaagctgggggccccccagacccacctgggcctgaagagcatgatcaaggaggtggatgaggacttcgatggcaagctcagcttccgggagttcctgctcattttccacaaggccgcggcaggggagctgcaggaggacagtgggctgatggcgctggcaaagctttctgagatcgatgtggccctggagggtgtcaaaggtgccaagaacttctttgaagccaaggtccaagccttgtcatcggccagtaagtttgaagcagagttgaaagctgagcaagatgagcggaagcgggaggaggaggagaggcggctccgccaggcagccttccagaaactcaaggccaacttcaatacatagtcctgctgaccttgccctctgcccacagctgtgcctcacagatgccccgagaaga

SEQ ID NO: 6296 - DNA, 1817 bp, Homo sapiens
  source 1..1817: mol_type = unassigned DNA; mol_type = unassigned DNA
actctacagcgtgtatccgtggctgtaacgtgagctggtggagcagtcaaggttagacaggaaattttaattaccctggacttatctggaggcctctttcaaagggaggcaatgagggcagccacttaaaggcaggaccccaatgcaacatcttaaaatgcagccgcaaggtttttgcagcatactaaaagcttgtgttttaattccccaaagagagggtgggaagaggaacatttggctatgggaaagttgtctttttcttaagaatctgaaacggtgatgtcatggatgtcctgccagtgccagagtcccgcgttaccaagacaccagtgaaacccaaaaaggtatgacgctgggcgggatggcttcatcgacctgatggagctgaagctgatgatggagaagctgggggccccccagacccacctgggcctgaagagcatgatcaaggaggtggatgaggacttcgatggcaagctcagcttccgggagttcctgctcattttccacaaggccgcggcaggggagctgcaggaggacagtgggctgatggcgctggcaaagctttctgagatcgatgtggccctggagggtgtcaaaggtgccaagaacttctttgaagccaaggtccaagccttgtcatcggccagtaagtttgaagcagagttgaaagctgagcaagatgagcggaagcgggaggaggaggagaggcggctccgccaggcagccttccagaaactcaaggccaacttcaatacatagtcctgctgaccttgccctctgcccacagctgtgcctcacagatgccccgagaagagatgactaggcatcttcatcactgctgtcggtcccctccctgagccagcatctccatccaccaccccgtgccagctcccgtgccagccttcattcctcccagtgtccaagcccctccaggagggtcctggggtgggccagatgcctgcccacctctgtctcctgcctctgctcctctgcccttcttatagccagaacttgtatcttctcagcaaccttcactttgtccttgtccctttaccattccccatcaaagagtagtctgctatatcaatttgtgtagatatgtctgtctttttgggtcctcagagaaaatgcccattttctcggagaattctctgcactcctctctgcttcacattcaacttccctgttctcatctttggtaggattctgccagttgcttttgcatcttctgttcctgggtaatggtgggtcttaatggaggctgggtggaccactgcccgtccactcttcaacaggaggaacagcatgccaccatagtaacacacattagagaaaggacagaggtctgctccttcctgccacctttctcctggccccttagcattcccccagtccctccctcttcaccttgctccgtctatgtcttcccagctcagccttttccccactcttaaatactgtactacttcactgtaagaacgaaagaatagttaggataccaatgagtaaaagggttcctgttcactctgactctgtgcaaattgtattacagtagaccgctgacgttcccaagtgacagatccagggcctttcaaacatccccaaagtcatggccatactcaccattagccagtttctaacatctgtttcagggtatccagctgtagatgttcttatcccccatacttgtgagttcttggggttgctcacaaatactaggggtttttgttgtatttttaacaaatatatcctaatgtcatatttattctcttttgtaactgctgtctttacaataaagaaatcatctgcctttc

SEQ ID NO: 6297 - DNA, 541 bp, Homo sapiens
  source 1..541: mol_type = unassigned DNA; mol_type = unassigned DNA
gattacaggcgtgcaccaccatgcccagctaatttttgtatttttagtagaaacagggtttcaccatgtttgccaggctggtctacgaactcttgacctcaggtgatccgcccgcctcggcctcctgaagtgctggaattacaggcatgagccaccacgcctggctggatataccccgtttcgtttctcctttcatctgtccgcagacacccgcgttgtttccaccttttggctgttgtaaactgatttgtttttagagcaaggtatgacgctgggcgggatggcttcatcgacctgatggagctgaagctgatgatggagaagctgggggccccccagacccacctgggcctgaagagcatgatcaaggaggtggatgaggacttcgatggcaagctcagcttccgggagttcctgctcattttccacaaggccgcggcaggggagctgcaggaggacagtgggctgatggcgctggcaaagctttctgagatcgatgtggccctggagggtgtcaaaggtgccaagaacttctttgaag

SEQ ID NO: 6298 - DNA, 1538 bp, Homo sapiens
  source 1..1538: mol_type = unassigned DNA; mol_type = unassigned DNA
aggaattacatgtttcggagactaacgagtgtcctttcatcccggtcatgcattcctttgaccctgcaggtatgacgctgggcgggatggcttcatcgacctgatggagctgaagctgatgatggagaagctgggggccccccagacccacctgggcctgaagagcatgatcaaggaggtggatgaggacttcgatggcaagctcagcttccgggagttcctgctcattttccacaaggccgcggcaggggagctgcaggaggacagtgggctgatggcgctggcaaagctttctgagatcgatgtggccctggagggtgtcaaaggtgccaagaacttctttgaagccaaggtccaagccttgtcatcggccagtaagtttgaagcagagttgaaagctgagcaagatgagcggaagcgggaggaggaggagaggcggctccgccaggcagccttccagaaactcaaggccaacttcaatacatagtcctgctgaccttgccctctgcccacagctgtgcctcacagatgccccgagaagagatgactaggcatcttcatcactgctgtcggtcccctccctgagccagcatctccatccaccaccccgtgccagctcccgtgccagccttcattcctcccagtgtccaagcccctccaggagggtcctggggtgggccagatgcctgcccacctctgtctcctgcctctgctcctctgcccttcttatagccagaacttgtatcttctcagcaaccttcactttgtccttgtccctttaccattccccatcaaagagtagtctgctatatcaatttgtgtagatatgtctgtctttttgggtcctcagagaaaatgcccattttctcggagaattctctgcactcctctctgcttcacattcaacttccctgttctcatctttggtaggattctgccagttgcttttgcatcttctgttcctgggtaatggtgggtcttaatggaggctgggtggaccactgcccgtccactcttcaacaggaggaacagcatgccaccatagtaacacacattagagaaaggacagaggtctgctccttcctgccacctttctcctggccccttagcattcccccagtccctccctcttcaccttgctccgtctatgtcttcccagctcagccttttccccactcttaaatactgtactacttcactgtaagaacgaaagaatagttaggataccaatgagtaaaagggttcctgttcactctgactctgtgcaaattgtattacagtagaccgctgacgttcccaagtgacagatccagggcctttcaaacatccccaaagtcatggccatactcaccattagccagtttctaacatctgtttcagggtatccagctgtagatgttcttatcccccatacttgtgagttcttggggttgctcacaaatactaggggtttttgttgtatttttaacaaatatatcctaatgtcatatttattctcttttgtaactgctgtctttacaataaagaaatcatctgcc

SEQ ID NO: 6299 - DNA, 1490 bp, Homo sapiens
  source 1..1490: mol_type = unassigned DNA; mol_type = unassigned DNA
atgtttcggaggtatgacgctgggcgggatggcttcatcgacctgatggagctgaagctgatgatggagaagctgggggccccccagacccacctgggcctgaagagcatgatcaaggaggtggatgaggacttcgatggcaagctcagcttccgggagttcctgctcattttccacaaggccgcggcaggggagctgcaggaggacagtgggctgatggcgctggcaaagctttctgagatcgatgtggccctggagggtgtcaaaggtgccaagaacttctttgaagccaaggtccaagccttgtcatcggccagtaagtttgaagcagagttgaaagctgagcaagatgagcggaagcgggaggaggaggagaggcggctccgccaggcagccttccagaaactcaaggccaacttcaatacatagtcctgctgaccttgccctctgcccacagctgtgcctcacagatgccccgagaagagatgactaggcatcttcatcactgctgtcggtcccctccctgagccagcatctccatccaccaccccgtgccagctcccgtgccagccttcattcctcccagtgtccaagcccctccaggagggtcctggggtgggccagatgcctgcccacctctgtctcctgcctctgctcctctgcccttcttatagccagaacttgtatcttctcagcaaccttcactttgtccttgtccctttaccattccccatcaaagagtagtctgctatatcaatttgtgtagatatgtctgtctttttgggtcctcagagaaaatgcccattttctcggagaattctctgcactcctctctgcttcacattcaacttccctgttctcatctttggtaggattctgccagttgcttttgcatcttctgttcctgggtaatggtgggtcttaatggaggctgggtggaccactgcccgtccactcttcaacaggaggaacagcatgccaccatagtaacacacattagagaaaggacagaggtctgctccttcctgccacctttctcctggccccttagcattcccccagtccctccctcttcaccttgctccgtctatgtcttcccagctcagccttttccccactcttaaatactgtactacttcactgtaagaacgaaagaatagttaggataccaatgagtaaaagggttcctgttcactctgactctgtgcaaattgtattacagtagaccgctgacgttcccaagtgacagatccagggcctttcaaacatccccaaagtcatggccatactcaccattagccagtttctaacatctgtttcagggtatccagctgtagatgttcttatcccccatacttgtgagttcttggggttgctcacaaatactaggggtttttgttgtatttttaacaaatatatcctaatgtcatatttattctcttttgtaactgctgtctttacaataaagaaatcatctgcctttctatctt

SEQ ID NO: 6300 - DNA, 2419 bp, Homo sapiens
  source 1..2419: mol_type = unassigned DNA; mol_type = unassigned DNA
aggaagaggaagagcgcggccggcggcgctgcgctgagagcaggggcccggccaaggcgagtgccgcgcgggccaccatggccacggacgagctggccaccaagctgagccggcggctgcagatggagggcgagggcggcggcgagaccccggagcagcccgggctgaacggggcagcggcggcggcggcgggggcacccgacgaggcggccgaggcgctgggcagcgcggactgcgagctgagcgccaagctgctgcggcgcgcagacctcaaccagggcatcggcgagccccagtcgcccagccgccgcgtcttcaacccctacaccgagttcaaggagttctccaggaagcagatcaaggacatggagaagatgttcaagcagtatgatgccgggcgggacggcttcatcgacctgatggagctaaaactcatgatggagaaacttggggcccctcagacccacctgggcctgaaaaacatgatcaaggaggtggatgaggactttgacagcaagctgagcttccgggagttcctcctgatcttccgcaaggcggcggccggggagcttcaggaggacagcgggctgtgcgtgctggcccgcctctctgagatcgacgtctccagtgagggtgtcaagggggccaagagcttctttgaggccaaggtccaggccatcaacgtgtccagccgcttcgaggaggagatcaaggcagagcaggaggaaaggaagaagcaggcggaggagatgaagcagcggaaagcggccttcaaggagctgcagtccacctttaagtagcgggggctgcagccgaccgccctgctccggccccagtgtggtgggcgagggtggcgcatgggaggccgagcctgaatccttgcctgtgtctgacgggaccactactaaaaacctaaaaatatctgtgaatggagcaagttcaggggtcttatggaggtggcccggcccctccccgctcccttccactctgcacgaggccgccacaccggcgctggctccctgcccggcccggccctccctggcaatccctgggctctcttgcacccctaactgccccctgcctgctccggcactgccccaggcccagctcctggccctaggtccctcccagccccatgtgcctgccgcctgccctccacacatccctgtccccccaacccgggaacccctgccctcctccagcaggccgcaccgcccctggggccccctgccagccccttcccaggctgggagacggcagaagagatagaatcagggctgcccccacagagtgggacccaaggggctaattggaggcacgaggggacccctccccagggccttttcctcctctgcgtcttccatctactgaaatgggagagggggtggggagcttctgttctggtgaagggacccgggcaggcccccagcaccccatgctgacttggagaaccccagatctctggggcccagccaggcagggtgtgggggcagctgtgccaatctacctcacaggcccaccccctgccgggcatgccgtgggatcatgggcagggaaggctctgggggtcggagacaccgctgcttagcacccccagccagaacaccctgagggtctcggggctctggagagagtggggcgggaggaagaattggcaccttcctagggaaggagacgagcgcttcgccttgattctccgagaagcctccgagaagtgctttaagtgtgtttgcatgcgccaggcggtgggcagcgggggcctgtccagccctctcccgccatccttccccaagtgacgtccactgccttgtcaccagcgacctgcctgtcatgcccaccccctgaggaagcatggggaccctaacaccctggtgccctgcaccagacaggccgtggtcaggcccaggccaccggccgggttctgccacagcttcccacgtgcttgctgacatgcgtgtgcctgtgtgtggtgtctgttgctgtgtcgtgaaactgtgaccatcactcagtccaaacaagtgagtggccctcgaggccacagttatgcaactttcagtgtgtgtcataacgacgtcactgctttttaaactcgataactctttattttagtaaaatgcccaggagtcctggaagctacgcggacttgcagaggttttattttttggccttagaatctgcagaaattaggaggcaccgagcccagcgcagcagcctcggacccggattgcgtttgccttagcggatatgtttatacagatgaatataaaatgtttttttctttgggctttttgcttcttttttcccccccttctcaccttcccttctccccgaccccaccccccaaaaaagctacttcttcattccgtggtacgattattttttttaactaaaggaagataaaattctatattcttatgtg

SEQ ID NO: 6301 - DNA, 899 bp, Homo sapiens
  source 1..899: mol_type = unassigned DNA; mol_type = unassigned DNA
gaagatgttcaagcagtatgatgccgggcgggacggcttcatcgacctgatggagctaaaactcatgatggagaaacttggggcccctcagacccacctgggcctgaaaaacatgatcaaggaggtggatgaggactttgacagcaagctgagcttccgggagttcctcctgatcttccgcaaggcggcggccggggagcttcaggaggacagcgggctgtgcgtgctggcccgcctctctgagatcgacgtctccagtgagggtgtcaagggggccaagagcttctttgaggccaagtggaactgggtgtgccgctgggctccccggacaggaagcagaggatcaggatggcagcagcttgagcgactcccttcgagcgcccttgctttgcagcagccacagaatataggtccaggccatcaacgtgtccagccgcttcgaggaggagatcaaggcagagcaggaggaaaggaagaagcaggcggaggagatgaagcagcggaaagcggccttcaaggagctgcagtccacctttaagtagcgggggctgcagccgaccgccctgctccggccccagtgtggtgggcgagggtggcgcatgggaggccgagcctgaatccttgcctgtgtctgacgggaccactactaaaaacctaaaaatatctgtgaatggagcaagttcaggggtcttatggaggtggcccggcccctccccgctcccttccactctgcacgaggccgccacaccggcgctggctccctgcccggcccggccctccctggcaatccctgggctctcttgcacccctaactgccccctgcctgctccggcactgccccaggcccagctcctggccctaggtccctcccagccccatgtgcctgccgcctgccctcc

SEQ ID NO: 6302 - DNA, 349 bp, Homo sapiens
  source 1..349: mol_type = unassigned DNA; mol_type = unassigned DNA
gagaagggagtagacaactgttcctgagggaaatctgggaagggttcatggagctgattccagaggggtgactaccatattgatgtctgtatcaatgactacctggatgttttctgccctcactatgaggactccgtcccagaagataagactgagcgctatgtcctctacatggtgaactttgatggctacagtgcctgcgaccacacttccaaagggttcaagagatgggaatgtaaccggcctcactctccaaatggaccgctgaagttctctgaaaaattccagctcttcactcccttttctctaggatttgaattcaggccaggccgagaatatttctacatct

SEQ ID NO: 6303 - DNA, 4933 bp, Homo sapiens
  source 1..4933: mol_type = unassigned DNA; mol_type = unassigned DNA
aacagattccagaggggtgactaccatattgatgtctgtatcaatgactacctggatgttttctgccctcactatgaggactccgtcccagaagataagactgagcgctatgtcctctacatggtgaactttgatggctacagtgcctgcgaccacacttccaaagggttcaagagatgggaatgtaaccggcctcactctccaaatggaccgctgaagttctctgaaaaattccagctcttcactcccttttctctaggatttgaattcaggccaggccgagaatatttctacatctcctctgcaatcccagataatggaagaaggtcctgtctaaagctcaaagtctttgtgagaccaacaaatagctgtatgaaaactataggtgttcatgatcgtgttttcgatgttaacgacaaagtagaaaattcattagaaccagcagatgacaccgtacatgagtcagccgagccatcccgcggcgagaacgcggcacaaacaccaaggatacccagccgccttttggcaatcctactgttcctcctggcgatgcttttgacattatagcacagtctcctcccatcacttgtcacagaaaacatcagggtcttggaacaccagagatccacctaactgctcatcctaagaagggacttgttattgggttttggcagatgtcagatttttgttttctttctttcagcctgaattctaagcaacaacttcaggttgggggcctaaacttgttcctgcctccctcaccccaccccgccccacccccagccctggcccttggcttctctcacccctcccaaattaaatggactccagatgaaaatgccaaattgtcatagtgacaccagtggttcgtcagctcctgtgcattctcctctaagaactcacctccgttagcgcactgtgtcagcgggctatggacaaggaagaatagtggcagatgcagccagcgctggctagggctgggagggttttgctctcctatgcaatatttatgccttctcattcagaactgtaagatgatcgcgcagggcatcatgtcaccatgtcaggtccggaggggaggtattaagaatagatacgatattacaccatttcctataggagtatgtaaatgaacaggcttctaaaaggttgagacactggtttttttttttaatatgactgtcttaaagcattcttgacagcaaaacttgtgctctctaaaagaagccttttttttttttctaggaggcaggttgggtgtggaatgctaatacagagcaggtgtgaaaacagagaaaactacaggtttgctgggggtgtgtatgtgtgagtgcctctaatttttttggtgactgggcagtgcacaccagatattttttctttgaatacagatcaccatggtgctacaactttttttttttttttttttttttttttttttttttttaagaaactcaaagaggcatttttatgaataaagtgaccttccccaaggctgacaagccagggttgatgagtgcatagtggaatagctttggatactcctctgggggatgacatgtaccaaggagaggaccgcagtggccagaggagacatgatttggctttgctggagcgccagtgtgctgtggcctttccccgcctcccaccctagtacccacgttttgctccacactccttgaccgcaggggctcggacacaaacccctgtcaccaggagagtcagtcagcactacttgggagggctaaagggaaatttggaaataaaattccaaagtttggagtaaaaaaattcaagtgttgattttatattctttccctttctgacacagcctaaagcgtagggggaacatgtgtttatctgtgggagataaacaagatggagtcccaaagactttaacaaaatatttttttaaaaatccactagaatagaaaatacattatttagatatactttatgctgagagtgagtatatatgcttgtcctatttaaacttgtgagaaaaagtggtatcccttgatacatttagaaatatgggggctatcttgtttcattgtgggggtggggcagaaggagaataaatgcaggatgaccctgttgaaggaatcttagcatggccaacaggggacgtttccagtcgattaccaggaaatgcaagccttggggtttctactggtggtggggctgtcatgaactttaaaatccaaagcctagacaaggaaaagtgttagaccaattgaaaagcaatccagccctttttttttttttttttttggctttgcacgacatgtcaacagaaaccatgcctttcaatataagaaataaatgtgatgatcatgtaaaatgtgaaaaattgaaagcattccagcaaaataagaattttttatatatttgttttttaagatgtatatgttaaaaaaagagaaggtcgcattatggacagacttcgtgaatgggaatttgcttagaattgtgagtagttctgaattagaaaagtatgtgaaggaaaggcagctgtaaacgtattgtgccctggagagttgtacacatgttgaaatgtaatctgggcttacctgatccatttggagtggatgtcactgccgagtctgttctcacatggaaccatgtgtgtggggttgccagcctcacagatacaatcaatcctattcccctctgacataaggaactcctctggagtggcagagtcttatcacagaaggcagccaccatttcaccaaaacaaaagttcacggcattcaattcctttttcctttagctatttatatatgcagtactctcagtcatatgcagaaatacttttttttttttaattaatagttacaggcttgttggtccagtgggatttgggtagggggagaaagataccttctaaaatggatcaatagaaccaaaataatacagcatgttctataaccacaaggaaatcaaatgatcctgtcatgattccagttagtcataactatgttagcagtgctaaatgcattttagaaatggtgacttctgtggttttcctagcatttgtctctaacaaatggtgaaataattactcatggccctctctgccattgtctttcattttttcacagtgaaattagacccctttacttcaccattctgccactgcaaattaagtataaagaaaatagcaagagtgtccacaccagtagacagtaagcttctctacctgtaagtgatgaaatcatagctaatgcacttgccatggagttttcaagatgattggtgtcagacagttttcactttgtttaaaaagtgttggtggccttttgtggtggtgttacaatcctctgggggcttaggaggatgttgatgcaacttttagaagcttttaatttcaaaaacaactcaaaaatctgaaggacagtcatagctgccactcagccccagttagtcaaaccccagtgacctttgcccctggttgccaagggctttgcaacatcaagcagggaaataaggatctgtctgtttagtggataccgtgtatcctttaatagaccaggtaacagttcgtgttagtttagactattgttttgtactgtactttcttgggtggcagaggaaagaaaagtaaaacattaaaaaaaaaaaaaaaactgcgttctttaaattctgtattattagcaacctctgttgtacatagtgtttgataataaagtattaatttgattcttatgtcttttgtaagtgagaacaatagactttcaggatacaaaacatgcattgaggctttgaaacatccaatgtgtaccatggctgaaaaaaagagtcacaagtggctgagacactgctccatacaggactcatgtgtggtcattgcccacccaatcttatgactccatcatcttgggacctggaacaacatgacttttttgatcgatattttgtcctcggtgttttcaaggtctgatgttggagccctgtggcccaccctcccttctccaccagcatgttggtttgaaaaggatagggaatttagaaacagttctgtactttggtttggtttggttttctgtttgtgattgttttcatggactgttttattttttcccaggaagagtctttatcaatatcatgtgcagctcactcatggaaatggttgcaaaccaatcagtgtaggaagcttaaatggggctgtttccctctctgtgtcgttgtgaaaggaagagtcacacagtacctgtggattttcagggactctgtttttctccggtgccttagcaacggcagcagccatttgtattattttcaaataattagaaaaacagttttcaactcctcctttccattcattgctctcagagttgtggtcactgacttttcttttgaaaaccgcctccaccaacacccccgtttgcctacaccaccccccttttacttagtatgtttattttttgtgtgtctcttgccttcctcccacgttttatttcccctcagagctgtgaatgggcaggtctgtctctggtttggcatcactgagtttttcccatgcattggccccagggctgctaggatgtgagacaaatctccctacaatgggcttgctcccattgtctgtacagtttaatagatgctggcatgtcggaggttacccatgagtcaaaatccgctctccatgcttactcttgacaccccattgaagccactcattgtgtgtgcgtctgggtgtgaagtccagctccgtgtggtcctgtgcttgtactgccctgctttgcagttcctttgcacttactcatcgagtgctgttttgaaatgctgacattatataaacgtaaaagaaaatgtaaaaaaaaaaaacccacacacaaacaaacccatacgatctgtatttgtatatacacgtgtccgtacaagtataactaaataaaaattaaagattttcatcattttaattgga

SEQ ID NO: 6304 - DNA, 5335 bp, Homo sapiens
  source 1..5335: mol_type = unassigned DNA; mol_type = unassigned DNA
gcttctctccatcttgtgattcctttttcctcctgaaccctccagtgggggtgcgagtttgtctttatcaccccccatcccaccgccttcttttcttctcgctctcctacccctccccagcttggtgggcgcctctttcctttctcgcccactttcatttttatttattcatatttatttggcgcccgctctctctctgtccctttgcctgcctccctccctccggatccccgctctctccccggagtggcgcgtcgggggctccgccgctggccaggcgtgatgttgcacgtggagatgttgacgctggtgtttctggtgctctggatgtgtgtgttcagccaggacccgggctccaaggccgtcgccgaccgctacgctgtctactggaacagcagcaaccccagattccagaggggtgactaccatattgatgtctgtatcaatgactacctggatgttttctgccctcactatgaggactccgtcccagaagataagactgagcgctatgtcctctacatggtgaactttgatggctacagtgcctgcgaccacacttccaaagggttcaagagatgggaatgtaaccggcctcactctccaaatggaccgctgaagttctctgaaaaattccagctcttcactcccttttctctaggatttgaattcaggccaggccgagaatatttctacatctcctctgcaatcccagataatggaagaaggtcctgtctaaagctcaaagtctttgtgagaccaacaaatagctgtatgaaaactataggtgttcatgatcgtgttttcgatgttaacgacaaagtagaaaattcattagaaccagcagatgacaccgtacatgagtcagccgagccatcccgcggcgagaacgcggcacaaacaccaaggatacccagccgccttttggcaatcctactgttcctcctggcgatgcttttgacattatagcacagtctcctcccatcacttgtcacagaaaacatcagggtcttggaacaccagagatccacctaactgctcatcctaagaagggacttgttattgggttttggcagatgtcagatttttgttttctttctttcagcctgaattctaagcaacaacttcaggttgggggcctaaacttgttcctgcctccctcaccccaccccgccccacccccagccctggcccttggcttctctcacccctcccaaattaaatggactccagatgaaaatgccaaattgtcatagtgacaccagtggttcgtcagctcctgtgcattctcctctaagaactcacctccgttagcgcactgtgtcagcgggctatggacaaggaagaatagtggcagatgcagccagcgctggctagggctgggagggttttgctctcctatgcaatatttatgccttctcattcagaactgtaagatgatcgcgcagggcatcatgtcaccatgtcaggtccggaggggaggtattaagaatagatacgatattacaccatttcctataggagtatgtaaatgaacaggcttctaaaaggttgagacactggtttttttttttaatatgactgtcttaaagcattcttgacagcaaaacttgtgctctctaaaagaagccttttttttttttctaggaggcaggttgggtgtggaatgctaatacagagcaggtgtgaaaacagagaaaactacaggtttgctgggggtgtgtatgtgtgagtgcctctaatttttttggtgactgggcagtgcacaccagatattttttctttgaatacagatcaccatggtgctacaactttttttttttttttttttttttttttttttttttttaagaaactcaaagaggcatttttatgaataaagtgaccttccccaaggctgacaagccagggttgatgagtgcatagtggaatagctttggatactcctctgggggatgacatgtaccaaggagaggaccgcagtggccagaggagacatgatttggctttgctggagcgccagtgtgctgtggcctttccccgcctcccaccctagtacccacgttttgctccacactccttgaccgcaggggctcggacacaaacccctgtcaccaggagagtcagtcagcactacttgggagggctaaagggaaatttggaaataaaattccaaagtttggagtaaaaaaattcaagtgttgattttatattctttccctttctgacacagcctaaagcgtagggggaacatgtgtttatctgtgggagataaacaagatggagtcccaaagactttaacaaaatatttttttaaaaatccactagaatagaaaatacattatttagatatactttatgctgagagtgagtatatatgcttgtcctatttaaacttgtgagaaaaagtggtatcccttgatacatttagaaatatgggggctatcttgtttcattgtgggggtggggcagaaggagaataaatgcaggatgaccctgttgaaggaatcttagcatggccaacaggggacgtttccagtcgattaccaggaaatgcaagccttggggtttctactggtggtggggctgtcatgaactttaaaatccaaagcctagacaaggaaaagtgttagaccaattgaaaagcaatccagccctttttttttttttttttttggctttgcacgacatgtcaacagaaaccatgcctttcaatataagaaataaatgtgatgatcatgtaaaatgtgaaaaattgaaagcattccagcaaaataagaattttttatatatttgttttttaagatgtatatgttaaaaaaagagaaggtcgcattatggacagacttcgtgaatgggaatttgcttagaattgtgagtagttctgaattagaaaagtatgtgaaggaaaggcagctgtaaacgtattgtgccctggagagttgtacacatgttgaaatgtaatctgggcttacctgatccatttggagtggatgtcactgccgagtctgttctcacatggaaccatgtgtgtggggttgccagcctcacagatacaatcaatcctattcccctctgacataaggaactcctctggagtggcagagtcttatcacagaaggcagccaccatttcaccaaaacaaaagttcacggcattcaattcctttttcctttagctatttatatatgcagtactctcagtcatatgcagaaatacttttttttttttaattaatagttacaggcttgttggtccagtgggatttgggtagggggagaaagataccttctaaaatggatcaatagaaccaaaataatacagcatgttctataaccacaaggaaatcaaatgatcctgtcatgattccagttagtcataactatgttagcagtgctaaatgcattttagaaatggtgacttctgtggttttcctagcatttgtctctaacaaatggtgaaataattactcatggccctctctgccattgtctttcattttttcacagtgaaattagacccctttacttcaccattctgccactgcaaattaagtataaagaaaatagcaagagtgtccacaccagtagacagtaagcttctctacctgtaagtgatgaaatcatagctaatgcacttgccatggagttttcaagatgattggtgtcagacagttttcactttgtttaaaaagtgttggtggccttttgtggtggtgttacaatcctctgggggcttaggaggatgttgatgcaacttttagaagcttttaatttcaaaaacaactcaaaaatctgaaggacagtcatagctgccactcagccccagttagtcaaaccccagtgacctttgcccctggttgccaagggctttgcaacatcaagcagggaaataaggatctgtctgtttagtggataccgtgtatcctttaatagaccaggtaacagttcgtgttagtttagactattgttttgtactgtactttcttgggtggcagaggaaagaaaagtaaaacattaaaaaaaaaaaaaaaactgcgttctttaaattctgtattattagcaacctctgttgtacatagtgtttgataataaagtattaatttgattcttatgtcttttgtaagtgagaacaatagactttcaggatacaaaacatgcattgaggctttgaaacatccaatgtgtaccatggctgaaaaaaagagtcacaagtggctgagacactgctccatacaggactcatgtgtggtcattgcccacccaatcttatgactccatcatcttgggacctggaacaacatgacttttttgatcgatattttgtcctcggtgttttcaaggtctgatgttggagccctgtggcccaccctcccttctccaccagcatgttggtttgaaaaggatagggaatttagaaacagttctgtactttggtttggtttggttttctgtttgtgattgttttcatggactgttttattttttcccaggaagagtctttatcaatatcatgtgcagctcactcatggaaatggttgcaaaccaatcagtgtaggaagcttaaatggggctgtttccctctctgtgtcgttgtgaaaggaagagtcacacagtacctgtggattttcagggactctgtttttctccggtgccttagcaacggcagcagccatttgtattattttcaaataattagaaaaacagttttcaactcctcctttccattcattgctctcagagttgtggtcactgacttttcttttgaaaaccgcctccaccaacacccccgtttgcctacaccaccccccttttacttagtatgtttattttttgtgtgtctcttgccttcctcccacgttttatttcccctcagagctgtgaatgggcaggtctgtctctggtttggcatcactgagtttttcccatgcattggccccagggctgctaggatgtgagacaaatctccctacaatgggcttgctcccattgtctgtacagtttaatagatgctggcatgtcggaggttacccatgagtcaaaatccgctctccatgcttactcttgacaccccattgaagccactcattgtgtgtgcgtctgggtgtgaagtccagctccgtgtggtcctgtgcttgtactgccctgctttgcagttcctttgcacttactcatcgagtgctgttttgaaatgctgacattatataaacgtaaaagaaaatgtaaaaaaaaaaaacccacacacaaacaaacccatacgatctgtatttgtatatacacgtgtccgtacaagtataactaaataaaaattaaagattttcatcattttaattgga

SEQ ID NO: 6305 - DNA, 606 bp, Homo sapiens
  source 1..606: mol_type = unassigned DNA; mol_type = unassigned DNA
cttgaaaaggagaagaaagtttcttcctcaagtgatttataacttgaaacatgctgtcatgttttgcctctgcaatcccagataatggaagaaggtcctgtctaaagctcaaagtctttgtgagaccaacaaatagctgtatgaaaactataggtgttcatgatcgtgttttcgatgttaacgacaaagtagaaaattcattagaaccagcagatgacaccgtacatgagtcagccgagccatcccgcggcgagaacgcggcacaaacaccaaggatacccagccgccttttggcaatcctactgttcctcctggcgatgcttttgacattatagcacagtctcctcccatcacttgtcacagaaaacatcagggtcttggaacaccagagatccacctaactgctcatcctaagaagggacttgttattgggttttggcagatgtcagatttttgttttctttctttcagcctgaattctaagcaacaacttcaggttgggggcctaaacttgttcctgcctccctcaccccaccccgccccacccccagccctggcccttggcttctctcacccctcccaaattaaatggactccagatgaaaa

SEQ ID NO: 6306 - DNA, 931 bp, Homo sapiens
  source 1..931: mol_type = unassigned DNA; mol_type = unassigned DNA
atcttgtgattcctttttcctcctgaaccctccagtgggggtgcgagtttgtctttatcaccccccatcccaccgccttcttttcttctcgctctcctacccctccccagcttggtgggcgcctctttcctttctcgcccactttcatttttatttattcatatttatttggcgcccgctctctctctgtccctttgcctgcctccctccctccggatccccgctctctccccggagtggcgcgtcgggggctccgccgctggccaggcgtgatgttgcacgtggagatgttgacgctggtgtttctggtgctctggatgtgtgtgttcagccaggacccgggctccaaggccgtcgccgaccgctacgctgtctactggaacagcagcaaccccagattccagaggggtgactaccatattgatgtctgtatcaatgactacctggatgttttctgccctcactatgaggactccgtcccagaagataagactgagcgctatgtcctctacatggtgaactttgatggctacagtgcctgcgaccacacttccaaagggttcaagagatgggaatgtaaccggcctcactctccaaatggaccgctgaagttctctgaaaaattccagctcttcactcccttttctctaggatttgaattcaggccaggccgagaatatttctacatctgtgagtatatagagatttatcgtgttgtagggcagctgcaagaacccagactaattttttacccatgtttcagagaattgcagagagctggactctgcattacagatatctccttgtaaatgcgtacatcaggatccctagatacattagctgggaattgagagcacaaattagattaaagacagagcgcgtctccccctatgaaattacgtgtcagcctgttcactgaaccactgctgac

SEQ ID NO: 6307 - DNA, 637 bp, Homo sapiens
  source 1..637: mol_type = unassigned DNA; mol_type = unassigned DNA
gctggccaggcgtgatgttgcacgtggagatgttgacgctggtgtttctggtgctctggatgtgtgtgttcagccaggacccgggctccaaggccgtcgccgaccgctacgctgtctactggaacagcagcaaccccagattccagaggggtgactaccatattgatgtctgtatcaatgactacctggatgttttctgccctcactatgaggactccgtcccagaagataagactgagcgctatgtcctctacatggtgaactttgatggctacagtgcctgcgaccacacttccaaagggttcaagagatgggaatgtaaccggcctcactctccaaatggaccgctgaagttctctgaaaaattccagctcttcactcccttttctctaggatttgaattcaggccaggccgagaatatttctacatctcctctgcaatcccagataatggaagaaggtcctgtctaaagctcaaagtctttgtgagaccaacaaatgacaccgtacatgagtcagccgagccatcccgcggcgagaacgcggcacaaacaccaaggatacccagccgccttttggcaatcctactgttcctcctggcgatgcttttgacattatagcacagtctcctcccatc

SEQ ID NO: 6308 - DNA, 3222 bp, Homo sapiens
  source 1..3222: mol_type = unassigned DNA; mol_type = unassigned DNA
ggtttcctcccttagcccgctgccctcaatcccagcgaggctggggctccggctcggcgcccccttcctcgctccctggtccggcgccccatgccgcccccgcccggtccccggctcccccagtcccccacttaggcgggctcacagatcccggggtgctggcgcgtgggccgggggcgcgtagggcgcctgcagacggcccctggaagggctctggtggggctgagcgctctgccgcgggggcgcgggcacagcaggaagcaggtccgcgtgggcgctgggggcatcagctaccggggtggtccgggctgaagagccaggcagccaaggcagccaccccggggggtgggcgactttgggggagttggtgccccgccccccaggccttggcggggtcatggggcccccccattctgggccggggggcgtgcgagtcggggccctgctgctgctgggggttttggggctggtgtctgggctcagcctggagcctgtctactggaactcggcgaataagaggttccaggcagagggtggttatgtgctgtaccctcagatcggggaccggctagacctgctctgcccccgggcccggcctcctggccctcactcctctcctaattatgagttctacaagctgtacctggtagggggtgctcagggccggcgctgtgaggcaccccctgccccaaacctccttctcacttgtgatcgcccagacctggatctccgcttcaccatcaagttccaggagtatagccctaatctctggggccacgagttccgctcgcaccacgattactacatcattgccacatcggatgggacccgggagggcctggagagcctgcagggaggtgtgtgcctaaccagaggcatgaaggtgcttctccgagtgggacaaagtccccgaggaggggctgtcccccgaaaacctgtgtctgaaatgcccatggaaagagaccgaggggcagcccacagcctggagcctgggaaggagaacctgccaggtgaccccaccagcaatgcaacctcccggggtgctgaaggccccctgccccctcccagcatgcctgcagtggctggggcagcaggggggctggcgctgctcttgctgggcgtggcaggggctgggggtgccatgtgttggcggagacggcgggccaagccttcggagagtcgccaccctggtcctggctccttcgggaggggagggtctctgggcctggggggtggaggtgggatgggacctcgggaggctgagcctggggagctagggatagctctgcggggtggcggggctgcagatccccccttctgcccccactatgagaaggtgagtggtgactatgggcatcctgtgtatatcgtgcaggatgggcccccccagagccctccaaacatctactacaaggtatgagggctcctctcacgtggctatcctgaatccagcccttcttggggtgctcctccagtttaattcctggtttgagggacacctctaacatctcggccccctgtgcccccccagccccttcactcctcccggctgctgtcctcgtctccacttttaggattccttaggattcccactgccccacttcctgccctcccgtttggccatgggtgcccccctctgtctcagtgtccctggatcctttttccttggggaggggcacaggctcagcctcctctctgaccatgacccaggcatccttgtccccctcacccacccagagctaggggcgggaacagcccaccttttggttggcaccgccttctttctgcctctcactggttttctcttctctatctcttattctttccctctcttccgtctctaggtctgttcttcttccctagcatcctcctccccacatctcctttcaccctcttggcttcttatcctgtgcctctcccatctcctgggtgggggcatcaaagcatttctccccttagctttcagccccccttctgacctctcataccaaccactcccctcagtctgccaaaaatgggggccttatggggaaggctctgacactccaccccagctcaggccatgggcagcagggctccattctctggcctggcccaggcctctacatacttactccagccatttggggtggttgggtcatgacagctaccatgagaagaagtgtcccgttttgtccagtggccaatagcaagatatgaaccggtcgggacatgtatggacttggtctgatgctgaatgggccacttgggaccggaagtgacttgctccagacaagaggtgaccaggcccggacagaaatggcctgggaagtagcagaagcagtgcagcaggaactggaagtgccttcatccaggacaggaagtagcacttctgaaacaggaagtggtctggctggaactccaagtggcttagtctgggggatcaggaggtgggaggtggatggttcttattctgtggagaagaagggcgggaagaacttcctttcaggaggaagctggaacttactgactgtaagaggttagaggtggaccgagaaggacttttcccagtcttcagtggcacttcccaagatctcccttcccttgtgctctgtgctgattttaggacagctaagatgactgccatgtgctgtggcaggcctaatttgtcttgttctttcctttccatatcccagtataatctctgttaatcaacaggactaccccaagaacccatgtgctctcccgagtaacccagatggctgtcttgttcattccatcctacatttctgactcctttcagactcaacacagttcccttcttagtgaccaaaatggtggcctactggctggtctagctgacagtggtacttagcaaaggccactgtttccatagtgaccagctgatacctcttcctgccctctagtgtgcaattgggtgttgcctcagtttcctcccagctcagttttattagatcaaagctgttgttgggcaccaggttggccacctcaatcaccagccaagatggttgctttgtccaccagaggtcaagttcacctctctggtgctgtagttcccagctccttcctgatttttctaatcgctccttctggggaacaggaagttgatattgccatggtggcggggtatgccgtcacctcagtagttttactgtaaaagggaaatttgaacaacaaaaaccaaaaaaaataaaaataaaaaacttcaaaagttgacaagaa

SEQ ID NO: 6309 - DNA, 5162 bp, Homo sapiens
  source 1..5162: mol_type = unassigned DNA; mol_type = unassigned DNA
gctggcggcgcccggctccgtcctgcccgcggccggcccccgcgtctgctccctccccgcccgggcccctgtcggccgccgccagtccccgccccgactgtgaatgaaaggcgggcgccgccgagggctggctgggaacgccgcagcgacgccggcctctcgagaggcgcgcgccccgccgagatgtacggtgtgtgtggctgctgtggtgccctacgccccaggtacaaaaggctggttgacaacatcttccctgaggatcccgaggatggtctggtgaagaccaacatggagaagctgaccttctatgccctctcagctccagaaaaacttgatcgtattggcgcctacctctctgagaggctcatccgtgacgtgggtcgccatcgatatgggtacgtgtgcattgctatggaggctttggaccagctgctcatggcctgccactgccagagcatcaacctcttcgtggagagcttcctcaagatggtggccaagctgctggagtcagagaaacccaacctgcagatcctcggcaccaactcgtttgtgaagtttgccaacatcgaggaggacaccccgtcctatcaccggagctatgacttctttgtgtcccgattcagtgaaatgtgccactcgagccatgatgacttagaaatcaagaccaaaattcgaatgtcaggcatcaaaggcctgcaaggggtggtgaggaagacggtgaatgatgaactgcaggccaatatctgggacccacagcacatggataagatcgttccatcactgcttttcaatctacagcatgtagaggaggcagagagccggtctccctcacccctccaagcacctgagaaggagaaagagagccccgcggagctggctgagaggtgtcttcgggagctgctgggccgggctgcctttggcaacatcaaaaacgccatcaagcctgttctcatccatctggataaccattctctttgggaacccaaggtgtttgccatccgttgctttaaaatcatcatgtactcaattcagccgcagcactcacacctggtcatccagcagctcctgggccacctggacgccaacagccgcagcgctgcgacggtgcgcgcgggcatcgtggaagtcttgtcggaagccgcggtcatcgctgccaccggctctgtggggcccacagtactggagatgttcaacacgctgctgaggcagctgcggctcagcatcgactacgcgctgaccgggagctacgacggggcggtcagcctcggcaccaagatcatcaaggagcacgaggagcgcatgttccaggaggccgtcatcaagaccgtgggctcctttgccagcacgctgcccacctaccagcgctccgaggtgatcctcttcatcatgagcaaggtcccgcggccatccctgcaccaggcggtggacacaggcaggacgggggagaataggaaccgtctgacccagattatgctgctaaaatccctcctgcaggtatccacaggtttccagtgcaacaacatgatgtcagccctgcctagcaacttcctggaccgccttctctccaccgccctcatggaggatgcagaaattcgactctttgttctagagattctcatcagtttcattgatcgtcatggcaaccgccacaagttctctaccatcagtaccctcagtgacatctctgtcctgaagctgaaagtggacaagtgctctcgacaggacaccgtcttcatgaagaagcactcccagcagctctacagacacatctacctgagctgcaaggaggaaacaaacgtgcagaaacactacgaggcgctctatggcttgctggccctcatcagcatcgagctggctaacgaggaggtggtggtggacctcatccgtctggtgctggctgttcaggacgtggcccaagtcaatgaggagaacttgcctgtctacaaccgctgtgccctctatgctctgggcgcagcctacctgaacctcatcagtcagctcacaacagtgcctgccttctgccagcacatccatgaggtgatagagaccaggaagaaagaggctccatacatgctccccgaggatgtgtttgtggagaggcccaggctgtctcagaatcttgatggggtggtcattgagctcctcttccgccagagcaagatcagtgaagtcctgggaggcagtggctacaactcggaccggctctgcctgccctacattcctcagctgacagatgaggatcgtttatccaagaggaggagcattggagagaccatctccctgcaggtggaggtagaatcgaggaacagtccggagaaggaggaggtgagtgtccgtgccaccgtcctggggcagccccacctcctgtagattggacgctggactccaggctcccctgcctgcatagtgggcttaaggctgcatggaaagcaagtttctcgagtaattccacacttgtactgactctccccacgtatgcgtcatagatacttcccttcggaaaaattgttagggtcctccctgctcccatgaggatatcataaaactcactcttgaaaggcctggctggggatggtggctcacacctgtgatcccaacattttggaggctgaggcaggaggactgcttgagcccaggagtttgagatgatctggggcaatataaggagaccccatctctacaaaaaataattgaaaaatcagccaggcatggtgacgtgcacctgtggtcccaggtactcaggatgctgaggtgggagaatcacctgagcctgggaggtcaaggctgctgtaagccatgatggcagcacggcacttcagcctaggtgacagagtgagacctcgtctcaaaaaattaaaaagaaaggcatgctggtcatcattccccactcacagggggaccgatatgctctgggttggaaactagaagacttaactggagagataagggtgagaacagctttcatagtgttgcttccgtatgtatcaataaagaatctttttttaaatttacactatttttaaagcaattttagttacagcaaaattgagaggaaggtacagagatcgccctttgccccctcccctcccctgacacatgcacagcctcccctcctatccatatcccccagcagagtggtgcatttcttacagttcaacctgccttaacacaacagtatcatctgaagtctgtcgtttacactggggttcgccctcagcgttgtacattctgtgggtttggacaaatgcgtaatgacatgcatcccccaccagagtaccatacagagtcatttcctgccctaaaaccccctgtgctccacctcttcatctctcccctaaccactgacagccaagatgttttttttttttttttttttaatgctgactgttacagttcacaagaagtacggaggacacacatctgggtgggaccgggacagaaagacttacatggtcctcaggcatggacaggctggcattccccagcctctctgcccattagggctgatatagacatggaggacagctttgacatcaagcctttccccagatgcaatcagaggtaggagaagtctctaggggtcaggatcaagcctccccctaactgtgccctcgaccacttcatttattggggcagatctctaccccagggccctcaaagcttatccagaaccttcccacggaaggaagctctgacttgggctaattggacaagtaaaatgaggttgaacgaggcatcctccatggcccttccagctccaaggactgggaacctccaatgcgttaggcatcggggtgagttggctgctctctccccatagtggcgattctcccttcccaagaggtaagagaccctcgggaattgaggagtgaagtgactcagaagcgcaaggcgaaatgcttacacagctacagagccacctcctcactagtggcctcctgggccaccagtatcagttccttcctcccttcaagagtcagcttagcccagaggtagcttggtggcaaagcaggggtgcaggggccttcatcctgtgcccttctgccatgccacaactctctccactctcagccatcagtgccagtccagagtcccacggtggttcctagggccgtactgcccagccttgccgcaggggtgaataaatgcttgtttggtcaaatctgaatcctggtgcctggcattcccagccatgcatagtctgggctctgccatttcatttttccccacctgctctggcccgtatccactgtcccactctggtggggctgctctcgatctctcccacgctgcgctccgccatctccaggcctttgctagtgcagaatgccacatctgaaccacccttccctccacactggtgcagctgagcgcctgtgaactgtctgttctccagcgcccggcccctgttcagtttcctcataaacttctctctccctgctcttgcccagggagcatcccttctctcttgcccagagagcggcattttctttgactgttgccaccacacagttccctagcaccctgcaggtgaatatccaatgttgctcggtgctgacagtggatgaatggatggacgtacagaggataagtcctcagagcgagttaaagccgagcatagctctctcttgcatgtaattcctatgctagcaaattgtgcagtttctatagactcacctacagtcctgcatgtagttggtgctcacttaatgtttgttaaatgactttatctcatacatatacttctgtcctctcctactcaaacaaaaatgccaaacaaatcaaaaaatgcacgactcagtgaattttcataaagtgtgtatgcccacgcaaccacgcctggatgagagagtggaacactgtcatcatccaggggccctgcctctgtgccccctcccctaagggagctcccagcctgagttgcgttacttctggaactttatatcaatgaaatcattctgttctgtgtctgctgcttttgcttaagattatgtttaaatgatagagcatgaggctgggcgtggtggctcatgcctgtaatctcagcactttgggaggccaaggcaggtggatcacctgaggttaggagttcaagaccagcctgatcaacatggtgaaaccccgtctttactaaaactacaaaaaattagccgggcatggtg

SEQ ID NO: 6310 - DNA, 7434 bp, Homo sapiens
  source 1..7434: mol_type = unassigned DNA; mol_type = unassigned DNA
gctggcggcgcccggctccgtcctgcccgcggccggcccccgcgtctgctccctccccgcccgggcccctgtcggccgccgccagtccccgccccgactgtgaatgaaaggcgggcgccgccgagggctggctgggaacgccgcagcgacgccggcctctcgagaggcgcgcgccccgccgagatgtacggtgtgtgtggctgctgtggtgccctacgccccaggtacaaaaggctggttgacaacatcttccctgaggatcccgaggatggtctggtgaagaccaacatggagaagctgaccttctatgccctctcagctccagaaaaacttgatcgtattggcgcctacctctctgagaggctcatccgtgacgtgggtcgccatcgatatgggtacgtgtgcattgctatggaggctttggaccagctgctcatggcctgccactgccagagcatcaacctcttcgtggagagcttcctcaagatggtggccaagctgctggagtcagagaaacccaacctgcagatcctcggcaccaactcgtttgtgaagtttgccaacatcgaggaggacaccccgtcctatcaccggagctatgacttctttgtgtcccgattcagtgaaatgtgccactcgagccatgatgacttagaaatcaagaccaaaattcgaatgtcaggcatcaaaggcctgcaaggggtggtgaggaagacggtgaatgatgaactgcaggccaatatctgggacccacagcacatggataagatcgttccatcactgcttttcaatctacagcatgtagaggaggcagagagccggtctccctcacccctccaagcacctgagaaggagaaagagagccccgcggagctggctgagaggtgtcttcgggagctgctgggccgggctgcctttggcaacatcaaaaacgccatcaagcctgttctcatccatctggataaccattctctttgggaacccaaggtgtttgccatccgttgctttaaaatcatcatgtactcaattcagccgcagcactcacacctggtcatccagcagctcctgggccacctggacgccaacagccgcagcgctgcgacggtgcgcgcgggcatcgtggaagtcttgtcggaagccgcggtcatcgctgccaccggctctgtggggcccacagtactggagatgttcaacacgctgctgaggcagctgcggctcagcatcgactacgcgctgaccgggagctacgacggggcggtcagcctcggcaccaagatcatcaaggagcacgaggagcgcatgttccaggaggccgtcatcaagaccgtgggctcctttgccagcacgctgcccacctaccagcgctccgaggtgatcctcttcatcatgagcaaggtcccgcggccatccctgcaccaggcggtggacacaggcaggacgggggagaataggaaccgtctgacccagattatgctgctaaaatccctcctgcaggtatccacaggtttccagtgcaacaacatgatgtcagccctgcctagcaacttcctggaccgccttctctccaccgccctcatggaggatgcagaaattcgactctttgttctagagattctcatcagtttcattgatcgtcatggcaaccgccacaagttctctaccatcagtaccctcagtgacatctctgtcctgaagctgaaagtggacaagtgctctcgacaggacaccgtcttcatgaagaagcactcccagcagctctacagacacatctacctgagctgcaaggaggaaacaaacgtgcagaaacactacgaggcgctctatggcttgctggccctcatcagcatcgagctggctaacgaggaggtggtggtggacctcatccgtctggtgctggctgttcaggacgtggcccaagtcaatgaggagaacttgcctgtctacaaccgctgtgccctctatgctctgggcgcagcctacctgaacctcatcagtcagctcacaacagtgcctgccttctgccagcacatccatgaggtgatagagaccaggaagaaagaggctccatacatgctccccgaggatgtgtttgtggagaggcccaggctgtctcagaatcttgatggggtggtcattgagctcctcttccgccagagcaagatcagtgaagtcctgggaggcagtggctacaactcggaccggctctgcctgccctacattcctcagctgacagatgaggatcgtttatccaagaggaggagcattggagagaccatctccctgcaggtggaggtagaatcgaggaacagtccggagaaggaggagcgagtgcctgccgaggagatcacctatgagacactgaagaaagccattgtggacagcgtagcagtggaggagcaggagcgtgagcggcggcggcaggtggtggagaagttccagaaggcacccttcgaggagattgctgcacactgcggggcccgggcatcgctgctccagagcaaactcaatcagatctttgaaatcaccatccggcccccaccaagcccatcaggaaccatcactgcagcctacggtcagccgcagaaccactccatccccgtctatgaaatgaagtttcccgatctgtgtgtatactgaattccaagagcctgagctcctcaaggagatggggtctgaggaggggctcacctcacgcccaccccgaccacatggagatctggctgtgatctctgagaaaacatcaccttagatggcagcgcctcccaggctaagccaaggtggagactctctggtccttcttggccctcctacctcctcctcgtcttccctgagggaggtctcaccaatcagcatctcacctgtgccctctttgtcttctcttgtgtcagccaggggcagagaatcatggggtgtctctcaggagaagccggggggagggggctgagaagctcctacttggtgttttgagtgaagggcatgtcctccccagaggacggagctggatggagacttggttggtgagaggaagctaaggactctactcccctggggaaggaagctgagatggggatggctctctcctccccagcactccccctgctccccgcccatgtccctgctgtgtctctcactctcttgctcatctcccagttgtctgttcatgtttctttctactattaatgaatgctgagcccttataacaggagctggggtggagacatcacgaggggtcgggggacagcaaagggcaggaagcaggatgcagggctggcaggaggtgggcctgtggcatcagcaggcccagcgggcgagtgtggtccctgcagcagcttcccacctcctttgttcataaggagcttgtgttggcctcccacagtcctgtctgctggacgtttttcagagttgggttctctctctttgatgtctttcttctgagggtcccaaggtgttcctggagcttctgggttgaggaaaggcagagcaagataatcttggaggggaactacagggtccccaagatttgcccacatcacctcctatggaaaaggctcccagcctgacctgggttgtaggagagtggggagggtgggatgagtggtgttttggggctcaaggatatcagaagccaactttttggatgttccgtttgaagaaagaaggatctaacacctaatattggaatgatttcttcactctctggacaaagtctgggacatcagcaccacctggcaacgcttgtggcttgggaggagccatggagacccctttgggttctgggttcctgttttcctggtgtgccgtctgtgtctctgtgtaatgaggatgtgcagagaggagctaacgcggagccgggcagagccacccaggaggcagtttgttgccttctttgccaattccccttcccggcccctcctccaggtgcctttgtgtctcccggggtgccactgacagaacctcacctggggctcctcccatggcagtgccatgtggtccaaaattgccctttccttctccgttagtcacatttcccataactcctccgagccaacataacctacagtaagatgtgagtgtcagacgttctctccctggagtctgctttccaaaggaggcagggtgagtagatttcttgatccaaaggaatccgtttttaatttttttttttttctagagatgggggtctcactatgttgcccaggctggcctcgaactcctgagtttaagtgattctcccacctcagcctcctgagtagctgagaatccctttttagggtacaatttcaggcagtgtggcatggagtcagaagcaggctgtttctcctcaggggagggcaggcttctcaggacggcctcagctcatagccccacgtgtggtgtgcacggatgtgcagggagagcctgattgttaggtggatgtattttccagaatcggggagggactgaacacgagcatttcccattaatatgtgcaataaatgtcttggggaaggggctatttgaccctcattcccatagttttggcacttcaaatgaagctcttccttgtggtcaccatctctgctgtgggcacacagcttctttttcttgtttttttttttttttttttttttttgagacaccgtctcgctctgtcacccaggctggagtacaatggtgtgacctcaactcactgtgacttccgcctcctgggttcaagtgattctcctgcctcagcctcctgagtagctgggattacaggcgtgcaccaccacgcctggcgaattttgtgtttttagtagacatgaggtttcaccgtgttggccaggctggtctggaactcctgatctcaagtgatccgcccgcctcagcctctcaaagtgctgggattacaggcgtgagccactgcgcctgcttggcacgtggcttctgaatggcctgagtgagggcagggcccaggcatggaggctcctgcacccccaaggctttttggctgtgctttatggcctctggcttatactcaacccaattttacaagcatgaacttagacttctctttagtatttatatatttaaaaaccaagtttaaattaactcaaacttgacagcaactaacctctgaaagaaactttaaagaaaattgaaatcttgagccacaaacatgttctttcctcactagctcctcccaggttttatcctgcacccagcttggatgagagacccactgtttcttgtgcctacttaacattagggttccccgtggcagcttcatcctgagcactgcctgtgagccctggttctgggacttggcagtcgcctccctggagcatctttccagagccagcattagaacctgagatccccagatgtttctgcccctcatccccatcctgtgaatagagagacagaaaaggtgcaggttcccattctgcatagattctgctgtttcctctccaccggtcccaggcagcttttcctttccatcactgccgcttagcaaaaatgtgcttcttttgaagaactggtcattttttttgagtgccctcttctcagttttgtttaaacttacactcagtagagtgttgggttgtctgctgacatggagtagaacctggattctggccaaataggccagaatcggaaaggtgaaggtgagtgtgatagtaggtaatctcctcaccccagcacaggccctgggagagaggcaaagcagtttgatgggatctggaggggagggaggtaccctggcccttggtctagcatcagtgagtcctgcccttccaagcccctggaggctagtggcattgcattgtgcccctttttgccacccttctctgatgtgattttgagcgaagaggagtcagtaagcccattgagaccggctgctcccaaagcccgaggactctagctgtgtggggaagggctagcattggtcaggactctgctgacagcactgagtaggcaggaatgtatttgagatttggaagtactgttaatttggtggagtcaggtgaatggataagaggcagatcggcagaaagcatcagtgtggtcccgaggctccctctgttttccttgccatggagtccccagcgccttgtgcctgtttccatttccctctctctttgaaaagtagaaatcagtggtttcttgactcctaaacagcctcctcactatagaaggagcctgagcaggtcagaagaactagaaaagtcctcagatacccccctctgtccagccccctttcccatacacagatatcaatggatgagcaggaaaagaggaggcctggactcactgaagtacttgaagaagcacaagtgtcatagatgtgccgccctttgccctgggtgttctagatcacacagaacacgtttcagctggactaagaatcagactagccaggggttcttctgaacagctcaggccagacctctgggctcctctgggggccctgggacatgatgccttgcagtttccattccattgtccccaggcctcctgacctggtgacagagagtgccctgcagaagtgagtctatttttcccaattcctcttcatgaccagaaaatggcagctggccggttggggtcctgtgggaaagggctaacctgggctgttaggtagacactaggtttaaaggtagacagggagatggcatcatcagggcaggccaggcccacttcctgtgaccccagaccttggcaggcgggtcgtgctgaaaccaggcatctccctcacacctggggaaaggtttagggcaacatgttgcctcttcatcccattaaccctagaaatcttctggttagagtggccccttaccccaaatctggcctaggtctgaagactgcaggatagtcatgatgggcccatcctagagcctggctagctggaagacgcggtatggcagggacaggagggcggcaggaagggctttgtggccctgctggggccaaaggcagttttctgtgctccctttagccccagcctggctggccaggtctcctgtacttcaggggaccatggggccgcccaagccagtcaccttccccttccaagctctccccccatgactgttgatttctggcgcgtggaggcagagttgtgaatccacaaatgctgtagcccatatctcgtaatgtgtctgtgtccacttagagcctcacgacctggctgtgtgtgtgcatgtgtgtgtagtatagtttgtagttgacaatatgtgtatataatagctggtgtatttatatgtgagtgcagaattagtgcccgtggcggttttctgtattttaaacccattgaattggttagttttattttagggaagtgggaaaggcggagtggggggaagtataggaagaaggattcttagcaaaatcattctctaggactattagtcgcgatctcccagtgagccatcacgatgcccttttcaaataaatgttaatgttgtcaccaca

SEQ ID NO: 6311 - DNA, 3685 bp, Homo sapiens
  source 1..3685: mol_type = unassigned DNA; mol_type = unassigned DNA
gtgcgcgcgcgtctgcgctgcgaggacaaagatgcctcgggccggggaccctggggtcctctccaggcccggcgcgtgccggtgctgggcggtggtccttcggggggcggaggctcaggggaaagcgggtctcccggagccgagcagaccgggagtgctggaggaggtggtcgtgtggcagcatttgcggaattaacaaaagcggtgtgtgtggctgctgtggtgccctacgccccaggtacaaaaggctggttgacaacatcttccctgaggatcccgaggatggtctggtgaagaccaacatggagaagctgaccttctatgccctctcagctccagaaaaacttgatcgtattggcgcctacctctctgagaggctcatccgtgacgtgggtcgccatcgatatgggtacgtgtgcattgctatggaggctttggaccagctgctcatggcctgccactgccagagcatcaacctcttcgtggagagcttcctcaagatggtggccaagctgctggagtcagagaaacccaacctgcagatcctcggcaccaactcgtttgtgaagtttgccaacatcgaggaggacaccccgtcctatcaccggagctatgacttctttgtgtcccgattcagtgaaatgtgccactcgagccatgatgacttagaaatcaagaccaaaattcgaatgtcaggcatcaaaggcctgcaaggggtggtgaggaagacggtgaatgatgaactgcaggccaatatctgggacccacagcacatggataagatcgttccatcactgcttttcaatctacagcatgtagaggaggcagagagccggtctccctcacccctccaagcacctgagaaggagaaagagagccccgcggagctggctgagaggtgtcttcgggagctgctgggccgggctgcctttggcaacatcaaaaacgccatcaagcctgttctcatccatctggataaccattctctttgggaacccaaggtgtttgccatccgttgctttaaaatcatcatgtactcaattcagccgcagcactcacacctggtcatccagcagctcctgggccacctggacgccaacagccgcagcgctgcgacggtgcgcgcgggcatcgtggaagtcttgtcggaagccgcggtcatcgctgccaccggctctgtggggcccacagtactggagatgttcaacacgctgctgaggcagctgcggctcagcatcgactacgcgctgaccgggagctacgacggggcggtcagcctcggcaccaagatcatcaaggagcacgaggagcgcatgttccaggaggccgtcatcaagaccgtgggctcctttgccagcacgctgcccacctaccagcgctccgaggtgatcctcttcatcatgagcaaggtcccgcggccatccctgcaccaggcggtggacacaggcaggacgggggagaataggaaccgtctgacccagattatgctgctaaaatccctcctgcaggtatccacaggtttccagtgcaacaacatgatgtcagccctgcctagcaacttcctggaccgccttctctccaccgccctcatggaggatgcagaaattcgactctttgttctagagattctcatcagtttcattgatcgtcatggcaaccgccacaagttctctaccatcagtaccctcagtgacatctctgtcctgaagctgaaagtggacaagtgctctcgacaggacaccgtcttcatgaagaagcactcccagcagctctacagacacatctacctgagctgcaaggaggaaacaaacgtgcagaaacactacgaggcgctctatggcttgctggccctcatcagcatcgagctggctaacgaggaggtggtggtggacctcatccgtctggtgctggctgttcaggacgtggcccaagtcaatgaggagaacttgcctgtctacaaccgctgtgccctctatgctctgggcgcagcctacctgaacctcatcagtcagctcacaacagtgcctgccttctgccagcacatccatgaggtgatagagaccaggaagaaagaggctccatacatgctccccgaggatgtgtttgtggagaggcccaggctgtctcagaatcttgatggggtggtcattgagctcctcttccgccagagcaagatcagtgaagtcctgggaggcagtggctacaactcggaccggctctgcctgccctacattcctcagctgacagatgaggatcgtttatccaagaggaggagcattggagagaccatctccctgcaggtggaggtagaatcgaggaacagtccggagaaggaggagcgagtgcctgccgaggagatcacctatgagacactgaagaaagccattgtggacagcgtagcagtggaggagcaggagcgtgagcggcggcggcaggtggtggagaagttccagaaggcacccttcgaggagattgctgcacactgcggggcccgggcatcgctgctccagagcaaactcaatcagatctttgaaatcaccatccggcccccaccaagcccatcaggaaccatcactgcagcctacggtcagccgcagaaccactccatccccgtctatgaaatgaagtttcccgatctgtgtgtatactgaattccaagagcctgagctcctcaaggagatggggtctgaggaggggctcacctcacgcccaccccgaccacatggagatctggctgtgatctctgagaaaacatcaccttagatggcagcgcctcccaggctaagccaaggtggagactctctggtccttcttggccctcctacctcctcctcgtcttccctgagggaggtctcaccaatcagcatctcacctgtgccctctttgtcttctcttgtgtcagccaggggcagagaatcatggggtgtctctcaggagaagccggggggagggggctgagaagctcctacttggtgttttgagtgaagggcatgtcctccccagaggacggagctggatggagacttggttggtgagaggaagctaaggactctactcccctggggaaggaagctgagatggggatggctctctcctccccagcactccccctgctccccgcccatgtccctgctgtgtctctcactctcttgctcatctcccagttgtctgttcatgtttctttctactattaatgaatgctgagcccttataacaggagctggggtggagacatcacgaggggtcgggggacagcaaagggcaggaagcaggatgcagggctggcaggaggtgggcctgtggcatcagcaggcccagcgggcgagtgtggtccctgcagcagcttcccacctcctttgttcataaggagcttgtgttggcctcccacagtcctgtctgctggacgtttttcagagttgggttctctctctttgatgtctttcttctgagggtcccaaggtgttcctggagcttctgggttgaggaaaggcagagcaagataatcttggaggggaactacagggtccccaagatttgcccacatcacctcctatggaaaaggctcccagcctgacctgggttgtaggagagtggggagggtgggatgagtggtgttttggggctcaaggatatcagaagccaactttttggatgttccgtttgaagaaagaaggatctaacacct

SEQ ID NO: 6312 - DNA, 2432 bp, Homo sapiens
  source 1..2432: mol_type = unassigned DNA; mol_type = unassigned DNA
gcaaataagctttactacaaccatatctgaaatgtgttttcctgatcaagtgggatgggaaagaacagtgagtggagtcccaggcatgttaagaatggcgtgctgttttttaagtgtttgtgaagtttgccaacatcgaggaggacaccccgtcctatcaccggagctatgacttctttgtgtcccgattcagtgaaatgtgccactcgagccatgatgacttagaaatcaagaccaaaattcgaatgtcaggcatcaaaggcctgcaaggggtggtgaggaagacggtgaatgatgaactgcaggccaatatctgggacccacagcacatggataagatcgttccatcactgcttttcaatctacagcatgtagaggaggcagagagccggtctccctcacccctccaagcacctgagaaggagaaagagagccccgcggagctggctgagaggtgtcttcgggagctgctgggccgggctgcctttggcaacatcaaaaacgccatcaagcctgttctcatccatctggataaccattctctttgggaacccaaggtgtttgccatccgttgctttaaaatcatcatgtactcaattcagccgcagcactcacacctggtcatccagcagctcctgggccacctggacgccaacagccgcagcgctgcgacggtgcgcgcgggcatcgtggaagtcttgtcggaagccgcggtcatcgctgccaccggctctgtggggcccacagtactggagatgttcaacacgctgctgaggcagctgcggctcagcatcgactacgcgctgaccgggagctacgacggggcggtcagcctcggcaccaagatcatcaaggagcacgaggagcgcatgttccaggaggccgtcatcaagaccgtgggctcctttgccagcacgctgcccacctaccagcgctccgaggtgatcctcttcatcatgagcaaggtcccgcggccatccctgcaccaggcggtggacacaggcaggacgggggagaataggaaccgtctgacccagattatgctgctaaaatccctcctgcaggtatccacaggtttccagtgcaacaacatgatgtcagccctgcctagcaacttcctggaccgccttctctccaccgccctcatggaggatgcagaaattcgactctttgttctagagattctcatcagtttcattgatcgtcatggcaaccgccacaagttctctaccatcagtaccctcagtgacatctctgtcctgaagctgaaagtggacaagtgctctcgacaggacaccgtcttcatgaagaagcactcccagcagctctacagacacatctacctgagctgcaaggaggaaacaaacgtgcagaaacactacgaggcgctctatggcttgctggccctcatcagcatcgagctggctaacgaggaggtggtggtggacctcatccgtctggtgctggctgttcaggacgtggcccaagtcaatgaggagaacttgcctgtctacaaccgctgtgccctctatgctctgggcgcagcctacctgaacctcatcagtcagctcacaacagtgcctgccttctgccagcacatccatgaggtgatagagaccaggaagaaagaggctccatacatgctccccgaggatgtgtttgtggagaggcccaggctgtctcagaatcttgatggggtggtcattgagctcctcttccgccagagcaagatcagtgaagtcctgggaggcagtggctacaactcggaccggctctgcctgccctacattcctcagctgacagatgaggatcgtttatccaagaggaggagcattggagagaccatctccctgcaggtggaggtagaatcgaggaacagtccggagaaggaggagcgagtgcctgccgaggagatcacctatgagacactgaagaaagccattgtggacagcgtagcagtggaggagcaggagcgtgagcggcggcggcaggtggtggagaagttccagaaggcacccttcgaggagattgctgcacactgcggggcccgggcatcgctgctccagagcaaactcaatcagatctttgaaatcaccatccggcccccaccaagcccatcaggaaccatcactgcagcctacggtcagccgcagaaccactccatccccgtctatgaaatgaagtttcccgatctgtgtgtatactgaattccaagagcctgagctcctcaaggagatggggtctgaggaggggctcacctcacgcccaccccgaccacatggagatctggctgtgatctctgagaaaacatcaccttagatggcagcgcctcccaggctaagccaaggtggagactctctggtccttcttggccctcctacctcctcctcgtcttccctgagggaggtctcaccaatcagcatctcacctgt

SEQ ID NO: 6313 - DNA, 1980 bp, Homo sapiens
  source 1..1980: mol_type = unassigned DNA; mol_type = unassigned DNA
tttgtgaagtttgccaacatcgaggaggacaccccgtcctatcaccggagctatgacttctttgtgtcccgattcagtgaaatgtgccactcgagccatgatgacttagaaatcaagaccaaaattcgaatgtcaggcatcaaaggcctgcaaggggtggtgaggaagacggtgaatgatgaactgcaggccaatatctgggacccacagcacatggataagatcgttccatcactgcttttcaatctacagcatgtagaggaggcagagagccggtctccctcacccctccaagcacctgagaaggagaaagagagccccgcggagctggctgagaggtgtcttcgggagctgctgggccgggctgcctttggcaacatcaaaaacgccatcaagcctgttctcatccatctggataaccattctctttgggaacccaaggtgtttgccatccgttgctttaaaatcatcatgtactcaattcagccgcagcactcacacctggtcatccagcagctcctgggccacctggacgccaacagccgcagcgctgcgacggtgcgcgcgggcatcgtggaagtcttgtcggaagccgcggtcatcgctgccaccggctctgtggggcccacagtactggagatgttcaacacgctgctgaggcagctgcggctcagcatcgactacgcgctgaccgggagctacgacggggcggtcagcctcggcaccaagatcatcaaggagcacgaggagcgcatgttccaggaggccgtcatcaagaccgtgggctcctttgccagcacgctgcccacctaccagcgctccgaggtgatcctcttcatcatgagcaaggtcccgcggccatccctgcaccaggcggtggacacaggcaggacgggggagaataggaaccgtctgacccagattatgctgctaaaatccctcctgcaggtatccacaggtttccagtgcaacaacatgatgtcagccctgcctagcaacttcctggaccgccttctctccaccgccctcatggaggatgcagaaattcgactctttgttctagagattctcatcagtttcattgatcgtcatggcaaccgccacaagttctctaccatcagtaccctcagtgacatctctgtcctgaagctgaaagtggacaagtgctctcgacaggacaccgtcttcatgaagaagcactcccagcagctctacagacacatctacctgagctgcaaggaggaaacaaacgtgcagaaacactacgaggcgctctatggcttgctggccctcatcagcatcgagctggctaacgaggaggtggtggtggacctcatccgtctggtgctggctgttcaggtgatagagaccaggaagaaagaggctccatacatgctccccgaggatgtgtttgtggagaggcccaggctgtctcagaatcttgatggggtggtcattgagctcctcttccgccagagcaagatcagtgaagtcctgggaggcagtggctacaactcggaccggctctgcctgccctacattcctcagctgacagatgaggatcgtttatccaagaggaggagcattggagagaccatctccctgcaggtggaggtagaatcgaggaacagtccggagaaggaggagcgagtgcctgccgaggagatcacctatgagacactgaagaaagccattgtggacagcgtagcagtggaggagcaggagcgtgagcggcggcggcaggtggtggagaagttccagaaggcacccttcgaggagattgctgcacactgcggggcccgggcatcgctgctccagagcaaactcaatcagatctttgaaatcaccatccggcccccaccaagcccatcaggaaccatcactgcagcctacggtcagccgcagaaccactccatccccgtctatgaaatgaagtttcccgatctgtgtgtatactgaattccaagagcctgagctcct

SEQ ID NO: 6314 - DNA, 4489 bp, Homo sapiens
  source 1..4489: mol_type = unassigned DNA; mol_type = unassigned DNA
aaaaagagaaactgttgggagaggaatcgtatctccatatttcttctttcagccccaatccaagggttgtagctggaactttccatcagttcttcctttctttttcctctctaagcctttgccttgctctgtcacagtgaagtcagccagagcagggctgttaaactctgtgaaatttgtcataagggtgtcaggtatttcttactggcttccaaagaaacatagataaagaaatctttcctgtggcttcccttggcaggctgcattcagaaggtctctcagttgaagaaagagcttggaggacaacagcacaacaggagagtaaaagatgccccagggctgaggcctccgctcaggcagccgcatctggggtcaatcatactcaccttgcccgggccatgctccagcaaaatcaagctgttttcttttgaaagttcaaactcatcaagattatgctgctcactcttatcattctgttgccagtagtttcaaaatttagttttgttagtctctcagcaccgcagcactggagctgtcctgaaggtactctcgcaggaaatgggaattctacttgtgtgggtcctgcacccttcttaattttctcccatggaaatagtatctttaggattgacacagaaggaaccaattatgagcaattggtggtggatgctggtgtctcagtgatcatggattttcattataatgagaaaagaatctattgggtggatttagaaagacaacttttgcaaagagtttttctgaatgggtcaaggcaagagagagtatgtaatatagagaaaaatgtttctggaatggcaataaattggataaatgaagaagttatttggtcaaatcaacaggaaggaatcattacagtaacagatatgaaaggaaataattcccacattcttttaagtgctttaaaatatcctgcaaatgtagcagttgatccagtagaaaggtttatattttggtcttcagaggtggctggaagcctttatagagcagatctcgatggtgtgggagtgaaggctctgttggagacatcagagaaaataacagctgtgtcattggatgtgcttgataagcggctgttttggattcagtacaacagagaaggaagcaattctcttatttgctcctgtgattatgatggaggttctgtccacattagtaaacatccaacacagcataatttgtttgcaatgtccctttttggtgaccgtatcttctattcaacatggaaaatgaagacaatttggatagccaacaaacacactggaaaggacatggttagaattaacctccattcatcatttgtaccacttggtgaactgaaagtagtgcatccacttgcacaacccaaggcagaagatgacacttgggagcctgatgttaatgaatgtgctttttggaatcatggctgtactcttgggtgtaaaaacacccctggatcctattactgcacgtgccctgtaggatttgttctgcttcctgatgggaaacgatgtcatcaacttgtttcctgtccacgcaatgtgtctgaatgcagccatgactgtgttctgacatcagaaggtcccttatgtttctgtcctgaaggctcagtgcttgagagagatgggaaaacatgtagcggttgttcctcacccgataatggtggatgtagccagctctgcgttcctcttagcccagtatcctgggaatgtgattgctttcctgggtatgacctacaactggatgaaaaaagctgtgcagcttcaggaccacaaccatttttgctgtttgccaattctcaagatattcgacacatgcattttgatggaacagactatggaactctgctcagccagcagatgggaatggtttatgccctagatcatgaccctgtggaaaataagatatactttgcccatacagccctgaagtggatagagagagctaatatggatggttcccagcgagaaaggcttattgaggaaggagtagatgtgccagaaggtcttgctgtggactggattggccgtagattctattggacagacagagggaaatctctgattggaaggagtgatttaaatgggaaacgttccaaaataatcactaaggagaacatctctcaaccacgaggaattgctgttcatccaatggccaagagattattctggactgatacagggattaatccacgaattgaaagttcttccctccaaggccttggccgtctggttatagccagctctgatctaatctggcccagtggaataacgattgacttcttaactgacaagttgtactggtgcgatgccaagcagtctgtgattgaaatggccaatctggatggttcaaaacgccgaagacttacccagaatgatgtaggtcacccatttgctgtagcagtgtttgaggattatgtgtggttctcagattgggctatgccatcagtaatgagagtaaacaagaggactggcaaagatagagtacgtctccaaggcagcatgctgaagccctcatcactggttgtggttcatccattggcaaaaccaggagcagatccctgcttatatcaaaacggaggctgtgaacatatttgcaaaaagaggcttggaactgcttggtgttcgtgtcgtgaaggttttatgaaagcctcagatgggaaaacgtgtctggctctggatggtcatcagctgttggcaggtggtgaagttgatctaaagaaccaagtaacaccattggacatcttgtccaagactagagtgtcagaagataacattacagaatctcaacacatgctagtggctgaaatcatggtgtcagatcaagatgactgtgctcctgtgggatgcagcatgtatgctcggtgtatttcagagggagaggatgccacatgtcagtgtttgaaaggatttgctggggatggaaaactatgttctgatatagatgaatgtgagatgggtgtcccagtgtgcccccctgcctcctccaagtgcatcaacaccgaaggtggttatgtctgccggtgctcagaaggctaccaaggagatgggattcactgtcttgatattgatgagtgccaactgggggagcacagctgtggagagaatgccagctgcacaaatacagagggaggctatacctgcatgtgtgctggacgcctgtctgaaccaggactgatttgccctgactctactccaccccctcacctcagggaagatgaccaccactattccgtaagaaatagtgactctgaatgtcccctgtcccacgatgggtactgcctccatgatggtgtgtgcatgtatattgaagcattggacaagtatgcatgcaactgtgttgttggctacatcggggagcgatgtcagtaccgagacctgaagtggtgggaactgcgccacgctggccacgggcagcagcagaaggtcatcgtggtggctgtctgcgtggtggtgcttgtcatgctgctcctcctgagcctgtggggggcccactactacaggactcagaagctgctatcgaaaaacccaaagaatccttatgaggagtcgagcagagatgtgaggagtcgcaggcctgctgacactgaggatgggatgtcctcttgccctcaaccttggtttgtggttataaaagaacaccaagacctcaagaatgggggtcaaccagtggctggtgaggatggccaggcagcagatgggtcaatgcaaccaacttcatggaggcaggagccccagttatgtggaatgggcacagagcaaggctgctggattccagtatccagtgataagggctcctgtccccaggtaatggagcgaagctttcatatgccctcctatgggacacagacccttgaagggggtgtcgagaagccccattctctcctatcagctaacccattatggcaacaaagggccctggacccaccacaccaaatggagctgactcagtgaaaactggaattaaaaggaaagtcaagaagaatgaactatgtcgatgcacagtatcttttctttcaaaagtagagcaaaactataggttttggttccacaatctctacgactaatcacctactcaatgcctggagacagatacgtagttgtgcttttgtttgctcttttaagcagtctcactgcagtcttatttccaagtaagagtactgggagaatcactaggtaacttattagaaacccaaattgggacaacagtgctttgtaaattgtgttgtcttcagcagtcaatacaaatagatttttgtttttgttgttcctgcagccccagaagaaattaggggttaaagcagacagtcacactggtttggtcagttacaaagtaatttctttgatctggacagaacatttatatcagtttcatgaaatgattggaatattacaataccgttaagatacagtgtaggcatttaactcctcattggcgtggtccatgctgatgattttgcaaaatgagttgtgatgaatcaatgaaaaatgta

SEQ ID NO: 6315 - DNA, 4880 bp, Homo sapiens
  source 1..4880: mol_type = unassigned DNA; mol_type = unassigned DNA
gaaactgttgggagaggaatcgtatctccatatttcttctttcagccccaatccaagggttgtagctggaactttccatcagttcttcctttctttttcctctctaagcctttgccttgctctgtcacagtgaagtcagccagagcagggctgttaaactctgtgaaatttgtcataagggtgtcaggtatttcttactggcttccaaagaaacatagataaagaaatctttcctgtggcttcccttggcaggctgcattcagaaggtctctcagttgaagaaagagcttggaggacaacagcacaacaggagagtaaaagatgccccagggctgaggcctccgctcaggcagccgcatctggggtcaatcatactcaccttgcccgggccatgctccagcaaaatcaagctgttttcttttgaaagttcaaactcatcaagattatgctgctcactcttatcattctgttgccagtagtttcaaaatttagttttgttagtctctcagcaccgcagcactggagctgtcctgaaggtactctcgcaggaaatgggaattctacttgtgtgggtcctgcacccttcttaattttctcccatggaaatagtatctttaggattgacacagaaggaaccaattatgagcaattggtggtggatgctggtgtctcagtgatcatggattttcattataatgagaaaagaatctattgggtggatttagaaagacaacttttgcaaagagtttttctgaatgggtcaaggcaagagagagtatgtaatatagagaaaaatgtttctggaatggcaataaattggataaatgaagaagttatttggtcaaatcaacaggaaggaatcattacagtaacagatatgaaaggaaataattcccacattcttttaagtgctttaaaatatcctgcaaatgtagcagttgatccagtagaaaggtttatattttggtcttcagaggtggctggaagcctttatagagcagatctcgatggtgtgggagtgaaggctctgttggagacatcagagaaaataacagctgtgtcattggatgtgcttgataagcggctgttttggattcagtacaacagagaaggaagcaattctcttatttgctcctgtgattatgatggaggttctgtccacattagtaaacatccaacacagcataatttgtttgcaatgtccctttttggtgaccgtatcttctattcaacatggaaaatgaagacaatttggatagccaacaaacacactggaaaggacatggttagaattaacctccattcatcatttgtaccacttggtgaactgaaagtagtgcatccacttgcacaacccaaggcagaagatgacacttgggagcctgagcagaaactttgcaaattgaggaaaggaaactgcagcagcactgtgtgtgggcaagacctccagtcacacttgtgcatgtgtgcagagggatacgccctaagtcgagaccggaagtactgtgaagatgttaatgaatgtgctttttggaatcatggctgtactcttgggtgtaaaaacacccctggatcctattactgcacgtgccctgtaggatttgttctgcttcctgatgggaaacgatgtcatcaacttgtttcctgtccacgcaatgtgtctgaatgcagccatgactgtgttctgacatcagaaggtcccttatgtttctgtcctgaaggctcagtgcttgagagagatgggaaaacatgtagcggttgttcctcacccgataatggtggatgtagccagctctgcgttcctcttagcccagtatcctgggaatgtgattgctttcctgggtatgacctacaactggatgaaaaaagctgtgcagcttcaggaccacaaccatttttgctgtttgccaattctcaagatattcgacacatgcattttgatggaacagactatggaactctgctcagccagcagatgggaatggtttatgccctagatcatgaccctgtggaaaataagatatactttgcccatacagccctgaagtggatagagagagctaatatggatggttcccagcgagaaaggcttattgaggaaggagtagatgtgccagaaggtcttgctgtggactggattggccgtagattctattggacagacagagggaaatctctgattggaaggagtgatttaaatgggaaacgttccaaaataatcactaaggagaacatctctcaaccacgaggaattgctgttcatccaatggccaagagattattctggactgatacagggattaatccacgaattgaaagttcttccctccaaggccttggccgtctggttatagccagctctgatctaatctggcccagtggaataacgattgacttcttaactgacaagttgtactggtgcgatgccaagcagtctgtgattgaaatggccaatctggatggttcaaaacgccgaagacttacccagaatgatgtaggtcacccatttgctgtagcagtgtttgaggattatgtgtggttctcagattgggctatgccatcagtaatgagagtaaacaagaggactggcaaagatagagtacgtctccaaggcagcatgctgaagccctcatcactggttgtggttcatccattggcaaaaccaggagcagatccctgcttatatcaaaacggaggctgtgaacatatttgcaaaaagaggcttggaactgcttggtgttcgtgtcgtgaaggttttatgaaagcctcagatgggaaaacgtgtctggctctggatggtcatcagctgttggcaggtggtgaagttgatctaaagaaccaagtaacaccattggacatcttgtccaagactagagtgtcagaagataacattacagaatctcaacacatgctagtggctgaaatcatggtgtcagatcaagatgactgtgctcctgtgggatgcagcatgtatgctcggtgtatttcagagggagaggatgccacatgtcagtgtttgaaaggatttgctggggatggaaaactatgttctgatatagatgaatgtgagatgggtgtcccagtgtgcccccctgcctcctccaagtgcatcaacaccgaaggtggttatgtctgccggtgctcagaaggctaccaaggagatgggattcactgtcttgatattgatgagtgccaactgggggagcacagctgtggagagaatgccagctgcacaaatacagagggaggctatacctgcatgtgtgctggacgcctgtctgaaccaggactgatttgccctgactctactccaccccctcacctcagggaagatgaccaccactattccgtaagaaatagtgactctgaatgtcccctgtcccacgatgggtactgcctccatgatggtgtgtgcatgtatattgaagcattggacaagtatgcatgcaactgtgttgttggctacatcggggagcgatgtcagtaccgagacctgaagtggtgggaactgcgccacgctggccacgggcagcagcagaaggtcatcgtggtggctgtctgcgtggtggtgcttgtcatgctgctcctcctgagcctgtggggggcccactactacaggactcagaagctgctatcgaaaaacccaaagaatccttatgaggagtcgagcagagatgtgaggagtcgcaggcctgctgacactgaggatgggatgtcctcttgccctcaaccttggtttgtggttataaaagaacaccaagacctcaagaatgggggtcaaccagtggctggtgaggatggccaggcagcagatgggtcaatgcaaccaacttcatggaggcaggagccccagttatgtggaatgggcacagagcaaggctgctggattccagtatccagtgataagggctcctgtccccaggtaatggagcgaagctttcatatgccctcctatgggacacagacccttgaagggggtgtcgagaagccccattctctcctatcagctaacccattatggcaacaaagggccctggacccaccacaccaaatggagctgactcagtgaaaactggaattaaaaggaaagtcaagaagaatgaactatgtcgatgcacagtatcttttctttcaaaagtagagcaaaactataggttttggttccacaatctctacgactaatcacctactcaatgcctggagacagatacgtagttgtgcttttgtttgctcttttaagcagtctcactgcagtcttatttccaagtaagagtactgggagaatcactaggtaacttattagaaacccaaattgggacaacagtgctttgtaaattgtgttgtcttcagcagtcaatacaaatagatttttgtttttgttgttcctgcagccccagaagaaattaggggttaaagcagacagtcacactggtttggtcagttacaaagtaatttctttgatctggacagaacatttatatcagtttcatgaaatgattggaatattacaataccgttaagatacagtgtaggcatttaactcctcattggcgtggtccatgctgatgattttgcaaaatgagttgtgatgaatcaatgaaaaatgtaatttagaaactgatttcttcagaattagatggcttattttttaaaatatttgaatgaaaacattttatttttaaaatattacacaggaggcttcggagtttcttagtcattactgtccttttcccctacagaattttccctcttggtgtgattgcacagaatttgtatgtattttcagttacaagattgtaagtaaattgcctgatttgttttcattatagacaacgatgaatttcttctaattatttaaataaaatcaccaaaaacataaa

SEQ ID NO: 6316 - DNA, 3642 bp, Homo sapiens
  source 1..3642: mol_type = unassigned DNA; mol_type = unassigned DNA
cagccgcatctggggtcaatcatactcaccttgcccgggccatgctccagcaaaatcaagctgttttcttttgaaagttcaaactcatcaagattatgctgctcactcttatcattctgttgccagtagtttcaaaatttagttttgttagtctctcagcaccgcagcactggagctgtcctgaaggtactctcgcaggaaatgggaattctacttgtgtgggtcctgcacccttcttaattttctcccatggaaatagtatctttaggattgacacagaaggaaccaattatgagcaattggtggtggatgctggtgtctcagtgatcatggattttcattataatgagaaaagaatctattgggtggatttagaaagacaacttttgcaaagagtttttctgaatgggtcaaggcaagagagagtatgtaatatagagaaaaatgtttctggaatggcaataaattggataaatgaagaagttatttggtcaaatcaacaggaaggaatcattacagtaacagatatgaaaggaaataattcccacattcttttaagtgctttaaaatatcctgcaaatgtagcagttgatccagtagaaaggtttatattttggtcttcagaggtggctggaagcctttatagagcagatctcgatggtgtgggagtgaaggctctgttggagacatcagagaaaataacagctgtgtcattggatgtgcttgataagcggctgttttggattcagtacaacagagaaggaagcaattctcttatttgctcctgtgattatgatggaggttctgtccacattagtaaacatccaacacagcataatttgtttgcaatgtccctttttggtgaccgtatcttctattcaacatggaaaatgaagacaatttggatagccaacaaacacactggaaaggacatggttagaattaacctccattcatcatttgtaccacttggtgaactgaaagtagtgcatccacttgcacaacccaaggcagaagatgacacttgggagcctgagcagaaactttgcaaattgaggaaaggaaactgcagcagcactgtgtgtgggcaagacctccagtcacacttgtgcatgtgtgcagagggatacgccctaagtcgagaccggaagtactgtgaagatgttaatgaatgtgctttttggaatcatggctgtactcttgggtgtaaaaacacccctggatcctattactgcacgtgccctgtaggatttgttctgcttcctgatgggaaacgatgtcatcaacttgtttcctgtccacgcaatgtgtctgaatgcagccatgactgtgttctgacatcagaaggtcccttatgtttctgtcctgaaggctcagtgcttgagagagatgggaaaacatgtagcggttgttcctcacccgataatggtggatgtagccagctctgcgttcctcttagcccagtatcctgggaatgtgattgctttcctgggtatgacctacaactggatgaaaaaagctgtgcagcttcaggaccacaaccatttttgctgtttgccaattctcaagatattcgacacatgcattttgatggaacagactatggaactctgctcagccagcagatgggaatggtttatgccctagatcatgaccctgtggaaaataagatatactttgcccatacagccctgaagtggatagagagagctaatatggatggttcccagcgagaaaggcttattgaggaaggagtagatgtgccagaaggtcttgctgtggactggattggccgtagattctattggacagacagagggaaatctctgattggaaggagtgatttaaatgggaaacgttccaaaataatcactaaggagaacatctctcaaccacgaggaattgctgttcatccaatggccaagagattattctggactgatacagggattaatccacgaattgaaagttcttccctccaaggccttggccgtctggttatagccagctctgatctaatctggcccagtggaataacgattgacttcttaactgacaagttgtactggtgcgatgccaagcagtctgtgattgaaatggccaatctggatggttcaaaacgccgaagacttacccagaatgatgtaggtcacccatttgctgtagcagtgtttgaggattatgtgtggttctcagattgggctatgccatcagtaatgagagtaaacaagaggactggcaaagatagagtacgtctccaaggcagcatgctgaagccctcatcactggttgtggttcatccattggcaaaaccaggagcagatccctgcttatatcaaaacggaggctgtgaacatatttgcaaaaagaggcttggaactgcttggtgttcgtgtcgtgaaggttttatgaaagcctcagatgggaaaacgtgtctggctctggatggtcatcagctgttggcaggtggtgaagttgatctaaagaaccaagtaacaccattggacatcttgtccaagactagagtgtcagaagataacattacagaatctcaacacatgctagtggctgaaatcatggtgtcagatcaagatgactgtgctcctgtgggatgcagcatgtatgctcggtgtatttcagagggagaggatgccacatgtcagtgtttgaaaggatttgctggggatggaaaactatgttctgatatagatgaatgtgagatgggtgtcccagtgtgcccccctgcctcctccaagtgcatcaacaccgaaggtggttatgtctgccggtgctcagaaggctaccaaggagatgggattcactgtcttgactctactccaccccctcacctcagggaagatgaccaccactattccgtaagaaatagtgactctgaatgtcccctgtcccacgatgggtactgcctccatgatggtgtgtgcatgtatattgaagcattggacaagtatgcatgcaactgtgttgttggctacatcggggagcgatgtcagtaccgagacctgaagtggtgggaactgcgccacgctggccacgggcagcagcagaaggtcatcgtggtggctgtctgcgtggtggtgcttgtcatgctgctcctcctgagcctgtggggggcccactactacaggactcagaagctgctatcgaaaaacccaaagaatccttatgaggagtcgagcagagatgtgaggagtcgcaggcctgctgacactgaggatgggatgtcctcttgccctcaaccttggtttgtggttataaaagaacaccaagacctcaagaatgggggtcaaccagtggctggtgaggatggccaggcagcagatgggtcaatgcaaccaacttcatggaggcaggagccccagttatgtggaatgggcacagagcaaggctgctggattccagtatccagtgataagggctcctgtccccaggtaatggagcgaagctttcatatgccctcctatgggacacagacccttgaagggggtgtcgagaagccccattctctcctatcagctaacccattatggcaacaaagggccctggacccaccacaccaaatggagctgactcagtgaaaactggaattaaaaggaaagtcaagaagaatgaactatgtcgatg

SEQ ID NO: 6317 - DNA, 683 bp, Homo sapiens
  source 1..683: mol_type = unassigned DNA; mol_type = unassigned DNA
gtgtgaatatctacaggaactctttattgtctataaatagactttattttaaacagaaaaccagtaattaaaaattatttctgcttgtgttggttgtcattgggaagtattttgtttaaatgagataaaatattaaaagtatacagtttggtctctttcttcccacccaggtcctgcacccttcttaattttctcccatggaaatagtatctttaggattgacacagaaggaaccaattatgagcaattggtggtggatgctggtgtctcagtgatcatggattttcattataatgagaaaagaatctattgggtggatttagaaagacaacttttgcaaagagtttttctgaatgggtcaaggcaagagagagtatgtaatatagagaaaaatgtttctggaatggcaataaattggataaatgaagaagttatttggtcaaatcaacaggaaggaatcattacagtaacagatatgaaaggaaataattcccacattcttttaagtgctttaaaatatcctgcaaatgtagcagttgatccagtagaaaggtttatattttggtcttcagaggtggctggaagcctttatagagcagatctcgatggtgtgggagtgaaggctctgttggagacatcagagaaaataacagctgtgtcattggatgtgcttgataagcggc

SEQ ID NO: 6318 - DNA, 584 bp, Homo sapiens
  source 1..584: mol_type = unassigned DNA; mol_type = unassigned DNA
gagaaaaaagtgggcttcgggatgctggggaatctgggctctggctaagtttgcctccgtgagagatgcagctgtagacgttgtagggaggtaagacctcttaagaatcaggaaaagatttagcagtgtcctctgtcaaaacacggccccactccaaataaagcatcttctcttttagagcagaaactttgcaaattgaggaaaggaaactgcagcagcactgtgtgtgggcaagacctccagtcacacttgtgcatgtgtgcagagggatacgccctaagtcgagaccggaagtactgtgaagatgttaatgaatgtgctttttggaatcatggctgtactcttgggtgtaaaaacacccctggatcctattactgcacgtgccctgtaggatttgttctgcttcctgatgggaaacgatgtcatcaacttgtttcctgtccacgcaatgtgtctgaatgcagccatgactgtgttctgacatcagaaggtcccttatgtttctgtcctgaaggctcagtgcttgagagagatgggaaaacatgtagcggttgttcctcacccgataatggtggatgtagcca

SEQ ID NO: 6319 - DNA, 580 bp, Homo sapiens
  source 1..580: mol_type = unassigned DNA; mol_type = unassigned DNA
ggttacacgtatctgggaagcagcctagttcgaatttagttgcaggtgtgcctatctccaaagtcaagctcttaacaccctgtacaacctaaagactagtgccatttgtatatattccacattagttttaaaaaaaaatcagaaatgcctgtgttctcttttgtagatatactttgcccatacagccctgaagtggatagagagagctaatatggatggttcccagcgagaaaggcttattgaggaaggagtagatgtgccagaaggtcttgctgtggactggattggccgtagattctattggacagacagagggaaatctctgattggaaggagtgatttaaatgggaaacgttccaaaataatcactaaggagaacatctctcaaccacgaggaattgctgttcatccaatggccaagagattattctggactgatacagggattaatccacgaattgaaagttcttccctccaaggccttggccgtctggttatagccagctctgatctaatctggcccagtggaataacgattgacttcttaactgacaagttgtactggtgcgatgccaagcag

SEQ ID NO: 6320 - DNA, 432 bp, Homo sapiens
  source 1..432: mol_type = unassigned DNA; mol_type = unassigned DNA
tatagccagctctgatctaatctggcccagtggaataacgattgacttcttaactgacaagttgtactggtgcgatgccaagcagtctgtgattgaaatggccaatctggatggttcaaaacgccgaagacttacccagaatgatgtaggaagaagctaaccaactaataatctgtataagatacctattttgcccattctctttggcttaagataagtataatttaaaattttatgtatttataagattctctaaaaattaaagatatacttcacaataagtgatatgcttatgcacaaccttagactttatcatccttttacttcaggggtatttattgacacattacaggaactgaagatacagtggagggtaaaacaaatatgatatctgcaaagccaaggaatctagtgcagaacacatacattact

SEQ ID NO: 6321 - DNA, 567 bp, Homo sapiens
  source 1..567: mol_type = unassigned DNA; mol_type = unassigned DNA
atcttagaatcagtggctccttgggggaactcttctgaaatagctattgatataccctctatttagatacactgcatttctctccctaaaagctatagctccctaaaagcaagctgtagacttgcattaatggcatccttttcatcttcaaacccacttgtgaatttgtttcttttctctactaggagcagatccctgcttatatcaaaacggaggctgtgaacatatttgcaaaaagaggcttggaactgcttggtgttcgtgtcgtgaaggttttatgaaagcctcagatgggaaaacgtgtctggctctggatggtcatcagctgttggcaggtggtgaagttgatctaaagaaccaagtaacaccattggacatcttgtccaagactagagtgtcagaagataacattacagaatctcaacacatgctagtggctgaaatcatggtgtcagatcaagatgactgtgctcctgtgggatgcagcatgtatgctcggtgtatttcagagggagaggatgccacatgtcagtgtttgaaaggatttgctggggatggaaaactatg

SEQ ID NO: 6322 - DNA, 1464 bp, Homo sapiens
  source 1..1464: mol_type = unassigned DNA; mol_type = unassigned DNA
gaaatagctattgatataccctctatttagatacactgcatttctctccctaaaagctatagctccctaaaagcaagctgtagacttgcattaatggcatccttttcatcttcaaacccacttgtgaatttgtttcttttctctactaggagcagatccctgcttatatcaaaacggaggctgtgaacatatttgcaaaaagaggcttggaactgcttggtgttcgtgtcgtgaaggttttatgaaagcctcagatgggaaaacgtgtctggctctggatggtcatcagctgttggcaggtggtgaagttgatctaaagaaccaagtaacaccattggacatcttgtccaagactagagtgtcagaagataacattacagaatctcaacacatgctagtggctgaaatcatggtgtcagatattgatgagtgccaactgggggagcacagctgtggagagaatgccagctgcacaaatacagagggaggctatacctgcatgtgtgctggacgcctgtctgaaccaggactgatttgccctgactctactccaccccctcacctcagggaagatgaccaccactattccgtaagaaatagtgactctgaatgtcccctgtcccacgatgggtactgcctccatgatggtgtgtgcatgtatattgaagcattggacaagtatgcatgcaactgtgttgttggctacatcggggagcgatgtcagtaccgagacctgaagtggtgggaactgcgccacgctggccacgggcagcagcagaaggtcatcgtggtggctgtctgcgtggtggtgcttgtcatgctgctcctcctgagcctgtggggggcccactactacaggactcagaagctgctatcgaaaaacccaaagaatccttatgaggagtcgagcagagatgtgaggagtcgcaggcctgctgacactgaggatgggatgtcctcttgccctcaaccttggggtcaatgcaaccaacttcatggaggcaggagccccagttatgtggaatgggcacagagcaaggctgctggattccagtatccagtgataagggctcctgtccccaggtaatggagcgaagctttcatatgccctcctatgggacacagacccttgaagggggtgtcgagaagccccattctctcctatcagctaacccattatggcaacaaagggccctggacccaccacaccaaatggagctgactcagtgaaaactggaattaaaaggaaagtcaagaagaatgaactatgtcgatgcacagtatcttttctttcaaaagtagagcaaaactataggttttggttccacaatctctacgactaatcacctactcaatgcctggagacagatacgtagttgtgcttttgtttgctcttttaagcagtctcactgcagtcttatttccaagtaagagtactgggagaatcactaggtaacttattag

SEQ ID NO: 6323 - DNA, 773 bp, Homo sapiens
  source 1..773: mol_type = unassigned DNA; mol_type = unassigned DNA
cacacaaacacacacacaccctctacctcacagaaccttggaaagagtgaaacactgtctggaaagcattttgagttctgcagaaaagactgccttaaacatctaaagttatgttcctagttatcttcatatttcttctctcccacacaagtacttaaattttagtagcaaaagcagttagttgtccctgatcatcactgagtgggctgagtattttgttttgttgtgagattgtctcaaattttggctttatcacaggactcagaagctgctatcgaaaaacccaaagaatccttatgaggagtcgagcagagatgtgaggagtcgcaggcctgctgacactgaggatgggatgtcctcttgccctcaaccttggggtcaatgcaaccaacttcatggaggcaggagccccagttatgtggaatgggcacagagcaaggctgctggattccagtatccagtgataagggctcctgtccccaggtaatggagcgaagctttcatatgccctcctatgggacacagacccttgaagggggtgtcgagaagccccattctctcctatcagctaacccattatggcaacaaagggccctggacccaccacaccaaatggagctgactcagtgaaaactggaattaaaaggaaagtcaagaagaatgaactatgtcgatgcacagtatcttttctttcaaaagtagagcaaaactataggttttggttccacaatctctacgactaatcacctactcaatgcctggagacagatacg

SEQ ID NO: 6324 - DNA, 491 bp, Homo sapiens
  source 1..491: mol_type = unassigned DNA; mol_type = unassigned DNA
acaggactcagaagctgctatcgaaaaacccaaagaatccttatgaggagtcgagcagagatgtgaggagtcgcaggcctgctgacactgaggatgggatgtcctcttgccctcaaccttggtttgtggttataaaagaacaccaagacctcaagaatgggggtcaaccagtggctggtgaggatggccaggcagcagatgggtcaatgcaaccaacttcatggaggcaggagccccagttatgtggaatgggcacagagcaaggctgctggattccagtatccagtgataagggctcctgtccccaggtaatggagcgaagctttcatatgccctcctatgggacacagacccttgaagggggtgtcgagaagccccattctctcctatcagctaacccattatggcaacaaagggccctggacccaccacaccaaatggagctgactcagtgaaaactggaattaaaaggaaagtcaagaagaatgaac

SEQ ID NO: 6325 - DNA, 324 bp, Homo sapiens
  source 1..324: mol_type = unassigned DNA; mol_type = unassigned DNA
acaggactcagaagctgctatcgaaaaacccaaagaatccttatgaggagtcgagcagagatgtgaggagtcgcaggcctgctgacactgaggatgggatgtcctcttgccctcaaccttggggtcaatgcaaccaacttcatggaggcaggagccccagttatgtggaatgggcacagagcaaggctgctggattccagtatccagtgataagggctcctgtccccagaattttccctcttggtgtgattgcacagaatttgtatgtattttcagttacaagattgtaagtaaattgcctgatttgttttcattatagacaac

SEQ ID NO: 6326 - DNA, 452 bp, Homo sapiens
  source 1..452: mol_type = unassigned DNA; mol_type = unassigned DNA
ccgccgcccagaccggacgacaggccacctcgtcggcgtccgcccgagtccccgcctcgccgccaacgccacaaccaccgcgcacggccccctgactccgtccagtattgatcgggagagccggagcgagctcttcggggagcagcgatgcgaccctccgggacggccggggcagcgctcctggcgctgctggctgcgctctgcccggcgagtcgggctctggaggaaaagaaagttaatgatcctttgcctggactttctaagtgcccagaagagcaacagccagcatgcaggatggcattcctgaccagttgcacttggcctagcattccaacctcacctgcctcagcttgttcaacctgaaaacctaccaagtgaaagcaagagccacgtgaagacgccttagttatatgcacccacccagacacttgctcagaaaggaatcagtgggg

SEQ ID NO: 6327 - DNA, 561 bp, Homo sapiens
  source 1..561: mol_type = unassigned DNA; mol_type = unassigned DNA
caggccacctcgtcggcgtccgcccgagtccccgcctcgccgccaacgccacaaccaccgcgcacggccccctgactccgtccagtattgatcgggagagccggagcgagctcttcggggagcagcgatgcgaccctccgggacggccggggcagcgctcctggcgctgctggctgcgctctgcccggcgagtcgggctctggaggaaaagaaagttcaagtgccattcaatttatcctggcaagaagaggaaggcatcatcaagaccttaattttctaatacatctgatctgagaagaatgtgaaagctataaaattaatttttgatcaataactacaggccttttgagagagtgccctcctaatgaattgagtacctatttctccatacacagtgtctatcatgacctacaaacccttttcccatgaggtgtaacagagagagattacagccttggaactggatgtcagactctcctggtttaagacaataagccatgacatagagcctgaaaccaacacaatcttccgagtggttccagaaacatataggggataatg

SEQ ID NO: 6328 - DNA, 691 bp, Homo sapiens
  source 1..691: mol_type = unassigned DNA; mol_type = unassigned DNA
atcattcctttgggcctaggattgcatttatttccatgacaaaagggcctgtctggtgtttcagcaaatgaaaacaaaaatataaagcccatctccttttgaatgagctctaaaacagttctccactggacttcagaacaagagggagctctgggctgctggctggttgtgcatttgctgtgggttccctccggcaggcgacctctccgcgctgagaaggttatccggataaccaatttgccaaggcacgagtaacaagctcacgcagttgggcacttttgaagatcattttctcagcctccagaggatgttcaataactgtgaggtggtccttgggaatttggaaattacctatgtgcagaggaattatgatctttccttcttaaagaccatccaggaggtggctggttatgtcctcattgccctcaacacagtggagcgaattcctttggaaaacctgcagatcatcagaggaaatatgtactacgaaaattcctatgccttagcagtcttatctaactatgatgcaaataaaaccggactgaaggagctgcccatgagaaatttacaggaaatcctgcatggcgccgtgcggttcagcaacaaccctgccctgtgcaacgtggagagcatccagtggcgggacatagtcagcagtgactttctcagcaacatgtcgatggacttccag

SEQ ID NO: 6329 - DNA, 665 bp, Homo sapiens
  source 1..665: mol_type = unassigned DNA; mol_type = unassigned DNA
tatacccaccagagtgatgtctggagctacggggtgactgtttgggagttgatgacctttggatccaagccatatgacggaatccctgccagcgagatctcctccatcctggagaaaggagaacgcctccctcagccacccatatgtaccatcgatgtctacatgatcatggtcaagtgctggatgatagacgcagatagtcgcccaaagttccgtgagttgatcatcgaattctccaaaatggcccgagacccccagcgctaccttgtcattcaggtacaaattgcagtctgtgcttccattgggaagagtccctctaatgagcatctcatgtcactgtgttctgtcacatgccagcctggcctccctgtgtcccagatcgcattattaaaccctccagcgcattagagcaagcctcagtaaggcgcaggccacatcgtgaactaagcagcatccgtgagtggggcccacccaactccatctccccctccccgtctgaactctcctctggtgctcgtcctcactgtccggctagccaaagcctcagctgggtctaagagagaagcatggtctattgggctttggtgtcaggcagacgtggcttcacacccctgactctccacttcttcgcatcacccaggcagccgatccacctatctccttcc

SEQ ID NO: 6330 - DNA, 4735 bp, Homo sapiens
  source 1..4735: mol_type = unassigned DNA; mol_type = unassigned DNA
atgagttctctgaccaaaatcatctgtgcccagcagtgctccgggcgctgccgtggcaagtcccccagtgactgctgccacaaccagtgtgctgcaggctgcacaggcccccgggagagcgactgcctggtctgccgcaaattccgagacgaagccacgtgcaaggacacctgccccccactcatgctctacaaccccaccacgtaccagatggatgtgaaccccgagggcaaatacagctttggtgccacctgcgtgaagaagtgtccccgtaattatgtggtgacagatcacggctcgtgcgtccgagcctgtggggccgacagctatgagatggaggaagacggcgtccgcaagtgtaagaagtgcgaagggccttgccgcaaagtgtgtaacggaataggtattggtgaatttaaagactcactctccataaatgctacgaatattaaacacttcaaaaactgcacctccatcagtggcgatctccacatcctgccggtggcatttaggggtgactccttcacacatactcctcctctggatccacaggaactggatattctgaaaaccgtaaaggaaatcacagggtttttgctgattcaggcttggcctgaaaacaggacggacctccatgcctttgagaacctagaaatcatacgcggcaggaccaagcaacatggtcagttttctcttgcagtcgtcagcctgaacataacatccttgggattacgctccctcaaggagataagtgatggagatgtgataatttcaggaaacaaaaatttgtgctatgcaaatacaataaactggaaaaaactgtttgggacctccggtcagaaaaccaaaattataagcaacagaggtgaaaacagctgcaaggccacaggccaggtctgccatgccttgtgctcccccgagggctgctggggcccggagcccagggactgcgtctcttgccggaatgtcagccgaggcagggaatgcgtggacaagtgcaaccttctggagggtgagccaagggagtttgtggagaactctgagtgcatacagtgccacccagagtgcctgcctcaggccatgaacatcacctgcacaggacggggaccagacaactgtatccagtgtgcccactacattgacggcccccactgcgtcaagacctgcccggcaggagtcatgggagaaaacaacaccctggtctggaagtacgcagacgccggccatgtgtgccacctgtgccatccaaactgcacctacggatgcactgggccaggtcttgaaggctgtccaacgaatgggcctaagatcccgtccatcgccactgggatggtgggggccctcctcttgctgctggtggtggccctggggatcggcctcttcatgcgaaggcgccacatcgttcggaagcgcacgctgcggaggctgctgcaggagagggagcttgtggagcctcttacacccagtggagaagctcccaaccaagctctcttgaggatcttgaaggaaactgaattcaaaaagatcaaagtgctgggctccggtgcgttcggcacggtgtataagggactctggatcccagaaggtgagaaagttaaaattcccgtcgctatcaaggaattaagagaagcaacatctccgaaagccaacaaggaaatcctcgatgaagcctacgtgatggccagcgtggacaacccccacgtgtgccgcctgctgggcatctgcctcacctccaccgtgcagctcatcacgcagctcatgcccttcggctgcctcctggactatgtccgggaacacaaagacaatattggctcccagtacctgctcaactggtgtgtgcagatcgcaaagggcatgaactacttggaggaccgtcgcttggtgcaccgcgacctggcagccaggaacgtactggtgaaaacaccgcagcatgtcaagatcacagattttgggctggccaaactgctgggtgcggaagagaaagaataccatgcagaaggaggcaaagtgcctatcaagtggatggcattggaatcaattttacacagaatctatacccaccagagtgatgtctggagctacggggtgactgtttgggagttgatgacctttggatccaagccatatgacggaatccctgccagcgagatctcctccatcctggagaaaggagaacgcctccctcagccacccatatgtaccatcgatgtctacatgatcatggtcaagtgctggatgatagacgcagatagtcgcccaaagttccgtgagttgatcatcgaattctccaaaatggcccgagacccccagcgctaccttgtcattcagggggatgaaagaatgcatttgccaagtcctacagactccaacttctaccgtgccctgatggatgaagaagacatggacgacgtggtggatgccgacgagtacctcatcccacagcagggcttcttcagcagcccctccacgtcacggactcccctcctgagctctctgagtgcaaccagcaacaattccaccgtggcttgcattgatagaaatgggctgcaaagctgtcccatcaaggaagacagcttcttgcagcgatacagctcagaccccacaggcgccttgactgaggacagcatagacgacaccttcctcccagtgcctgaatacataaaccagtccgttcccaaaaggcccgctggctctgtgcagaatcctgtctatcacaatcagcctctgaaccccgcgcccagcagagacccacactaccaggacccccacagcactgcagtgggcaaccccgagtatctcaacactgtccagcccacctgtgtcaacagcacattcgacagccctgcccactgggcccagaaaggcagccaccaaattagcctggacaaccctgactaccagcaggacttctttcccaaggaagccaagccaaatggcatctttaagggctccacagctgaaaatgcagaatacctaagggtcgcgccacaaagcagtgaatttattggagcatgaccacggaggatagtatgagccctaaaaatccagactctttcgatacccaggaccaagccacagcaggtcctccatcccaacagccatgcccgcattagctcttagacccacagactggttttgcaacgtttacaccgactagccaggaagtacttccacctcgggcacattttgggaagttgcattcctttgtcttcaaactgtgaagcatttacagaaacgcatccagcaagaatattgtccctttgagcagaaatttatctttcaaagaggtatatttgaaaaaaaaaaaaagtatatgtgaggatttttattgattggggatcttggagtttttcattgtcgctattgatttttacttcaatgggctcttccaacaaggaagaagcttgctggtagcacttgctaccctgagttcatccaggcccaactgtgagcaaggagcacaagccacaagtcttccagaggatgcttgattccagtggttctgcttcaaggcttccactgcaaaacactaaagatccaagaaggccttcatggccccagcaggccggatcggtactgtatcaagtcatggcaggtacagtaggataagccactctgtcccttcctgggcaaagaagaaacggaggggatggaattcttccttagacttacttttgtaaaaatgtccccacggtacttactccccactgatggaccagtggtttccagtcatgagcgttagactgacttgtttgtcttccattccattgttttgaaactcagtatgctgcccctgtcttgctgtcatgaaatcagcaagagaggatgacacatcaaataataactcggattccagcccacattggattcatcagcatttggaccaatagcccacagctgagaatgtggaatacctaaggatagcaccgcttttgttctcgcaaaaacgtatctcctaatttgaggctcagatgaaatgcatcaggtcctttggggcatagatcagaagactacaaaaatgaagctgctctgaaatctcctttagccatcaccccaaccccccaaaattagtttgtgttacttatggaagatagttttctccttttacttcacttcaaaagctttttactcaaagagtatatgttccctccaggtcagctgcccccaaaccccctccttacgctttgtcacacaaaaagtgtctctgccttgagtcatctattcaagcacttacagctctggccacaacagggcattttacaggtgcgaatgacagtagcattatgagtagtgtggaattcaggtagtaaatatgaaactagggtttgaaattgataatgctttcacaacatttgcagatgttttagaaggaaaaaagttccttcctaaaataatttctctacaattggaagattggaagattcagctagttaggagcccaccttttttcctaatctgtgtgtgccctgtaacctgactggttaacagcagtcctttgtaaacagtgttttaaactctcctagtcaatatccaccccatccaatttatcaaggaagaaatggttcagaaaatattttcagcctacagttatgttcagtcacacacacatacaaaatgttccttttgcttttaaagtaatttttgactcccagatcagtcagagcccctacagcattgttaagaaagtatttgatttttgtctcaatgaaaataaaactatattcatttccactct

SEQ ID NO: 6331 - DNA, 5464 bp, Homo sapiens
  source 1..5464: mol_type = unassigned DNA; mol_type = unassigned DNA
ccccggcgcagcgcggccgcagcagcctccgccccccgcacggtgtgagcgcccgacgcggccgaggcggccggagtcccgagctagccccggcggccgccgccgcccagaccggacgacaggccacctcgtcggcgtccgcccgagtccccgcctcgccgccaacgccacaaccaccgcgcacggccccctgactccgtccagtattgatcgggagagccggagcgagctcttcggggagcagcgatgcgaccctccgggacggccggggcagcgctcctggcgctgctggctgcgctctgcccggcgagtcgggctctggaggaaaagaaagtttgccaaggcacgagtaacaagctcacgcagttgggcacttttgaagatcattttctcagcctccagaggatgttcaataactgtgaggtggtccttgggaatttggaaattacctatgtgcagaggaattatgatctttccttcttaaagaccatccaggaggtggctggttatgtcctcattgccctcaacacagtggagcgaattcctttggaaaacctgcagatcatcagaggaaatatgtactacgaaaattcctatgccttagcagtcttatctaactatgatgcaaataaaaccggactgaaggagctgcccatgagaaatttacagggccaaaagtgtgatccaagctgtcccaatgggagctgctggggtgcaggagaggagaactgccagaaactgaccaaaatcatctgtgcccagcagtgctccgggcgctgccgtggcaagtcccccagtgactgctgccacaaccagtgtgctgcaggctgcacaggcccccgggagagcgactgcctggtctgccgcaaattccgagacgaagccacgtgcaaggacacctgccccccactcatgctctacaaccccaccacgtaccagatggatgtgaaccccgagggcaaatacagctttggtgccacctgcgtgaagaagtgtccccgtaattatgtggtgacagatcacggctcgtgcgtccgagcctgtggggccgacagctatgagatggaggaagacggcgtccgcaagtgtaagaagtgcgaagggccttgccgcaaagtgtgtaacggaataggtattggtgaatttaaagactcactctccataaatgctacgaatattaaacacttcaaaaactgcacctccatcagtggcgatctccacatcctgccggtggcatttaggggtgactccttcacacatactcctcctctggatccacaggaactggatattctgaaaaccgtaaaggaaatcacagggtttttgctgattcaggcttggcctgaaaacaggacggacctccatgcctttgagaacctagaaatcatacgcggcaggaccaagcaacatggtcagttttctcttgcagtcgtcagcctgaacataacatccttgggattacgctccctcaaggagataagtgatggagatgtgataatttcaggaaacaaaaatttgtgctatgcaaatacaataaactggaaaaaactgtttgggacctccggtcagaaaaccaaaattataagcaacagaggtgaaaacagctgcaaggccacaggccaggtctgccatgccttgtgctcccccgagggctgctggggcccggagcccagggactgcgtctcttgccggaatgtcagccgaggcagggaatgcgtggacaagtgcaaccttctggagggtgagccaagggagtttgtggagaactctgagtgcatacagtgccacccagagtgcctgcctcaggccatgaacatcacctgcacaggacggggaccagacaactgtatccagtgtgcccactacattgacggcccccactgcgtcaagacctgcccggcaggagtcatgggagaaaacaacaccctggtctggaagtacgcagacgccggccatgtgtgccacctgtgccatccaaactgcacctacggatgcactgggccaggtcttgaaggctgtccaacgaatgggcctaagatcccgtccatcgccactgggatggtgggggccctcctcttgctgctggtggtggccctggggatcggcctcttcatgcgaaggcgccacatcgttcggaagcgcacgctgcggaggctgctgcaggagagggagcttgtggagcctcttacacccagtggagaagctcccaaccaagctctcttgaggatcttgaaggaaactgaattcaaaaagatcaaagtgctgggctccggtgcgttcggcacggtgtataagggactctggatcccagaaggtgagaaagttaaaattcccgtcgctatcaaggaattaagagaagcaacatctccgaaagccaacaaggaaatcctcgatgaagcctacgtgatggccagcgtggacaacccccacgtgtgccgcctgctgggcatctgcctcacctccaccgtgcagctcatcacgcagctcatgcccttcggctgcctcctggactatgtccgggaacacaaagacaatattggctcccagtacctgctcaactggtgtgtgcagatcgcaaagggcatgaactacttggaggaccgtcgcttggtgcaccgcgacctggcagccaggaacgtactggtgaaaacaccgcagcatgtcaagatcacagattttgggctggccaaactgctgggtgcggaagagaaagaataccatgcagaaggaggcaaagtgcctatcaagtggatggcattggaatcaattttacacagaatctatacccaccagagtgatgtctggagctacggggtgactgtttgggagttgatgacctttggatccaagccatatgacggaatccctgccagcgagatctcctccatcctggagaaaggagaacgcctccctcagccacccatatgtaccatcgatgtctacatgatcatggtcaagtgctggatgatagacgcagatagtcgcccaaagttccgtgagttgatcatcgaattctccaaaatggcccgagacccccagcgctaccttgtcattcagggggatgaaagaatgcatttgccaagtcctacagactccaacttctaccgtgccctgatggatgaagaagacatggacgacgtggtggatgccgacgagtacctcatcccacagcagggcttcttcagcagcccctccacgtcacggactcccctcctgagctctctgagtgcaaccagcaacaattccaccgtggcttgcattgatagaaatgggctgcaaagctgtcccatcaaggaagacagcttcttgcagcgatacagctcagaccccacaggcgccttgactgaggacagcatagacgacaccttcctcccagtgcctgaatacataaaccagtccgttcccaaaaggcccgctggctctgtgcagaatcctgtctatcacaatcagcctctgaaccccgcgcccagcagagacccacactaccaggacccccacagcactgcagtgggcaaccccgagtatctcaacactgtccagcccacctgtgtcaacagcacattcgacagccctgcccactgggcccagaaaggcagccaccaaattagcctggacaaccctgactaccagcaggacttctttcccaaggaagccaagccaaatggcatctttaagggctccacagctgaaaatgcagaatacctaagggtcgcgccacaaagcagtgaatttattggagcatgaccacggaggatagtatgagccctaaaaatccagactctttcgatacccaggaccaagccacagcaggtcctccatcccaacagccatgcccgcattagctcttagacccacagactggttttgcaacgtttacaccgactagccaggaagtacttccacctcgggcacattttgggaagttgcattcctttgtcttcaaactgtgaagcatttacagaaacgcatccagcaagaatattgtccctttgagcagaaatttatctttcaaagaggtatatttgaaaaaaaaaaaaagtatatgtgaggatttttattgattggggatcttggagtttttcattgtcgctattgatttttacttcaatgggctcttccaacaaggaagaagcttgctggtagcacttgctaccctgagttcatccaggcccaactgtgagcaaggagcacaagccacaagtcttccagaggatgcttgattccagtggttctgcttcaaggcttccactgcaaaacactaaagatccaagaaggccttcatggccccagcaggccggatcggtactgtatcaagtcatggcaggtacagtaggataagccactctgtcccttcctgggcaaagaagaaacggaggggatggaattcttccttagacttacttttgtaaaaatgtccccacggtacttactccccactgatggaccagtggtttccagtcatgagcgttagactgacttgtttgtcttccattccattgttttgaaactcagtatgctgcccctgtcttgctgtcatgaaatcagcaagagaggatgacacatcaaataataactcggattccagcccacattggattcatcagcatttggaccaatagcccacagctgagaatgtggaatacctaaggatagcaccgcttttgttctcgcaaaaacgtatctcctaatttgaggctcagatgaaatgcatcaggtcctttggggcatagatcagaagactacaaaaatgaagctgctctgaaatctcctttagccatcaccccaaccccccaaaattagtttgtgttacttatggaagatagttttctccttttacttcacttcaaaagctttttactcaaagagtatatgttccctccaggtcagctgcccccaaaccccctccttacgctttgtcacacaaaaagtgtctctgccttgagtcatctattcaagcacttacagctctggccacaacagggcattttacaggtgcgaatgacagtagcattatgagtagtgtggaattcaggtagtaaatatgaaactagggtttgaaattgataatgctttcacaacatttgcagatgttttagaaggaaaaaagttccttcctaaaataatttctctacaattggaagattggaagattcagctagttaggagcccaccttttttcctaatctgtgtgtgccctgtaacctgactggttaacagcagtcctttgtaaacagtgttttaaactctcctagtcaatatccaccccatccaatttatcaaggaagaaatggttcagaaaatattttcagcctacagttatgttcagtcacacacacatacaaaatgttccttttgcttttaaagtaatttttgactcccagatcagtcagagcccctacagcattgttaagaaagtatttgatttttgtctcaatgaaaataaaactatattcatttccactct

SEQ ID NO: 6332 - DNA, 3844 bp, Homo sapiens
  source 1..3844: mol_type = unassigned DNA; mol_type = unassigned DNA
gtccgggcagcccccggcgcagcgcggccgcagcagcctccgccccccgcacggtgtgagcgcccgacgcggccgaggcggccggagtcccgagctagccccggcggccgccgccgcccagaccggacgacaggccacctcgtcggcgtccgcccgagtccccgcctcgccgccaacgccacaaccaccgcgcacggccccctgactccgtccagtattgatcgggagagccggagcgagctcttcggggagcagcgatgcgaccctccgggacggccggggcagcgctcctggcgctgctggctgcgctctgcccggcgagtcgggctctggaggaaaagaaagtttgccaaggcacgagtaacaagctcacgcagttgggcacttttgaagatcattttctcagcctccagaggatgttcaataactgtgaggtggtccttgggaatttggaaattacctatgtgcagaggaattatgatctttccttcttaaagaccatccaggaggtggctggttatgtcctcattgccctcaacacagtggagcgaattcctttggaaaacctgcagatcatcagaggaaatatgtactacgaaaattcctatgccttagcagtcttatctaactatgatgcaaataaaaccggactgaaggagctgcccatgagaaatttacagggccaaaagtgtgatccaagctgtcccaatgggagctgctggggtgcaggagaggagaactgccagaaactgaccaaaatcatctgtgcccagcagtgctccgggcgctgccgtggcaagtcccccagtgactgctgccacaaccagtgtgctgcaggctgcacaggcccccgggagagcgactgcctggtctgccgcaaattccgagacgaagccacgtgcaaggacacctgccccccactcatgctctacaaccccaccacgtaccagatggatgtgaaccccgagggcaaatacagctttggtgccacctgcgtgaagaagtgtccccgtaattatgtggtgacagatcacggctcgtgcgtccgagcctgtggggccgacagctatgagatggaggaagacggcgtccgcaagtgtaagaagtgcgaagggccttgccgcaaagtgtgtaacggaataggtattggtgaatttaaagactcactctccataaatgctacgaatattaaacacttcaaaaactgcacctccatcagtggcgatctccacatcctgccggtggcatttaggggtgactccttcacacatactcctcctctggatccacaggaactggatattctgaaaaccgtaaaggaaatcacagggtttttgctgattcaggcttggcctgaaaacaggacggacctccatgcctttgagaacctagaaatcatacgcggcaggaccaagcaacatggtcagttttctcttgcagtcgtcagcctgaacataacatccttgggattacgctccctcaaggagataagtgatggagatgtgataatttcaggaaacaaaaatttgtgctatgcaaatacaataaactggaaaaaactgtttgggacctccggtcagaaaaccaaaattataagcaacagaggtgaaaacagctgcaaggccacaggccaggtctgccatgccttgtgctcccccgagggctgctggggcccggagcccagggactgcgtctcttgccggaatgtcagccgaggcagggaatgcgtggacaagtgcaaccttctggagggtgagccaagggagtttgtggagaactctgagtgcatacagtgccacccagagtgcctgcctcaggccatgaacatcacctgcacaggacggggaccagacaactgtatccagtgtgcccactacattgacggcccccactgcgtcaagacctgcccggcaggagtcatgggagaaaacaacaccctggtctggaagtacgcagacgccggccatgtgtgccacctgtgccatccaaactgcacctacggatgcactgggccaggtcttgaaggctgtccaacgaatgggcctaagatcccgtccatcgccactgggatggtgggggccctcctcttgctgctggtggtggccctggggatcggcctcttcatgcgaaggcgccacatcgttcggaagcgcacgctgcggaggctgctgcaggagagggagcttgtggagcctcttacacccagtggagaagctcccaaccaagctctcttgaggatcttgaaggaaactgaattcaaaaagatcaaagtgctgggctccggtgcgttcggcacggtgtataagggactctggatcccagaaggtgagaaagttaaaattcccgtcgctatcaaggaattaagagaagcaacatctccgaaagccaacaaggaaatcctcgatgaagcctacgtgatggccagcgtggacaacccccacgtgtgccgcctgctgggcatctgcctcacctccaccgtgcagctcatcacgcagctcatgcccttcggctgcctcctggactatgtccgggaacacaaagacaatattggctcccagtacctgctcaactggtgtgtgcagatcgcaaagggcatgaactacttggaggaccgtcgcttggtgcaccgcgacctggcagccaggaacgtactggtgaaaacaccgcagcatgtcaagatcacagattttgggctggccaaactgctgggtgcggaagagaaagaataccatgcagaaggaggcaaagtgcctatcaagtggatggcattggaatcaattttacacagaatctatacccaccagagtgatgtctggagctacggggtgactgtttgggagttgatgacctttggatccaagccatatgacggaatccctgccagcgagatctcctccatcctggagaaaggagaacgcctccctcagccacccatatgtaccatcgatgtctacatgatcatggtcaagtgctggatgatagacgcagatagtcgcccaaagttccgtgagttgatcatcgaattctccaaaatggcccgagacccccagcgctaccttgtcattcagggggatgaaagaatgcatttgccaagtcctacagactccaacttctaccgtgccctgatggatgaagaagacatggacgacgtggtggatgccgacgagtacctcatcccacagcagggcttcttcagcagcccctccacgtcacggactcccctcctgagctctctgagtgcaaccagcaacaattccaccgtggcttgcattgatagaaatgggctgcaaagctgtcccatcaaggaagacagcttcttgcagcgatacagctcagaccccacaggcgccttgactgaggacagcatagacgacaccttcctcccagtgcctggtgagtggcttgtctggaaacagtcctgctcctcaacctcctcgacccactcagcagcagccagtctccagtgtccaagccaggtgctccctccagcatctccagagggggaaacagtggcagatttgcagacacagtgaagggcgtaaggagcagataaacacatgaccgagcctgcacaagctctttgttgtgtctggttgtttgctgtacctctgttgtaagaatgaatctgcaaaatttctagcttatgaagcaaatcacggacatacacatctgtgtgtgtgagtgttcatgatgtgtgtacatctgtgtatgtgtgtgtgtgtatgtgtgtgtttgtgacagatttgatccctgttctctctgctggctctatcttgacctgtgaaacgtatatttaactaattaaatattagttaatattaataaattttaagctttatccaga

SEQ ID NO: 6333 - DNA, 2239 bp, Homo sapiens
  source 1..2239: mol_type = unassigned DNA; mol_type = unassigned DNA
ccccggcgcagcgcggccgcagcagcctccgccccccgcacggtgtgagcgcccgacgcggccgaggcggccggagtcccgagctagccccggcggccgccgccgcccagaccggacgacaggccacctcgtcggcgtccgcccgagtccccgcctcgccgccaacgccacaaccaccgcgcacggccccctgactccgtccagtattgatcgggagagccggagcgagctcttcggggagcagcgatgcgaccctccgggacggccggggcagcgctcctggcgctgctggctgcgctctgcccggcgagtcgggctctggaggaaaagaaagtttgccaaggcacgagtaacaagctcacgcagttgggcacttttgaagatcattttctcagcctccagaggatgttcaataactgtgaggtggtccttgggaatttggaaattacctatgtgcagaggaattatgatctttccttcttaaagaccatccaggaggtggctggttatgtcctcattgccctcaacacagtggagcgaattcctttggaaaacctgcagatcatcagaggaaatatgtactacgaaaattcctatgccttagcagtcttatctaactatgatgcaaataaaaccggactgaaggagctgcccatgagaaatttacaggaaatcctgcatggcgccgtgcggttcagcaacaaccctgccctgtgcaacgtggagagcatccagtggcgggacatagtcagcagtgactttctcagcaacatgtcgatggacttccagaaccacctgggcagctgccaaaagtgtgatccaagctgtcccaatgggagctgctggggtgcaggagaggagaactgccagaaactgaccaaaatcatctgtgcccagcagtgctccgggcgctgccgtggcaagtcccccagtgactgctgccacaaccagtgtgctgcaggctgcacaggcccccgggagagcgactgcctggtctgccgcaaattccgagacgaagccacgtgcaaggacacctgccccccactcatgctctacaaccccaccacgtaccagatggatgtgaaccccgagggcaaatacagctttggtgccacctgcgtgaagaagtgtccccgtaattatgtggtgacagatcacggctcgtgcgtccgagcctgtggggccgacagctatgagatggaggaagacggcgtccgcaagtgtaagaagtgcgaagggccttgccgcaaagtgtgtaacggaataggtattggtgaatttaaagactcactctccataaatgctacgaatattaaacacttcaaaaactgcacctccatcagtggcgatctccacatcctgccggtggcatttaggggtgactccttcacacatactcctcctctggatccacaggaactggatattctgaaaaccgtaaaggaaatcacagggtttttgctgattcaggcttggcctgaaaacaggacggacctccatgcctttgagaacctagaaatcatacgcggcaggaccaagcaacatggtcagttttctcttgcagtcgtcagcctgaacataacatccttgggattacgctccctcaaggagataagtgatggagatgtgataatttcaggaaacaaaaatttgtgctatgcaaatacaataaactggaaaaaactgtttgggacctccggtcagaaaaccaaaattataagcaacagaggtgaaaacagctgcaaggccacaggccaggtctgccatgccttgtgctcccccgagggctgctggggcccggagcccagggactgcgtctcttgccggaatgtcagccgaggcagggaatgcgtggacaagtgcaaccttctggagggtgagccaagggagtttgtggagaactctgagtgcatacagtgccacccagagtgcctgcctcaggccatgaacatcacctgcacaggacggggaccagacaactgtatccagtgtgcccactacattgacggcccccactgcgtcaagacctgcccggcaggagtcatgggagaaaacaacaccctggtctggaagtacgcagacgccggccatgtgtgccacctgtgccatccaaactgcacctacgggtcctaataaatcttcactgtctgactttagtctcccactaaaactgcatttcctttctacaatttcaatttctccctttgcttcaaataaagtcctgacactattcatttga

SEQ ID NO: 6334 - DNA, 2864 bp, Homo sapiens
  source 1..2864: mol_type = unassigned DNA; mol_type = unassigned DNA
cccggcgcagcgcggccgcagcagcctccgccccccgcacggtgtgagcgcccgacgcggccgaggcggccggagtcccgagctagccccggcggccgccgccgcccagaccggacgacaggccacctcgtcggcgtccgcccgagtccccgcctcgccgccaacgccacaaccaccgcgcacggccccctgactccgtccagtattgatcgggagagccggagcgagctcttcggggagcagcgatgcgaccctccgggacggccggggcagcgctcctggcgctgctggctgcgctctgcccggcgagtcgggctctggaggaaaagaaagtttgccaaggcacgagtaacaagctcacgcagttgggcacttttgaagatcattttctcagcctccagaggatgttcaataactgtgaggtggtccttgggaatttggaaattacctatgtgcagaggaattatgatctttccttcttaaagaccatccaggaggtggctggttatgtcctcattgccctcaacacagtggagcgaattcctttggaaaacctgcagatcatcagaggaaatatgtactacgaaaattcctatgccttagcagtcttatctaactatgatgcaaataaaaccggactgaaggagctgcccatgagaaatttacaggaaatcctgcatggcgccgtgcggttcagcaacaaccctgccctgtgcaacgtggagagcatccagtggcgggacatagtcagcagtgactttctcagcaacatgtcgatggacttccagaaccacctgggcagctgccaaaagtgtgatccaagctgtcccaatgggagctgctggggtgcaggagaggagaactgccagaaactgaccaaaatcatctgtgcccagcagtgctccgggcgctgccgtggcaagtcccccagtgactgctgccacaaccagtgtgctgcaggctgcacaggcccccgggagagcgactgcctggtctgccgcaaattccgagacgaagccacgtgcaaggacacctgccccccactcatgctctacaaccccaccacgtaccagatggatgtgaaccccgagggcaaatacagctttggtgccacctgcgtgaagaagtgtccccgtaattatgtggtgacagatcacggctcgtgcgtccgagcctgtggggccgacagctatgagatggaggaagacggcgtccgcaagtgtaagaagtgcgaagggccttgccgcaaagtgtgtaacggaataggtattggtgaatttaaagactcactctccataaatgctacgaatattaaacacttcaaaaactgcacctccatcagtggcgatctccacatcctgccggtggcatttaggggtgactccttcacacatactcctcctctggatccacaggaactggatattctgaaaaccgtaaaggaaatcacagggtttttgctgattcaggcttggcctgaaaacaggacggacctccatgcctttgagaacctagaaatcatacgcggcaggaccaagcaacatggtcagttttctcttgcagtcgtcagcctgaacataacatccttgggattacgctccctcaaggagataagtgatggagatgtgataatttcaggaaacaaaaatttgtgctatgcaaatacaataaactggaaaaaactgtttgggacctccggtcagaaaaccaaaattataagcaacagaggtgaaaacagctgcaaggccacaggccaggtctgccatgccttgtgctcccccgagggctgctggggcccggagcccagggactgcgtctcttgccggaatgtcagccgaggcagggaatgcgtggacaagtgcaaccttctggagggtgagccaagggagtttgtggagaactctgagtgcatacagtgccacccagagtgcctgcctcaggccatgaacatcacctgcacaggacggggaccagacaactgtatccagtgtgcccactacattgacggcccccactgcgtcaagacctgcccggcaggagtcatgggagaaaacaacaccctggtctggaagtacgcagacgccggccatgtgtgccacctgtgccatccaaactgcacctacgggccaggaaatgagagtctcaaagccatgttattctgcctttttaaactatcatcctgtaatcaaagtaatgatggcagcgtgtcccaccagagcgggagcccagctgctcaggagtcatgcttaggatggatcccttctcttctgccgtcagagtttcagctgggttggggtggatgcagccacctccatgcctggccttctgcatctgtgatcatcacggcctcctcctgccactgagcctcatgccttcacgtgtctgttccccccgcttttcctttctgccacccctgcacgtgggccgccaggttcccaagagtatcctacccatttccttccttccactccctttgccagtgcctctcaccccaactagtagctaaccatcacccccaggactgacctcttcctcctcgctgccagatgattgttcaaagcacagaatttgtcagaaacctgcagggactccatgctgccagccttctccgtaattagcatggccccagtccatgcttctagccttggttccttctgcccctctgtttgaaattctagagccagctgtgggacaattatctgtgtcaaaagccagatgtgaaaacatctcaataacaaactggctgctttgttcaatgctagaacaacgcctgtcacagagtagaaactcaaaaatatttgctgagtgaatgaacaaatgaataaatgcataataaataattaaccaccaatccaacatccaga

SEQ ID NO: 6335 - DNA, 1570 bp, Homo sapiens
  source 1..1570: mol_type = unassigned DNA; mol_type = unassigned DNA
ccggcgcagcgcggccgcagcagcctccgccccccgcacggtgtgagcgcccgacgcggccgaggcggccggagtcccgagctagccccggcggccgccgccgcccagaccggacgacaggccacctcgtcggcgtccgcccgagtccccgcctcgccgccaacgccacaaccaccgcgcacggccccctgactccgtccagtattgatcgggagagccggagcgagctcttcggggagcagcgatgcgaccctccgggacggccggggcagcgctcctggcgctgctggctgcgctctgcccggcgagtcgggctctggaggaaaagaaagtttgccaaggcacgagtaacaagctcacgcagttgggcacttttgaagatcattttctcagcctccagaggatgttcaataactgtgaggtggtccttgggaatttggaaattacctatgtgcagaggaattatgatctttccttcttaaagaccatccaggaggtggctggttatgtcctcattgccctcaacacagtggagcgaattcctttggaaaacctgcagatcatcagaggaaatatgtactacgaaaattcctatgccttagcagtcttatctaactatgatgcaaataaaaccggactgaaggagctgcccatgagaaatttacaggaaatcctgcatggcgccgtgcggttcagcaacaaccctgccctgtgcaacgtggagagcatccagtggcgggacatagtcagcagtgactttctcagcaacatgtcgatggacttccagaaccacctgggcagctgccaaaagtgtgatccaagctgtcccaatgggagctgctggggtgcaggagaggagaactgccagaaactgaccaaaatcatctgtgcccagcagtgctccgggcgctgccgtggcaagtcccccagtgactgctgccacaaccagtgtgctgcaggctgcacaggcccccgggagagcgactgcctggtctgccgcaaattccgagacgaagccacgtgcaaggacacctgccccccactcatgctctacaaccccaccacgtaccagatggatgtgaaccccgagggcaaatacagctttggtgccacctgcgtgaagaagtgtccccgtaattatgtggtgacagatcacggctcgtgcgtccgagcctgtggggccgacagctatgagatggaggaagacggcgtccgcaagtgtaagaagtgcgaagggccttgccgcaaagtgtgtaacggaataggtattggtgaatttaaagactcactctccataaatgctacgaatattaaacacttcaaaaactgcacctccatcagtggcgatctccacatcctgccggtggcatttaggggtgactccttcacacatactcctcctctggatccacaggaactggatattctgaaaaccgtaaaggaaatcacaggtttgagctgaattatcacatgaatataaatgggaaatcagtgttttagagagagaacttttcgacatatttcctgttcccttggaataaaaacatttcttctgaaattttaccgttaa

SEQ ID NO: 6336 - DNA, 9821 bp, Homo sapiens
  source 1..9821: mol_type = unassigned DNA; mol_type = unassigned DNA
gccggagtcccgagctagccccggcggccgccgccgcccagaccggacgacaggccacctcgtcggcgtccgcccgagtccccgcctcgccgccaacgccacaaccaccgcgcacggccccctgactccgtccagtattgatcgggagagccggagcgagctcttcggggagcagcgatgcgaccctccgggacggccggggcagcgctcctggcgctgctggctgcgctctgcccggcgagtcgggctctggaggaaaagaaagtttgccaaggcacgagtaacaagctcacgcagttgggcacttttgaagatcattttctcagcctccagaggatgttcaataactgtgaggtggtccttgggaatttggaaattacctatgtgcagaggaattatgatctttccttcttaaagaccatccaggaggtggctggttatgtcctcattgccctcaacacagtggagcgaattcctttggaaaacctgcagatcatcagaggaaatatgtactacgaaaattcctatgccttagcagtcttatctaactatgatgcaaataaaaccggactgaaggagctgcccatgagaaatttacaggaaatcctgcatggcgccgtgcggttcagcaacaaccctgccctgtgcaacgtggagagcatccagtggcgggacatagtcagcagtgactttctcagcaacatgtcgatggacttccagaaccacctgggcagctgccaaaagtgtgatccaagctgtcccaatgggagctgctggggtgcaggagaggagaactgccagaaactgaccaaaatcatctgtgcccagcagtgctccgggcgctgccgtggcaagtcccccagtgactgctgccacaaccagtgtgctgcaggctgcacaggcccccgggagagcgactgcctggtctgccgcaaattccgagacgaagccacgtgcaaggacacctgccccccactcatgctctacaaccccaccacgtaccagatggatgtgaaccccgagggcaaatacagctttggtgccacctgcgtgaagaagtgtccccgtaattatgtggtgacagatcacggctcgtgcgtccgagcctgtggggccgacagctatgagatggaggaagacggcgtccgcaagtgtaagaagtgcgaagggccttgccgcaaagtgtgtaacggaataggtattggtgaatttaaagactcactctccataaatgctacgaatattaaacacttcaaaaactgcacctccatcagtggcgatctccacatcctgccggtggcatttaggggtgactccttcacacatactcctcctctggatccacaggaactggatattctgaaaaccgtaaaggaaatcacagggtttttgctgattcaggcttggcctgaaaacaggacggacctccatgcctttgagaacctagaaatcatacgcggcaggaccaagcaacatggtcagttttctcttgcagtcgtcagcctgaacataacatccttgggattacgctccctcaaggagataagtgatggagatgtgataatttcaggaaacaaaaatttgtgctatgcaaatacaataaactggaaaaaactgtttgggacctccggtcagaaaaccaaaattataagcaacagaggtgaaaacagctgcaaggccacaggccaggtctgccatgccttgtgctcccccgagggctgctggggcccggagcccagggactgcgtctcttgccggaatgtcagccgaggcagggaatgcgtggacaagtgcaaccttctggagggtgagccaagggagtttgtggagaactctgagtgcatacagtgccacccagagtgcctgcctcaggccatgaacatcacctgcacaggacggggaccagacaactgtatccagtgtgcccactacattgacggcccccactgcgtcaagacctgcccggcaggagtcatgggagaaaacaacaccctggtctggaagtacgcagacgccggccatgtgtgccacctgtgccatccaaactgcacctacggatgcactgggccaggtcttgaaggctgtccaacgaatgggcctaagatcccgtccatcgccactgggatggtgggggccctcctcttgctgctggtggtggccctggggatcggcctcttcatgcgaaggcgccacatcgttcggaagcgcacgctgcggaggctgctgcaggagagggagcttgtggagcctcttacacccagtggagaagctcccaaccaagctctcttgaggatcttgaaggaaactgaattcaaaaagatcaaagtgctgggctccggtgcgttcggcacggtgtataagggactctggatcccagaaggtgagaaagttaaaattcccgtcgctatcaaggaattaagagaagcaacatctccgaaagccaacaaggaaatcctcgatgaagcctacgtgatggccagcgtggacaacccccacgtgtgccgcctgctgggcatctgcctcacctccaccgtgcagctcatcacgcagctcatgcccttcggctgcctcctggactatgtccgggaacacaaagacaatattggctcccagtacctgctcaactggtgtgtgcagatcgcaaagggcatgaactacttggaggaccgtcgcttggtgcaccgcgacctggcagccaggaacgtactggtgaaaacaccgcagcatgtcaagatcacagattttgggctggccaaactgctgggtgcggaagagaaagaataccatgcagaaggaggcaaagtgcctatcaagtggatggcattggaatcaattttacacagaatctatacccaccagagtgatgtctggagctacggggtgactgtttgggagttgatgacctttggatccaagccatatgacggaatccctgccagcgagatctcctccatcctggagaaaggagaacgcctccctcagccacccatatgtaccatcgatgtctacatgatcatggtcaagtgctggatgatagacgcagatagtcgcccaaagttccgtgagttgatcatcgaattctccaaaatggcccgagacccccagcgctaccttgtcattcagggggatgaaagaatgcatttgccaagtcctacagactccaacttctaccgtgccctgatggatgaagaagacatggacgacgtggtggatgccgacgagtacctcatcccacagcagggcttcttcagcagcccctccacgtcacggactcccctcctgagctctctgagtgcaaccagcaacaattccaccgtggcttgcattgatagaaatgggctgcaaagctgtcccatcaaggaagacagcttcttgcagcgatacagctcagaccccacaggcgccttgactgaggacagcatagacgacaccttcctcccagtgcctgaatacataaaccagtccgttcccaaaaggcccgctggctctgtgcagaatcctgtctatcacaatcagcctctgaaccccgcgcccagcagagacccacactaccaggacccccacagcactgcagtgggcaaccccgagtatctcaacactgtccagcccacctgtgtcaacagcacattcgacagccctgcccactgggcccagaaaggcagccaccaaattagcctggacaaccctgactaccagcaggacttctttcccaaggaagccaagccaaatggcatctttaagggctccacagctgaaaatgcagaatacctaagggtcgcgccacaaagcagtgaatttattggagcatgaccacggaggatagtatgagccctaaaaatccagactctttcgatacccaggaccaagccacagcaggtcctccatcccaacagccatgcccgcattagctcttagacccacagactggttttgcaacgtttacaccgactagccaggaagtacttccacctcgggcacattttgggaagttgcattcctttgtcttcaaactgtgaagcatttacagaaacgcatccagcaagaatattgtccctttgagcagaaatttatctttcaaagaggtatatttgaaaaaaaaaaaaagtatatgtgaggatttttattgattggggatcttggagtttttcattgtcgctattgatttttacttcaatgggctcttccaacaaggaagaagcttgctggtagcacttgctaccctgagttcatccaggcccaactgtgagcaaggagcacaagccacaagtcttccagaggatgcttgattccagtggttctgcttcaaggcttccactgcaaaacactaaagatccaagaaggccttcatggccccagcaggccggatcggtactgtatcaagtcatggcaggtacagtaggataagccactctgtcccttcctgggcaaagaagaaacggaggggatggaattcttccttagacttacttttgtaaaaatgtccccacggtacttactccccactgatggaccagtggtttccagtcatgagcgttagactgacttgtttgtcttccattccattgttttgaaactcagtatgctgcccctgtcttgctgtcatgaaatcagcaagagaggatgacacatcaaataataactcggattccagcccacattggattcatcagcatttggaccaatagcccacagctgagaatgtggaatacctaaggatagcaccgcttttgttctcgcaaaaacgtatctcctaatttgaggctcagatgaaatgcatcaggtcctttggggcatagatcagaagactacaaaaatgaagctgctctgaaatctcctttagccatcaccccaaccccccaaaattagtttgtgttacttatggaagatagttttctccttttacttcacttcaaaagctttttactcaaagagtatatgttccctccaggtcagctgcccccaaaccccctccttacgctttgtcacacaaaaagtgtctctgccttgagtcatctattcaagcacttacagctctggccacaacagggcattttacaggtgcgaatgacagtagcattatgagtagtgtggaattcaggtagtaaatatgaaactagggtttgaaattgataatgctttcacaacatttgcagatgttttagaaggaaaaaagttccttcctaaaataatttctctacaattggaagattggaagattcagctagttaggagcccaccttttttcctaatctgtgtgtgccctgtaacctgactggttaacagcagtcctttgtaaacagtgttttaaactctcctagtcaatatccaccccatccaatttatcaaggaagaaatggttcagaaaatattttcagcctacagttatgttcagtcacacacacatacaaaatgttccttttgcttttaaagtaatttttgactcccagatcagtcagagcccctacagcattgttaagaaagtatttgatttttgtctcaatgaaaataaaactatattcatttccactctattatgctctcaaatacccctaagcatctatactagcctggtatgggtatgaaagatacaaagataaataaaacatagtccctgattctaagaaattcacaatttagcaaaggaaatggactcatagatgctaaccttaaaacaacgtgacaaatgccagacaggacccatcagccaggcactgtgagagcacagagcagggaggttgggtcctgcctgaggagacctggaagggaggcctcacaggaggatgaccaggtctcagtcagcggggaggtggaaagtgcaggtgcatcaggggcaccctgaccgaggaaacagctgccagaggcctccactgctaaagtccacataaggctgaggtcagtcaccctaaacaacctgctccctctaagccaggggatgagcttggagcatcccacaagttccctaaaagttgcagcccccagggggattttgagctatcatctctgcacatgcttagtgagaagactacacaacatttctaagaatctgagattttatattgtcagttaaccactttcattattcattcacctcaggacatgcagaaatatttcagtcagaactgggaaacagaaggacctacattctgctgtcacttatgtgtcaagaagcagatgatcgatgaggcaggtcagttgtaagtgagtcacattgtagcattaaattctagtatttttgtagtttgaaacagtaacttaataaaagagcaaaagctattctagctttcttcttcatattttaattttccaccataaagtttagttgctaaattctattaattttaagattgtgcttcccaaaatagttctcacttcatctgtccagggaggcacagttctgtctggtagaagccgcaaagcccttagcctcttcacggatctggcgactgtgatgggcaggtcaggagaggagctgcccaaagtcccatgattttcacctaacagccctgatcagtcagtactcaaagcttggactccatccctgaaggtcttcctgattgatagcctggccttaataccctacagaaagcctgtccattggctgtttcttcctcagtcagttcctggaagaccttaccccatgaccccagcttcagatgtggtctttggaaacagaggtcgaaggaaagtaaggagctgagagctcacattcataggtgccgccagccttcgtgcatcttcttgcatcatctctaaggagctcctctaattacaccatgcccgtcaccccatgagggatcagagaagggatgagtcttctaaactctatattcgctgtgagtccaggttgtaagggggagcactgtggatgcatcctattgcactccagctgatgacaccaaagcttaggtgtttgctgaaagttcttgatgttgtgacttaccacccctgcctcacaactgcagacataaggggactatggattgcttagcaggaaaggcactggttctcaagggcggctgcccttgggaatcttctggtcccaaccagaaagactgtggcttgattttctcaggtgcagcccagccgtagggccttttcagagcaccccctggttattgcaacattcatcaaagtttctagaacctctggcctaaaggaagggcctggtgggatctacttggcactcgctggggggccaccccccagtgccactctcactaggcctctgattgcacttgtgtaggatgaagctggtgggtgatgggaactcagcacctcccctcaggcagaaaagaatcatctgtggagcttcaaaagaaggggcctggagtctctgcagaccaattcaacccaaatctcgggggctctttcatgattctaatgggcaaccagggttgaaacccttatttctagggtcttcagttgtacaagactgtgggtctgtaccagagcccccgtcagagtagaataaaaggctgggtagggtagagattcccatgtgcagtggagagaacaatctgcagtcactgataagcctgagacttggctcatttcaaaagcgttcaattcatcctcaccagcagttcagctggaaaggggcaaatacccccacctgagctttgaaaacgccctgggaccctctgcattctctaagtaagttatagaaaccagtctcttccctcctttgtgagtgagctgctattccacgtaggcaacacctgttgaaattgccctcaatgtctactctgcatttctttcttgtgataagcacacacttttattgcaacataatgatctgctcacatttccttgcctgggggctgtaaaaccttacagaacagaaatccttgcctctttcaccagccacacctgccataccaggggtacagctttgtactattgaagacacagacaggatttttaaatgtaaatctatttttgtaactttgttgcgggatatagttctctttatgtagcactgaactttgtacaatatatttttagaaactcatttttctactaaaacaaacacagtttactttagagagactgcaatagaatcaaaatttgaaactgaaatctttgtttaaaagggttaagttgaggcaagaggaaagccctttctctctcttataaaaaggcacaacctcattggggagctaagctaggtcattgtcatggtgaagaagagaagcatcgtttttatatttaggaaattttaaaagatgatggaaagcacatttagcttggtctgaggcaggttctgttggggcagtgttaatggaaagggctcactgttgttactactagaaaaatccagttgcatgccatactctcatcatctgccagtgtaaccctgtacatgtaagaaaagcaataacatagcactttgttggtttatatatataatgtgacttcaatgcaaattttatttttatatttacaattgatatgcatttaccagtataaactagacatgtctggagagcctaataatgttcagcacactttggttagttcaccaacagtcttaccaagcctgggcccagccaccctagagaagttattcagccctggctgcagtgacatcacctgaggagcttttaaaagcttgaagcccagctacacctcagaccgattaaacgcaaatctctggggctgaaacccaagcattcgtagtttttaaagctcctgaggtcattccaatgtgcggccaaagttgagaactactggcctagggattagccacaaggacatggacttggaggcaaattctgcaggtgtatgtgattctcaggcctagagagctaagacacaaagacctccacatctgtcgctgagagtcaagaacctgaacagagtttccatgaaggttctccaagcactagaagggagagtgtctaaacaatggttgaaaagcaaaggaaatataaaacagacacctctttccatttcctaaggtttctctctttattaagggtggactagtaataaaatataatattcttgctgcttatgcagctgacattgttgccctccctaaagcaaccaagtagcctttatttcccacagtgaaagaaaacgctggcctatcagttacattacaaaaggcagatttcaagaggattgagtaagtagttggatggctttcataaaaacaagaattcaagaagaggattcatgctttaagaaacatttgttatacattcctcacaaattatacctgggataaaaactatgtagcaggcagtgtgttttccttccatgtctctctgcactacctgcagtgtgtcctctgaggctgcaagtctgtcctatctgaattcccagcagaagcactaagaagctccaccctatcacctagcagataaaactatggggaaaacttaaatctgtgcatacatttctggatgcatttacttatctttaaaaaaaaaggaatcctatgacctgatttggccacaaaaataatcttgctgtacaatacaatctcttggaaattaagagatcctatggatttgatgactggtattagaggtgacaatgtaaccgattaacaacagacagcaataacttcgttttagaaacattcaagcaatagctttatagcttcaacatatggtacgttttaaccttgaaagttttgcaatgatgaaagcagtatttgtacaaatgaaaagcagaattctcttttatatggtttatactgttgatcagaaatgttgattgtgcattgagtattaaaaaattagatgtatattattcattgttctttactcctgagtaccttataataataataatgtattctttgttaacaa

SEQ ID NO: 6337 - DNA, 2709 bp, Homo sapiens
  source 1..2709: mol_type = unassigned DNA; mol_type = unassigned DNA
ccggagtctggccgcagtcgcggcagtggtggcttcccatccccaaaaggcgccctccgactccttgcgccgcactgctcgccgggccagtccggaaacgggtcgtggagctccgcaccactcccgctggttcccgaaggcagatcccttctcccgagagttgcgagaaactttcccttgtccccgacgctgcagcggctcgggtaccgtggcagccgcaggtttctgaaccccgggccacgctccccgcgcctcggcttcgcgctcgtgtagatcgttccctctctggttgcacgctggggatcccggacctcgattctgcgggcgagatgcccctgggacacatcatgaggctggacctggagaaaattgccctggagtacatcgtgccctgtctgcacgaggtgggcttctgctacctggacaacttcctgggcgaggtggtgggcgactgcgtcctggagcgcgtcaagcagctgcactgcaccggggccctgcgggacggccagctggcggggccgcgcgccggcgtctccaagcgacacctgcggggcgaccagatcacgtggatcgggggcaacgaggagggctgcgaggccatcagcttcctcctgtccctcatcgacaggctggtcctctactgcgggagccggctgggcaaatactacgtcaaggagaggtctaaggcaatggtggcttgctatccgggaaatggaacaggttatgttcgccacgtggacaaccccaacggtgatggtcgctgcatcacctgcatctactatctgaacaagaattgggatgccaagctacatggtgggatcctgcggatatttccagaggggaaatcattcatagcagatgtggagcccatttttgacagactcctgttcttctggtcagatcgtaggaacccacacgaagtgcagccctcttacgcaaccagatatgctatgactgtctggtactttgatgctgaagaaagggcagaagccaaaaagaaattcaggaatttaactaggaaaactgaatctgccctcactgaagactgaccgtgctctgaaatctgctggccttgttcattttagtaacggttcctgaattctcttaaattctttgagatccaaagatggcctcttcagtgacaacaatctccctgctacttcttgcatccttcacatccctgtcttgtgtgtggtacttcatgttttcttgccaagactgtgttgatcttcagatactctctttgccagatgaagttacttgctaactccagaaattcctgcagacatcctactcggccagcggtttacctgatagattcggtaatactatcaagagaagagcctaggagcacagcgagggaatgaaccttacttgcactttatgtatacttcctgatttgaaaggaggaggtttgaaaagaaaaaaatggaggtggtagatgccacagagaggcatcacggaagccttaacagcaggaaacagagaaatttgtgtcatctgaacaatttccagatgttcttaatccagggctgttggggtttctggagaattatcacaacctaatgacattaatacctctagaaagggctgctgtcatagtgaacaatttataagtgtcccatggggcagacactccttttttcccagtcctgcaacctggattttctgcctcagccccattttgctgaaaataatgactttctgaataaagatggcaacacaattttttctccattttcagttcttacctgggaacctaattccccagaagctaaaaaactagacattagttgttttggttgctttgttggaatggaatttaaatttaaatgaaaggaaaaatatatccctggtagttttgtgttaaccactgataactgtggaaagagctaggtctactgatatacaataaacatgtgtgcatcttgaacaatttgagaggggaggtggagttggaaatgtgggtgttcctgttttttttttttttttttttttagttttcctttttaatgagctcaccctttaacacaaaaaaagcaaggtgatgtattttaaaaaaggaagtggaaataaaaaaatctcaaagctatttgagttctcgtctgtccctagcagtctttcttcagctcacttggctctctagatccactgtggttggcagtatgaccagaatcatggaatttgctagaactgtggaagcttctactcctgcagtaagcacagatcgcactgcctcaataacttggtattgagcacgtattttgcaaaagctacttttcctagttttcagtattactttcatgttttaaaaatccctttaatttcttgcttgaaaatcccatgaacattaaagagccagaaatattttcctttgttatgtacggatatatatatatatagtcttccaagatagaagtttactttttcctcttctggttttggaaaatttccagataagacatgtcaccattaattctcaacgactgctctattttgttgtacggtaatagttatcaccttctaaattactatgtaatttattcacttattatgtttattgtcttgtatcctttctctggagtgtaagcacaatgaagacaggaattttgtatatttttaaccaatgcaacatactctcagcacctaaaatagtgccgggaacatagtaagggctcagtaaatacttgttgaataaactcagtctcc

SEQ ID NO: 6338 - DNA, 1004 bp, Homo sapiens
  source 1..1004: mol_type = unassigned DNA; mol_type = unassigned DNA
ggcttcgcgctcgtgtagatcgttccctctctggttgcacgctggggatcccggacctcgattctgcgggcgagatgcccctgggacacatcatgaggctggacctggagaaaattgccctggagtacatcgtgccctgtctgcacgaggcaatggtggcttgctatccgggaaatggaacaggttatgttcgccacgtggacaaccccaacggtgatggtcgctgcatcacctgcatctactatctgaacaagaattgggatgccaagctacatggtgggatcctgcggatatttccagaggggaaatcattcatagcagatgtggagcccatttttgacagactcctgttcttctggtcagatcgtaggaacccacacgaagtgcagccctcttacgcaaccagatatgctatgactgtctggtactttgatgctgaagaaagggcagaagccaaaaagaaattcaggaatttaactaggaaaactgaatctgccctcactgaagactgaccgtgctctgaaatctgctggccttgttcattttagtaacggttcctgaattctcttaaattctttgagatccaaagatggcctcttcagtgacaacaatctccctgctacttcttgcatccttcacatccctgtcttgtgtgtggtacttcatgttttcttgccaagactgtgttgatcttcagatactctctttgccagatgaagttacttgctaactccagaaattcctgcagacatcctactcggccagcggtttacctgatagattcggtaatactatcaagagaagagcctaggagcacagcgagggaatgaaccttacttgcactttatgtatacttcctgatttgaaaggaggaggtttgaaaagaaaaaaatggaggtggtagatgccacagagaggcatcacggaagccttaacagcaggaaacagagaaatttgtgtcatctgaacaatttccagatgttcttaatccagggctgttgggg

SEQ ID NO: 6339 - DNA, 864 bp, Homo sapiens
  source 1..864: mol_type = unassigned DNA; mol_type = unassigned DNA
caactacctgtaaatgtcacgtaacacccaaggagactgtgttacttatctgctcaccagtgggaggagaagattgtctgtctcagctttgttaaccagctttcttgggatttctccataggcaatggtggcttgctatccgggaaatggaacaggttatgttcgccacgtggacaaccccaacggtgatggtcgctgcatcacctgcatctactatctgaacaagaattgggatgccaagctacatggtgggatcctgcggatatttccagaggggaaatcattcatagcagatgtggagcccatttttgacagactcctgttcttctggtcagatcgtaggaacccacacgaagtgcagccctcttacgcaaccagatatgctatgactgtctggtactttgatgctgaagaaagggcagaagccaaaaagaaattcaggaatttaactaggaaaactgaatctgccctcactgaagactgaccgtgctctgaaatctgctggccttgttcattttagtaacggttcctgaattctcttaaattctttgagatccaaagatggcctcttcagtgacaacaatctccctgctacttcttgcatccttcacatccctgtcttgtgtgtggtacttcatgttttcttgccaagactgtgttgatcttcagatactctctttgccagatgaagttacttgctaactccagaaattcctgcagacatcctactcggccagcggtttacctgatagattcggtaatactatcaagagaagagcctaggagcacagcgagggaatgaaccttacttgcactttatgtatacttcctgatttgaaaggaggaggtttgaaaagaaaaaaa

SEQ ID NO: 6340 - DNA, 848 bp, Homo sapiens
  source 1..848: mol_type = unassigned DNA; mol_type = unassigned DNA
acaccctcaaagatcagccaggggaaactacttctggtttctgcagctttcatctaggaagaggtgggctggatacacccactcgtttcccaccatctccagaaggagcagctttaactatgactcagtgatgcagggcttctgaccacaacctaaaaatgaaaggccctatcaccaatcttatctgctcatcaaaaaacagacggtggtgatatgcagtcaagcttgctggtacttccaatgcctgccctgagaaggttctgccatggagatgaagacacgctggagccacaggagtggttctggaacatctaaccttcttgtgcaaagtttctatcataacttgagattagacatgctcttattaggaaagttgcagctaccaggaggcagcctgaacgtgtcagggcctgggcacgacacttgcctttcttggaggagtgatttgaagccatagtggaagactgagcctctataaaaaatgaacgaggacactcttaatggacagatacaaaacaagccccaggagaaaggtgttgttatgtccaaagccatcttgccatgcgcagcctgagaatggagccaatgactgagggtggcagagcagaaagatggcaatggtggcttgctatccgggaaatggaacaggttatgttcgccacgtggacaaccccaacggtgatggtcgctgcatcacctgcatctactatctgaacaagaattgggatgccaagctacatggtgggatcctgcggatatttccagaggggaaatcattcatagcagatgtggagcccatttttgacagactcctgttcttctggtcagatcgtaggaacccacacgaa

SEQ ID NO: 6341 - DNA, 2849 bp, Homo sapiens
  source 1..2849: mol_type = unassigned DNA; mol_type = unassigned DNA
ccggagtctggccgcagtcgcggcagtggtggcttcccatccccaaaaggcgccctccgactccttgcgccgcactgctcgccgggccagtccggaaacgggtcgtggagctccgcaccactcccgctggttcccgaaggcagatcccttctcccgagagttgcgagaaactttcccttgtccccgacgctgcagcggctcgggtaccgtggcagccgcaggtttctgaaccccgggccacgctccccgcgcctcggcttcgcgctcgtgtagatcgttccctctctggttgcacgctggggatcccggacctcgattctgcgggcgagatgcccctgggacacatcatgaggctggacctggagaaaattgccctggagtacatcgtgccctgtctgcacgaggtgggcttctgctacctggacaacttcctgggcgaggtggtgggcgactgcgtcctggagcgcgtcaagcagctgcactgcaccggggccctgcgggacggccagctggcggggccgcgcgccggcgtctccaagcgacacctgcggggcgaccagatcacgtggatcgggggcaacgaggagggctgcgaggccatcagcttcctcctgtccctcatcgacaggctggtcctctactgcgggagccggctgggcaaatactacgtcaaggagaggtctaaggtaggacgcgctcggcgccctgccgcagctgctcccgcggggacgggaggcactcggagtccgttgtatgtcgacttcccagggccgtaagcgaactttgttttttaaccaagaagtcagcctggtttgtctctactcgctgcttccccccacccctcgccccagctcctctgagcgaaagtcaacgttaaggggctcaggtgaaccatgatgatgaccttctgttgactttgaaatattggctcttgtgggtgacaaaagccagacaagctgtggctgtggtccgattttaagacgaggttctcaaagatccaaaggagggaaagggtattggaaacactgtgtatcatctgagacacacgtgtcctcatgatcttaaatgcctactttaaagccacctaatactgcccttcattgtggtcagaagagatttctacaaaagcactcagaattctggaggcagttgtgattttgccatgtggcagttggtttgtggagttgggcaggtgtgaaagggtaaaactccacttctgaatgctgcttctgccccctgggacccagcacattgttagaccatcttcttgactgaaaattctctcctgatgctgagccctgcaccaccaccttccttttcctaactatgaattgatggcaaagtccactcaaaacaaccagttaagtgctcacgagagagtagtcaagcacctccagaaagaaaccgggtttttgttcacatagcaggaagtgactccctgggtggtaatttatcttggaaacacaggtagattggcagaaaaacgggaacatgtaggtaccgcgatgttggtgcatgtccattactttgggataggctttctcagtctttcctcaaatgatagttgagccagttttccagtggcaattctgagtgacttgcgcttgtcttatggtgtggtcaagggacgttcagaactacggaaaacttttactgaaacagcgaagcagagtataccggcatgagagggaagatgaacactcacctatgtaccactctttgacaataaatatagtatttctcaaatcagtctcaagactgatcctgtctcagaacagaccattgttctctcatttctctaatacgctgagaggaacactctgaataaaggctaagtggtgaggattggaaacgtgtgggagtgaaggggtggaggtggatgagtgcagtggggagtcacagtttgccgtacaacttccaagccaagaggccatgaatagaatatctgaaagcatcgttattaatgcacccaagtaaagtaaatcttagaagatactgctttctaaattttactttggggaaaaaaattccgcgtgagctgaactctgtaggagattgatgctaaagtgtttctttattcttcttccatcatgttggtggtggattagtcactcgtctttgactagtttgatttttgcattaaatgaccttgctgtcttctgtggtggaggtgtgtcggggaggggaagggtcagcctcagtgttgctgagatgctggtagtttctacctggaagagcagacggcttcttattgggtttttaaatgtttcttgtaaatttaggtgttaggagtttttcttcatcattctaggagcagaatttgctctgagggaggtcaggattaattggtatggaaagaggccactaacattgaaagttaaatatttttatttagctttgacttaatggatagggatagggtttcagactagaatttaactcaaatggaaggaaaaacactgtgtaagttagggtaagggaaagaaagatcctgtagatatgattcatcaattttaggttatcttttgggtggaatgaaaaactttccaggtgaccctgtcagaaggtgatcgtgaattgaaaataaaatttatcctgtcccacccccagatttccaggtttactttggctggtttgtcacaaagctccctgccctttagataaatcacctttcgattggaatattccctggccaattagaaccaaatgcaaaccaggcttgagcaaacaactagtgtagttaaattttttttaagtgtgctttgcttgtatacagaagtctccttagtgatgtcttgtggtcttgggtttcttgtttgaagttcattattaaagtcatggtagaaaca

SEQ ID NO: 6342 - DNA, 566 bp, Homo sapiens
  source 1..566: mol_type = unassigned DNA; mol_type = unassigned DNA
aacgcgttggctctttctgccgtctgagactgtgtgatgtgctgaagccaagaagagataaatggtacgaggctgatatgggagcatccatcactgactaccaggttgctactcccagctcctgtcttcacatctgcataccaaccagtaagaagaggagaaggagcaaggagagcacataactttccttttaaggacacaactaggcaagatgccatgttgtgagctgctctgtggagggggacctgtggcgaggaactgagggcagccagcaggcaacagccagctgccatgttgtgagtagccctatggaggggcccacatggcaaggaactgacatctttggtcaacagtcagtgaggacttaaggctgccaatagccacatgagggagcttggaagcagatcttcccccagtggagccttgagatgactgcagtctggctgacaccttgattgttgccttctgggagaccttgaggtgggggacccagctaagctgcccagcttcctgaccggcagaaactgggagacaataaatgttggtgttttaagccactacatttt

SEQ ID NO: 6343 - DNA, 575 bp, Homo sapiens
  source 1..575: mol_type = unassigned DNA; mol_type = unassigned DNA
ttacacggatcacgacttgattaatgcttgtctcccagctaggccgccagctgcacaagcagctaccaggaggcagcctgaacgtgtcagggcctgggcacgacacttgcctttcttggaggagtgatttgaagccatagtggaagactgagcctctataaaaaatgaacgaggacactcttaatggacagatacaaaacaagccccaggagaaaggtgttgttatgtccaaagccatcttgccatgcgcagcctgagaatggagccaatgactgagggtggcagagcagaaagatgagataaatggtacgaggctgatatgggagcatccatcactgactaccaggttgctactcccagctcctgtcttcacatctgcataccaaccagtaagaagaggagaaggagcaaggagagcacataactttccttttaaggacacaactagatgccatgttgtgagctgctctgtggagggggacctgtggcgaggaactgagggcagccagcaggcaacagccagctgccatgttgtgagtagccctatggaggggcccacatggcaaggaactgac

SEQ ID NO: 6344 - DNA, 535 bp, Homo sapiens
  source 1..535: mol_type = unassigned DNA; mol_type = unassigned DNA
ataatgacatgatagctaatccatacccctgcatgattttatcttccacggaaggaggctggcaagtttaaaggggacaccctcaaagatcagccaggggaaactacttctggtttctcagctaccaggaggcagcctgaacgtgtcagggcctgggcacgacacttgcctttcttggaggagtgatttgaagccatagtggaagactgagcctctataaaaaatgaacgaggacactcttaatggacagatacaaaacaagccccaggagaaaggtgtatcaaccattttaaatctgccctcaaaagcacagaacaaatcagacagcattttgctcacagaggagagggtgtatgagaaccaaattccagcttcagcacatggccttgggtacagctacaagatggaggaagctatttgacctgcatcagactttacgtgaacaaaagggtgttgttatgtccaaagccatcttgccatgcgcagcctgagaatggagccaatgactgagggtggcagagcagaaagatggtaa

SEQ ID NO: 6345 - DNA, 581 bp, Homo sapiens
  source 1..581: mol_type = unassigned DNA; mol_type = unassigned DNA
tttgaagtacatgaattccctctgcatgtatactcccacctgaccattgaattaagcagctaccaggaggcagcctgaacgtgtcagggcctgggcacgacacttgcctttcttggaggagtgatttgaagccatagtggaagactgagcctctataaaaaatgaacgaggacactcttaatggacagatacaaaacaagccccaggagaaaggtgtatcaaccattttaaatctgccctcaaaagcacagaacaaatcagacagcattttgctcacagaggagagggtgtatgagaaccaaattccagcttcagcacatggccttgggcaccaagacctgtactcgttggagactatgatggacaacacaacatgaatttcttgccctcaggtggtttacaatctagagagggaggcagacaaatgaccagatgacatccgagagaccaagctttgcctgccctcctgtggccttggctgggggatcctcctgtggcccatggaaggggcatttctctgaactgaaggactccacctctcctatgctataactggccagggatgggcctgcagtggctga

SEQ ID NO: 6346 - DNA, 352 bp, Homo sapiens
  source 1..352: mol_type = unassigned DNA; mol_type = unassigned DNA
tgtggtacagcaaaggccaaacagctaccaggaggcagcctgaacgtgtcagggcctgggcacgacacttgcctttcttggaggagtgatttgaagccatagtggaagactgagcctctataaaaaatgaacgaggacactcttaatggacagatacaaaacaagccccaggagaaaggtgtatcaaccattttaaatctgccctcaaaagcacagaacaaatcagacagcattttgctcacagaggagagggtgtatgagaaccaaattccagcttcagcacatggccttgggtacagctacaagatggaggaagctatttgacctgcatcagactttacgtgaacaaaag

SEQ ID NO: 6347 - DNA, 658 bp, Homo sapiens
  source 1..658: mol_type = unassigned DNA; mol_type = unassigned DNA
agaagtcagcagatccaggctctgagccagctctgtcgggttactttctgtgttactgaatgtctctgctttcctcagttgaacaaagcaaagatctgtagcccaagaaaggccactgggcaattgtaatggctaggctagggcaacagaatgtgctgagggcagcgtggaaatggtggccaaggcactaaagaccagctttctctttcatgggagcctgaaatgaaccctctgccacctcccttccccacccatagattcctttcccatttacaggcagctaggttggccttggcctggactgggtttctgttttgtcaaactaacaggtttctgctgggaggagggcactggcggaagtagcataacttatctttggtttaggggtggaacttcggttgtttctccaggcacgtcatgtcttggcttggaccatcccttgctaaagcactgtgcttcacatccttttacgggaagtacacgaccttccatctccccgcaggtgtgggctggacccacaggacccaggcaaagccttttagggtgtatcaaccattttaaatctgccctcaaaagcacagaacaaatcagacagcattttgctcacagaggagagggtgtatgagaaccaaattccagcttcagcacatggccttgg

SEQ ID NO: 6348 - DNA, 3138 bp, Homo sapiens
  source 1..3138: mol_type = unassigned DNA; mol_type = unassigned DNA
gcgcgcagaacttggggagccgccgccgccatccgccgccgcagccagcttccgccgccgcaggaccggcccctgccccagcctccgcagccgcggcgcgtccacgcccgcccgcgcccagggcgagtcggggtcgccgcctgcacgcttctcagtgttccccgcgccccgcatgtaacccggccaggcccccgcaactgtgtcccctgcagctccagccccgggctgcacccccccgccccgacaccagctctccagcctgctcgtccaggatggccgcggccaaggccgagatgcagctgatgtccccgctgcagatctctgacccgttcggatcctttcctcactcgcccaccatggacaactaccctaagctggaggagatgatgctgctgagcaacggggctccccagttcctcggcgccgccggggccccagagggcagcggcagcaacagcagcagcagcagcagcgggggcggtggaggcggcgggggcggcagcaacagcagcagcagcagcagcaccttcaaccctcaggcggacacgggcgagcagccctacgagcacctgaccgcagagtcttttcctgacatctctctgaacaacgagaaggtgctggtggagaccagttaccccagccaaaccactcgactgccccccatcacctatactggccgcttttccctggagcctgcacccaacagtggcaacaccttgtggcccgagcccctcttcagcttggtcagtggcctagtgagcatgaccaacccaccggcctcctcgtcctcagcaccatctccagcggcctcctccgcctccgcctcccagagcccacccctgagctgcgcagtgccatccaacgacagcagtcccatttactcagcggcacccaccttccccacgccgaacactgacattttccctgagccacaaagccaggccttcccgggctcggcagggacagcgctccagtacccgcctcctgcctaccctgccgccaagggtggcttccaggttcccatgatccccgactacctgtttccacagcagcagggggatctgggcctgggcaccccagaccagaagcccttccagggcctggagagccgcacccagcagccttcgctaacccctctgtctactattaaggcctttgccactcagtcgggctcccaggacctgaaggccctcaataccagctaccagtcccagctcatcaaacccagccgcatgcgcaagtaccccaaccggcccagcaagacgcccccccacgaacgcccttacgcttgcccagtggagtcctgtgatcgccgcttctcccgctccgacgagctcacccgccacatccgcatccacacaggccagaagcccttccagtgccgcatctgcatgcgcaacttcagccgcagcgaccacctcaccacccacatccgcacccacacaggcgaaaagcccttcgcctgcgacatctgtggaagaaagtttgccaggagcgatgaacgcaagaggcataccaagatccacttgcggcagaaggacaagaaagcagacaaaagtgttgtggcctcttcggccacctcctctctctcttcctacccgtccccggttgctacctcttacccgtccccggttactacctcttatccatccccggccaccacctcatacccatcccctgtgcccacctccttctcctctcccggctcctcgacctacccatcccctgtgcacagtggcttcccctccccgtcggtggccaccacgtactcctctgttccccctgctttcccggcccaggtcagcagcttcccttcctcagctgtcaccaactccttcagcgcctccacagggctttcggacatgacagcaaccttttctcccaggacaattgaaatttgctaaagggaaaggggaaagaaagggaaaagggagaaaaagaaacacaagagacttaaaggacaggaggaggagatggccataggagaggagggttcctcttaggtcagatggaggttctcagagccaagtcctccctctctactggagtggaaggtctattggccaacaatcctttctgcccacttccccttccccaattactattccctttgacttcagctgcctgaaacagccatgtccaagttcttcacctctatccaaagaacttgatttgcatggattttggataaatcatttcagtatcatctccatcatatgcctgaccccttgctcccttcaatgctagaaaatcgagttggcaaaatggggtttgggcccctcagagccctgccctgcacccttgtacagtgtctgtgccatggatttcgtttttcttggggtactcttgatgtgaagataatttgcatattctattgtattatttggagttaggtcctcacttgggggaaaaaaaaaaaagaaaagccaagcaaaccaatggtgatcctctattttgtgatgatgctgtgacaataagtttgaacctttttttttgaaacagcagtcccagtattctcagagcatgtgtcagagtgttgttccgttaacctttttgtaaatactgcttgaccgtactctcacatgtggcaaaatatggtttggtttttctttttttttttttttgaaagtgttttttcttcgtccttttggtttaaaaagtttcacgtcttggtgccttttgtgtgatgcgccttgctgatggcttgacatgtgcaattgtgagggacatgctcacctctagccttaaggggggcagggagtgatgatttgggggaggctttgggagcaaaataaggaagagggctgagctgagcttcggttctccagaatgtaagaaaacaaaatctaaaacaaaatctgaactctcaaaagtctatttttttaactgaaaatgtaaatttataaatatattcaggagttggaatgttgtagttacctactgagtaggcggcgatttttgtatgttatgaacatgcagttcattattttgtggttctattttactttgtacttgtgtttgcttaaacaaagtgactgtttggcttataaacacattgaatgcgctttattgcccatgggatatgtggtgtatatccttccaaaaaattaaaacgaaaataaagtagctgcgattggg

SEQ ID NO: 6349 - DNA, 4336 bp, Homo sapiens
  source 1..4336: mol_type = unassigned DNA; mol_type = unassigned DNA
gatcaatactgaggccgcgtccgacccccttgagccgagatccccccccagcccagcccccaccccaccccccgcacacgccccaccccccccacgacccagcctcataccgcaccagctgaggcacccaagaggattaccccctggggccctctcccgccccccaaaaaagagaagatcccctctcctggcccatcccttcccttcttccctcccccctccccccgaactttccctctcgcatgcttttcccctgcaccacggatcgcctctcggatgccgcttgcctggaagctgcgttaggagcgagcggcggcggtggcggcggtggcggcggcggcggcagctcgggagtgctatgaccggcaaactcgccgagaagctgccggtgaccatgagcagtttgctaaaccaactgcctgacaatctgtaccccgaggagatccccagcgcgctcaacctcttctccggcagcagcgactcggtagtccattacaatcagatggctacagagaatgtaatggacatcggtctgaccaacgagaagcccaacccggaactctcttactccggctccttccagccagcccccggcaacaagaccgtgacctacttgggaaagttcgccttcgactccccttccaactggtgccaggacaacatcattagcctcatgagcgccggcatcttgggggtgcccccggcttcaggggcgctcagcacgcagacgtccacggccagcatggtgcagccaccgcagggtgacgtggaggccatgtatcccgcgctacccccctactccaactgcggcgacctctactcagagcccgtgtctttccacgacccccagggcaatcccgggctcgcctattccccccaggattaccaatcggccaagccggcgttggacagcaatctcttccccatgattcctgactacaacctctaccaccaccccaacgacatgggctccattccggagcacaagcccttccagggcatggaccccatccgggtcaacccgccccctattacccctctggagaccatcaaggcattcaaagacaagcagatccacccgggctttggcagcctgccccagccgccgctcaccctcaagcccatccggccccgcaagtaccccaaccggcctagcaagacaccgctccacgaacggccccacgcgtgcccggccgagggctgcgaccgccgtttcagccgttcggacgagctgacccggcacctgcgcatccacacgggccacaagcccttccagtgccggatctgcatgcggagcttcagccgcagcgaccacctcaccactcacatccgcactcatacgggcgagaagccctttgcctgcgagttctgcgggcgcaagtttgcgcgcagcgacgagcgcaagcgccacgccaagatccacctcaagcaaaaggagaagaaggcggagaagggcggtgcaccctctgcatcctcggcgccccccgtgtcgctggcccccgtggtcaccacctgcgcctgaggatcgggcccccagatccccacttttcccctccagtgcctcccggctgctagcctgaaagcagcgggaaagccagccacggaggcgtaggggccgcgccctggcctctccatggacgtgcggccccttgcttccccttcgatgcccccggttcccaacctttcacgccggccagcggtcaggggccagggctggaggcgccttcccctcgcggtcccccacttagccaaggcgtgggggcggaaaggtggcgtctagcccgctttgttcagttcggatcgccttgatccaggggccgccgggccgcgccaaggacctgcaagggactgaaggcggagcccatccaaccctcgcccgacccaaacacctcattgtttcccccacgtctccctctataccccctcgaagactcgagagggggagggggtaaggagcgcaccaaagcgcagagcttgctgcccgccgcacgcacgcgcgcctgcgtgcggggatgcgcgcgagtgtgtgcgtgctcgcgtgtgtgtgtatgtgtgtgtgtgagtgtgtgtgtgtgcgcgcgcgcaagcgtgtgtgtttaagactcttgagctgaactgggctgtgtttaccccaaactcttccccacctcgggtccccaagccgctgggagatgtcccatgctgggggtccgcacgtggctggaggaggtggtcttccatccgctctgaaatcatgtttcttagagaaatgcctcggatgccgccgacgcggtgctgctgccgccgcttcgggtttggcccctcagaacccctccttttctgagcgcttccctcttaggcctcagggcagtttgatctgtggggagaaagagcagccatcgctgagcctgccttttaaaatatatgtgtatttccttagccccactctaagaaatctatgttcctgagtttgccccctgccctcccactccttccccttctcccctctaaaccttctcccatctctttcaaaatcttttcccagaaaggcaggcttcaaccagccactccagctttgtgtcttctctcaattacatagcaatttctccttcccaccatcatggggaagctggctctgcttttgccctttgtcatcaccaacacaacagatagaatttaaatataagtatatggtgtgcgtgtgtatgtatgtgtatgtatatgcatgcatgtgtataaagatgcacatgcgtacatatacataacatacacacaatatgtattcctagcaaaataaaatctctaaggtacttggttatccagtgcagtgcaccggaataaagagaatttgtaggcgtatacagctttaaatgatttattttttatgaaaatgttaactgatgagattatatctacatacgtgtgttatgtgtgtggatatagatgcacacatatctgtacatatacatgtgagtgtacatatatacacatatacacatctatgtatggatatgtgtgtatacacatatacacatctctgtccaaaatttcctcaaagatatggggattttttcatgaatccatgtggatgaatgaggtgtctcctttccatacccagtctcaccttctccccaccctacctcacctcttctcaggcacccctcttccccagctgtcctgccagcccttctcgtacagggtggctcctttgaagtggagtaatagggaaggttgctctctgccacagcttgcagcatggtcttgactgaatgtactgttcctgttagcgttacttctcctgtggtcagtaagttgcccagagagaaggaacaaaggtctggagtttacagaatgtctgtttttaaagtcactttatgcgttttccacttttttcttttttaagaaaaagaagtaccatttttgttttgttttgttttgatttttggtggtggataaataatactaaaaggactctagtggaaaggggggatatcgaagagcagggggttgtgaatttccaggtacttggactttttgtagaaggagagagaagaagatgaagtttgccaggagggcccatattttttcagctgaagggtaaaatctttctttgcagagacagtattttgctgaatactttttataatgtgatgattattaaaaaagcaaaaattttggtcacttccaagctagaaggaggaatcagataccctttaatattttttcctcgctccttctggtatatgcatgtcactgcatgataattgagttttcctttgttttaataaaactgttctcagacattaagctaaactaagagaaaaataactttgttgccaaaaggttgtgctatccagattttttatatgtctgcatgtttaaaaaaaaaaagcaacaaaagaaaatgcactctaacttatgtgaactgagagaaaaaaatcaggttttaaacaggaaaacctatggggaatgatattttttgaaagacttttgtataaagttgagtacttagaaaaaagacaaaccagatgtaatatattttgtggatgtttttatttcttggatttatagtaccttatactaaggttaaaaaaatatgcttgatattgtgaaaaggtgaaattcttcaccaacatttcatttgctcctttgtcatattgtaatgccaatataatatagttaatgaaaacagcatttttaaaaaccgaaatattgaaatggtgtaatgttgtaccatttgcactgtgagcaaatgctaatacagtaaatatattgtgtttgctgacaatcagccggcctataaatctccttattttatttcttgtttttatagcataaagctttagtttggcctgtt

SEQ ID NO: 6350 - DNA, 1553 bp, Homo sapiens
  source 1..1553: mol_type = unassigned DNA; mol_type = unassigned DNA
ctcttcccgggaggagcccggcgtctttttcacccgcgctctccccccttactccctcagcctcccacccgggatggagccatgtgcggcgtggagtccccgcggtgggagagagaatgtaatggacatcggtctgaccaacgagaagcccaacccggaactctcttactccggctccttccagccagcccccggcaacaagaccgtgacctacttgggaaagttcgccttcgactccccttccaactggtgccaggacaacatcattagcctcatgagcgccggcatcttgggggtgcccccggcttcaggggcgctcagcacgcagacgtccacggccagcatggtgcagccaccgcagggtgacgtggaggccatgtatcccgcgctacccccctactccaactgcggcgacctctactcagagcccgtgtctttccacgacccccagggcaatcccgggctcgcctattccccccaggattaccaatcggccaagccggcgttggacagcaatctcttccccatgattcctgactacaacctctaccaccaccccaacgacatgggctccattccggagcacaagcccttccagggcatggaccccatccgggtcaacccgccccctattacccctctggagaccatcaaggcattcaaagacaagcagatccacccgggctttggcagcctgccccagccgccgctcaccctcaagcccatccggccccgcaagtaccccaaccggcctagcaagacaccgctccacgaacggccccacgcgtgcccggccgagggctgcgaccgccgtttcagccgttcggacgagctgacccggcacctgcgcatccacacgggccacaagcccttccagtgccggatctgcatgcggagcttcagccgcagcgaccacctcaccactcacatccgcactcatacgggcgagaagccctttgcctgcgagttctgcgggcgcaagtttgcgcgcagcgacgagcgcaagcgccacgccaagatccacctcaagcaaaaggagaagaaggcggagaagggcggtgcaccctctgcatcctcggcgccccccgtgtcgctggcccccgtggtcaccacctgcgcctgaggatcgggcccccagatccccacttttcccctccagtgcctcccggctgctagcctgaaagcagcgggaaagccagccacggaggcgtaggggccgcgccctggcctctccatggacgtgcggccccttgcttccccttcgatgcccccggttcccaacctttcacgccggccagcggtcaggggccagggctggaggcgccttcccctcgcggtcccccacttagccaaggcgtgggggcggaaaggtggcgtctagcccgctttgttcagttcggatcgccttgatccaggggccgccgggccgcgccaaggacctgcaagggactgaaggcggagcccatccaaccctcgcccgacccaaacacctcattgtttcccccacgtctccctctataccccctcgaagactcgagagggggagggggtaa

SEQ ID NO: 6351 - DNA, 1500 bp, Homo sapiens
  source 1..1500: mol_type = unassigned DNA; mol_type = unassigned DNA
cacccaagaggattaccccctggggccctctcccgccccccaaaaaagagaagatcccctctcctggcccatcccttcccttcttccctcccccctccccccgaactttccctctcgcatgcttttcccctgcaccacggatcgcctctcggatgccgcttgcctggaagctgcgttaggagcgagcggcggcggtggcggcggtggcggcggcggcggcagctcgggagtgctatgaccggcaaactcgccgagaagctgccggtgaccatgagcagtttgctaaaccaactgcctgacaatctgtaccccgaggagatccccagcgcgctcaacctcttctccggcagcagcgactcggtagtccattacaatcagatggctacagcctcccacccgggatggagccatgtgcggcgtggagtccccgcggtgggagagagaatgtaatggacatcggtctgaccaacgagaagcccaacccggaactctcttactccggctccttccagccagcccccggcaacaagaccgtgacctacttgggaaagttcgccttcgactccccttccaactggtgccaggacaacatcattagcctcatgagcgccggcatcttgggggtgcccccggcttcaggggcgctcagcacgcagacgtccacggccagcatggtgcagccaccgcagggtgacgtggaggccatgtatcccgcgctacccccctactccaactgcggcgacctctactcagagcccgtgtctttccacgacccccagggcaatcccgggctcgcctattccccccaggattaccaatcggccaagccggcgttggacagcaatctcttccccatgattcctgactacaacctctaccaccaccccaacgacatgggctccattccggagcacaagcccttccagggcatggaccccatccgggtcaacccgccccctattacccctctggagaccatcaaggcattcaaagacaagcagatccacccgggctttggcagcctgccccagccgccgctcaccctcaagcccatccggccccgcaagtaccccaaccggcctagcaagacaccgctccacgaacggccccacgcgtgcccggccgagggctgcgaccgccgtttcagccgttcggacgagctgacccggcacctgcgcatccacacgggccacaagcccttccagtgccggatctgcatgcggagcttcagccgcagcgaccacctcaccactcacatccgcactcatacgggcgagaagccctttgcctgcgagttctgcgggcgcaagtttgcgcgcagcgacgagcgcaagcgccacgccaagatccacctcaagcaaaaggagaagaaggcggagaagggcggtgcaccctctgcatcctcggcgccccccgtgtcgctggcccccgtggtcaccacctgcgcctgaggatcgggcccccagatccccacttttcccctccagtgcctcccggctg

SEQ ID NO: 6352 - DNA, 1230 bp, Homo sapiens
  source 1..1230: mol_type = unassigned DNA; mol_type = unassigned DNA
gatggatggatggatggatggatggatggatggatggatgggtggatgggtggatagataaatggatggagagatgggggcgcgctgggaattttgcggggggcgagttgcttttcccacccactcctcccgccctcctcgatcgagaaggctaggttggcgacgccacggtagaggcttcggttctcccgggtgggggcagccgccgaccggagggagagaatgtaatggacatcggtctgaccaacgagaagcccaacccggaactctcttactccggctccttccagccagcccccggcaacaagaccgtgacctacttgggaaagttcgccttcgactccccttccaactggtgccaggacaacatcattagcctcatgagcgccggcatcttgggggtgcccccggcttcaggggcgctcagcacgcagacgtccacggccagcatggtgcagccaccgcagggtgacgtggaggccatgtatcccgcgctacccccctactccaactgcggcgacctctactcagagcccgtgtctttccacgacccccagggcaatcccgggctcgcctattccccccaggattaccaatcggccaagccggcgttggacagcaatctcttccccatgattcctgactacaacctctaccaccaccccaacgacatgggctccattccggagcacaagcccttccagggcatggaccccatccgggtcaacccgccccctattacccctctggagaccatcaaggcattcaaagacaagcagatccacccgggctttggcagcctgccccagccgccgctcaccctcaagcccatccggccccgcaagtaccccaaccggcctagcaagacaccgctccacgaacggccccacgcgtgcccggccgagggctgcgaccgccgtttcagccgttcggacgagctgacccggcacctgcgcatccacacgggccacaagcccttccagtgccggatctgcatgcggagcttcagccgcagcgaccacctcaccactcacatccgcactcatacgggcgagaagccctttgcctgcgagttctgcgggcgcaagtttgcgcgcagcgacgagcgcaagcgccacgccaagatccacctcaagcaaaaggagaagaaggcggagaagggcggtgcaccctctgcatcctcggcgccccccgtgtcgctggcccccgtggtcaccacctgcgcctgag

SEQ ID NO: 6353 - DNA, 505 bp, Homo sapiens
  source 1..505: mol_type = unassigned DNA; mol_type = unassigned DNA
acccgcggggcgagggcctgccacggggaacgatcccggggccggggagctggggaagggcggcctctcccgccatggagacaccggccggttttccgccgctctccaccctccctagctggggctaggattttcccctccagcaagagcctaaagctccttcatgcccgaggaggctggggccgggagaatgtaatggacatcggtctgaccaacgagaagcccaacccggaactctcttactccggctccttccagccagcccccggcaacaagaccgtgacctacttgggaaagttcgccttcgactccccttccaactggtgccaggacaacatcattagcctcatgagcgccggcatcttgggggtgcccccggcttcaggggcgctcagcacgcagacgtccacggccagcatggtgcagccaccgcagggtgacgtggaggccatgtatcccgcgctacccccctactccaactgcggcgacctctactcagagcccg

SEQ ID NO: 6354 - DNA, 4636 bp, Homo sapiens
  source 1..4636: mol_type = unassigned DNA; mol_type = unassigned DNA
aactttaattgccaagatttcacccctcctcctcaagcccagattatttatcctccctccggcctgggctgctggatgcagcagcggctgggcttggtcccaggagcagggagagtgcgctcccggccctcctagccgcgtgcccgggccatggtgcggctgagccccgcgcttgggtgaggcggcggcgcggctcggagcccggcggaccggtcctacgggacatcttcccctgaggaggagtcttcccctggggctgcgtgccgggggcgagcggcggccgcgatgttcagctggctgggtacggacgaccgccggaggaaggaccccgaggttttccagacggtgagtgaggggctcaagaaactctacaagagcaagctgctgcccttggaagagcattaccgcttccacgagttccactcgcccgccctggaggatgccgacttcgacaacaagcccatggttctgctggtgggccagtactccactgggaagaccaccttcatcaggtacctgctggaacaggacttcccaggcatgaggattgggcctgagcccaccacagactccttcattgcggtgatgcagggagacatggaggggatcatccctgggaacgccctggtggtggatcccaagaaacccttcaggaaactcaacgcctttggcaacgccttcttgaacaggttcgtgtgtgcccagctacctaaccctgtgctggagagcatcagcgtcatcgacacaccagggatcctctctggggagaagcagaggatcagccgggggtatgactttgcagctgtccttgagtggtttgccgagcgggttgaccgcatcattctgctcttcgatgcccacaaactggacatctctgatgagttctcagaagtcatcaaagccctcaagaaccacgaggacaagatgcgagtggtgctgaacaaagctgaccagatcgagacgcagcagctgatgcgggtgtacggggccctcatgtggtccttggggaagatcgtgaacaccccagaggtgatccgggtctacatcggctccttctggtcccaccccctcctcatccctgacaaccggaagctctttgaggctgaggaacaggacctattcagggacatccagagtctgccccgaaatgctgccctgcgcaagctcaacgacctcatcaaaagggccaggctggccaaggtccacgcctacatcatcagctctctgaagaaggagatgccctcggtgttcgggaaggacaacaagaagaaggagctggtcaacaacctggccgagatctatggccggatcgagcgggagcaccagatctcacctggggacttccccaatctgaagaggatgcaggaccagctgcaggcccaggactttagcaagttccagccgctgaagagcaagctgctggaggtagtggacgacatgctggcccatgacattgcccagctcatggtgctagtgcgccaggaggagtcacagcggcccatccagatggtgaagggcggagcgttcgagggcaccctgcacggcccctttgggcatggctatggggagggggctggagaaggtatcgatgatgctgagtgggtggtggccagggacaagcccatgtacgacgagatcttctacaccctgtcaccggtggatggcaagatcacaggcgctaatgccaagaaggagatggtgcgctccaagctgcccaacagtgtgctgggcaagatctggaagctggccgacattgacaaggatggcatgctggacgacgacgagtttgcactggccaaccacctcatcaaagtcaagctggaggggcacgagctgcccaacgagctgcctgcccacctcctgcccccgtccaagaggaaagttgccgagtgatggggtggggggacattcagacgggcagtgttagaggaggagatgggagcggtgactacacacacacacacacacacacacacacacacaaacatgcacacacacatatgcatatcttgacattgctctgtaggtgagagaggaccatgacgcccatgtttgcagctgatacttgtttgggcacacctccaagttctcgggattagaaggacaagagcactcccaggccccagagtctaagcctaagtctctatcgctcttcccctctcctcggccactccccagataccagacctgaggcaattcacttgccagcacagatggccaacccacctccagattccccagtgcttccacacccgggctctgagcaaatggaaaagacttttcatttagtagacaattcacttctttttctgtgcttcccctatctgctttggcttcctaataagaaatccattcaagagctaggagatctgagggcaggcgggcagctgcagggaggagaggtgagaaaggaagcgtcttctagagacattggcccaggagctctgttctttcctaatctaagcctctgtcttcttcggcaaaccttgctttgaactctgccagtatttcattttaaagaatcccagagcgggagagagaagagaaaaaaattgataagagtgaggaaattgtcctgtagtctattgaaaaccagtcaaggtggttttagttcatagattttgttagatgttctttccacctggcctatgatgtttagatgttcatacttgactcacatttacccagcccctcctgcgtaccaggagctgtgttaggcactttatatacattattctatgtggccctcactgatgccccagggaagtatgcattagccttcccattttgcagttgaggaggctgagtagcctcagaagggtttaggcgaccttctgaaactcacagaagtcacgtgatggagagaggattcaaagccagggcctcagaccctcacacacttgtctgtgctatgatgtatgcaggatcccagcattgatacccaatgacaaactatggagaacaagcaaagtatgcaggccccctgcagcctcccaggacaggctggcaagggaggagggccggccagcatttggtggcccatcagtctggccatctgtcacgtcacagaagcaaaccgtgccttctggctctgcgccccatattcccagcatcatagacatccaacagcaccagcaggagagtgggctagcctgctggatgctgttcgtgcctgtccctgctctgcctcccacccagttgcctgaatcatcccagctcagatgcagccactgtctcttgtcaagtgggacctcatactattctcagaaggctaacttgagaggtttggggccttgttccccagagggtccccagggactctgcagtgtccttggcaaatccccactgtactcaatgccctacattctcttctgtggtctctcccctggcttgcttcatggccactgaaccaatcactttgtatgctatgctcctactgtgatggaaaacaaaatgagtataacttattttatatccatattcagactatatagagaatattctatgcatctatgacgtgcttactactgcagtgcatttgtcattagtcttcatgttaatacagtacatttattctttggtacctgcctggccacagagcatcattcaatggaggctgagggagaagggctgggttcttacttggagttcctggtgaaatctttggctggaaagggctcactggggccacccaatggccagcatccacaaccagcttcccagtgggctggagtttgtctaggctcagtgaccaacccaggcacagctggtggagccaccgctccctgctcctctggagtgaagatgttccctaagcccctgggcttccttctgcaaatacacatttctctttcacatgaaatgaagggcagacaaaggccaggcaaagaggtctcacctgctctggagaaaacccttgagtgccgagtgcaggttagggaccatttctcaactccacacctttcttcaagctgaaggagaaatgggaaggaaatagcagaggtaggtgaagttcctgtctttttattttataggaaagggagatgtctgttatcccctttcttcactgccactggacacacatgccactttcctgcccttctacatatgctgcctctcttccctctctccatcttgaagtctccacccaggagagacctgtgaggtgtgggaattccatgtttgcacagctcccatctccctggaaagaggaactgatgtttgaggggacagatgtgggtcactttccctggcagtgccctctagccttgctgccttggctttctgaccccttccaggcttcaggggcctgggagatctcatgcctcagcccaggaaacatttaatagggaaagcagagacatgtcatgtcagccccacagacaagaatttctagagcacttgtcctgttgttccttgccccgacattactcagtctgggccatggaatccatccaataaacacagcaacaccctatgctactgaccaagcaaagcttgcccctggtaccaaagagctaaatcatgaccaaagtgtgacatgaatgtaactgaaatgcgggttagttgctcaatgtatgcaaagtcccacggacaagagtaaagtctgataccaataaagtgaatgtattccaaa

SEQ ID NO: 6355 - DNA, 4222 bp, Homo sapiens
  source 1..4222: mol_type = unassigned DNA; mol_type = unassigned DNA
agttcagatgagaggtttagtgtaaagtggtataggacagaggggacagagttgagatatttgatgcaaaatctaggttcctggcaagtgaatgcattcttcctttcttggtacccttgtccagagattgagactgcgtggccagaagttgacaaaagaggtttaagggagcagggaagaaaaggtcattagtaattatcagcactttagatgggagaattgctgccttggatcctgaaaatcatggtaaaaagcagtgggatttggatgtgggatccggttccttggtgtcatccagccttagcaaaccagaggtatttgggaataagatgatcattccttccctggatggagccctcttccagtgggaccaagaccgtgaaagcatggaaacagttcctttcacagttgaatcacttcttgaatcttcttataaatttggagatgatgttgttttggttggaggaaaatctctgactacatatggactcagtgcatatagtggaaaggtgaggtatatctgttcagctctgggttgtcgccaatgggatagtgacgaaatggaacaagaggaagacatcctgcttctacagcgtacccaaaaaactgttagagctgtcggacctcgcagtggcaatgagaagtggaatttcagtgttggccactttgaacttcggtatattccagacatggaaacgagagccggatttattgaaagcacctttaagcccaatgagaacacagaagagtctaaaattatttcagatgtggaagaacaggaagctgccataatggacatagtgataaaggtttcggttgctgactggaaagttatggcattcagtaagaagggaggacatctggaatgggagtaccagttttgtactccaattgcatctgcctggttacttaaggatgggaaagtcattcccatcagtctttttgatgatacaagttatacatctaatgatgatgttttagaagatgaagaagacattgtagaagctgccagaggagccacagaaaacagtgtttacttgggaatgtatagaggccagctgtatctgcagtcatcagtcagaatttcagaaaagtttccttcaagtcccaaggctttggaatctgtcactaatgaaaacgcaattattcctttaccaacaatcaaatggaaacccttaattcattctccttccagaactcctgtcttggtaggatctgatgaatttgacaaatgtctcagtaatgataagttttctcatgaagaatatagtaatggtgcactttcaatcttgcagtatccatatgataatggttattatctaccatactacaagagggagaggaacaaacgaagcacacagattacagtcagattcctcgacaacccacattacaacaagaatatccgcaaaaaggatcctgttcttcttttacactggtggaaagaaatagttgcaacgattttgttttgtatcatagcaacaacgtttattgtgcgcaggcttttccatcctcatcctcacaggcaaaggaaggagtctgaaactcagtgtcaaactgaaaataaatatgattctgtaagtggtgaagccaatgacagtagctggaatgacataaaaaactctggatatatatcacgatatctaactgattttgagccaattcaatgcctgggacgtggtggctttggagttgtttttgaagctaaaaacaaagtagatgactgcaattatgctatcaagaggatccgtctccccaatagggaattggctcgggaaaaggtaatgcgagaagttaaagccttagccaagcttgaacacccgggcattgttagatatttcaatgcctggctcgaagcaccaccagagaagtggcaagaaaagatggatgaaatttggctgaaagatgaaagcacagactggccactcagctctcctagcccaatggatgcaccatcagttaaaatacgcagaatggatcctttcgctacaaaagaacatattgaaatcatagctccttcaccacaaagaagcaggtctttttcagtagggatttcctgtgaccagacaagttcatctgagagccagttctcaccactggaattctcaggaatggaccatgaggacatcagtgagtcagtggatgcagcatacaacctccaggacagttgccttacagactgtgatgtggaagatgggactatggatggcaatgatgaggggcactcctttgaactttgtccttctgaagcttctccttatgtaaggtcaagggagagaacctcctcttcaatagtatttgaagattctggctgtgataatgcttccagtaaagaagagccgaaaactaatcgattgcatattggcaaccattgtgctaataaactaactgctttcaagcccaccagtagcaaatcttcttctgaagctacattgtctatttctcctccaagaccaaccactttaagtttagatctcactaaaaacaccacagaaaaactccagcccagttcaccaaaggtgtatctttacattcaaatgcagctgtgcagaaaagaaaacctcaaagactggatgaatggacgatgtaccatagaggagagagagaggagcgtgtgtctgcacatcttcctgcagatcgcagaggcagtggagtttcttcacagtaaaggactgatgcacagggacctcaagccatccaacatattctttacaatggatgatgtggtcaaggttggagactttgggttagtgactgcaatggaccaggatgaggaagagcagacggttctgaccccaatgccagcttatgccagacacacaggacaagtagggaccaaactgtatatgagcccagagcagattcatggaaacagctattctcataaagtggacatcttttctttaggcctgattctatttgaattgctgtatccattcagcactcagatggagagagtcaggaccttaactgatgtaagaaatctcaaatttccaccattatttactcagaaatatccttgtgagtacgtgatggttcaagacatgctctctccatcccccatggaacgacctgaagctataaacatcattgaaaatgctgtatttgaggacttggactttccaggaaaaacagtgctcagacagaggtctcgctccttgagttcatcgggaacaaaacattcaagacagtccaacaactcccatagccctttgccaagcaattagccttaagttgtgctagcaaccctaataggtgatgcagataatagcctacttcttagaatatgcctgtccaaaattgcagacttgaaaagtttgttcttcgctcaatttttttgtggactactttttttatatcaaatttaagctggatttgggggcataacctaatttgagccaactcctgagttttgctatacttaaggaaagggctatctttgttctttgttagtctcttgaaactggctgctggccaagctttatagccctcaccatttgcctaaggaggtagcagcaatccctaatatatatatatagtgagaactaaaatggatatatttttataatgcagaagaaggaaagtccccctgtgtggtaactgtattgttctagaaatatgctttctagagatatgatgattttgaaactgatttctagaaaaagctgactccatttttgtccctggcgggtaaattaggaatctgcactattttggaggacaagtagcacaaactgtataacggtttatgtccgtagttttatagtcctatttgtagcattcaatagctttattccttagatggttctagggtgggtttacagctttttgtacttttacctccaataaagggaaaatgaagctttttatgtaaattggttgaaaggtctagttttgggaggaaaaaagccgtagtaagaaatggatcatatatattacaactaacttcttcaactatggactttttaagcctaatgaaatcttaagtgtcttatatgtaatcctgtaggttggtacttcccccaaactgattataggtaacagtttaatcatctcacttgctaacatgtttttatttttcactgtaaatatgtttatgttttatttataaaaattctgaaatcaatccatttgggttggtggtgtacagaacacacttaagtgtgttaacttgtgacttctttcaagtctaaatgatttaataaaactttttttaaattaa

SEQ ID NO: 6356 - DNA, 4646 bp, Homo sapiens
  source 1..4646: mol_type = unassigned DNA; mol_type = unassigned DNA
ggaaagtccaccttccccaacaaggccagcctgggaacatggagtggcagcggccgcagccaatgagagagcaaacgcgcggaaagtttgctcaatgggcgatgtccgagataggctgtcactcaggtggcagcggcagaggccgggctgagacgtggccaggggaacacggctggctgtccaggccgtcggggcggcagtagggtccctagcacgtccttgccttcttgggagctccaagcggcgggagaggcaggcgtcagtggctgcgcctccatgcctgcgcgcggggcgggacgctgatggagcgcgccatcagcccggggctgctggtacgggcgctgctgctgctgctgctgctgctggggctcgcggcaaggacggtggccgcggggcgcgcccgtggcctcccagcgccgacggcggaggcggcgttcggcctcggggcggccgctgctcccacctcagcgacgcgagtaccggcggcgggcgccgtggctgcggccgaggtgactgtggaggacgctgaggcgctgccggcagccgcgggagagcaggagcctcggggtccggaaccagacgatgagacagagttgcgaccgcgcggcaggtcattagtaattatcagcactttagatgggagaattgctgccttggatcctgaaaatcatggtaaaaagcagtgggatttggatgtgggatccggttccttggtgtcatccagccttagcaaaccagaggtatttgggaataagatgatcattccttccctggatggagccctcttccagtgggaccaagaccgtgaaagcatggaaacagttcctttcacagttgaatcacttcttgaatcttcttataaatttggagatgatgttgttttggttggaggaaaatctctgactacatatggactcagtgcatatagtggaaaggtgaggtatatctgttcagctctgggttgtcgccaatgggatagtgacgaaatggaacaagaggaagacatcctgcttctacagcgtacccaaaaaactgttagagctgtcggacctcgcagtggcaatgagaagtggaatttcagtgttggccactttgaacttcggtatattccagacatggaaacgagagccggatttattgaaagcacctttaagcccaatgagaacacagaagagtctaaaattatttcagatgtggaagaacaggaagctgccataatggacatagtgataaaggtttcggttgctgactggaaagttatggcattcagtaagaagggaggacatctggaatgggagtaccagttttgtactccaattgcatctgcctggttacttaaggatgggaaagtcattcccatcagtctttttgatgatacaagttatacatctaatgatgatgttttagaagatgaagaagacattgtagaagctgccagaggagccacagaaaacagtgtttacttgggaatgtatagaggccagctgtatctgcagtcatcagtcagaatttcagaaaagtttccttcaagtcccaaggctttggaatctgtcactaatgaaaacgcaattattcctttaccaacaatcaaatggaaacccttaattcattctccttccagaactcctgtcttggtaggatctgatgaatttgacaaatgtctcagtaatgataagttttctcatgaagaatatagtaatggtgcactttcaatcttgcagtatccatatgataatggttattatctaccatactacaagagggagaggaacaaacgaagcacacagattacagtcagattcctcgacaacccacattacaacaagaatatccgcaaaaaggatcctgttcttcttttacactggtggaaagaaatagttgcaacgattttgttttgtatcatagcaacaacgtttattgtgcgcaggcttttccatcctcatcctcacaggcaaaggaaggagtctgaaactcagtgtcaaactgaaaataaatatgattctgtaagtggtgaagccaatgacagtagctggaatgacataaaaaactctggatatatatcacgatatctaactgattttgagccaattcaatgcctgggacgtggtggctttggagttgtttttgaagctaaaaacaaagtagatgactgcaattatgctatcaagaggatccgtctccccaatagggaattggctcgggaaaaggtaatgcgagaagttaaagccttagccaagcttgaacacccgggcattgttagatatttcaatgcctggctcgaagcaccaccagagaagtggcaagaaaagatggatgaaatttggctgaaagatgaaagcacagactggccactcagctctcctagcccaatggatgcaccatcagttaaaatacgcagaatggatcctttcgctacaaaagaacatattgaaatcatagctccttcaccacaaagaagcaggtctttttcagtagggatttcctgtgaccagacaagttcatctgagagccagttctcaccactggaattctcaggaatggaccatgaggacatcagtgagtcagtggatgcagcatacaacctccaggacagttgccttacagactgtgatgtggaagatgggactatggatggcaatgatgaggggcactcctttgaactttgtccttctgaagcttctccttatgtaaggtcaagggagagaacctcctcttcaatagtatttgaagattctggctgtgataatgcttccagtaaagaagagccgaaaactaatcgattgcatattggcaaccattgtgctaataaactaactgctttcaagcccaccagtagcaaatcttcttctgaagctacattgtctatttctcctccaagaccaaccactttaagtttagatctcactaaaaacaccacagaaaaactccagcccagttcaccaaaggtgtatctttacattcaaatgcagctgtgcagaaaagaaaacctcaaagactggatgaatggacgatgtaccatagaggagagagagaggagcgtgtgtctgcacatcttcctgcagatcgcagaggcagtggagtttcttcacagtaaaggactgatgcacagggacctcaagccatccaacatattctttacaatggatgatgtggtcaaggttggagactttgggttagtgactgcaatggaccaggatgaggaagagcagacggttctgaccccaatgccagcttatgccagacacacaggacaagtagggaccaaactgtatatgagcccagagcagattcatggaaacagctattctcataaagtggacatcttttctttaggcctgattctatttgaattgctgtatccattcagcactcagatggagagagtcaggaccttaactgatgtaagaaatctcaaatttccaccattatttactcagaaatatccttgtgagtacgtgatggttcaagacatgctctctccatcccccatggaacgacctgaagctataaacatcattgaaaatgctgtatttgaggacttggactttccaggaaaaacagtgctcagacagaggtctcgctccttgagttcatcgggaacaaaacattcaagacagtccaacaactcccatagccctttgccaagcaattagccttaagttgtgctagcaaccctaataggtgatgcagataatagcctacttcttagaatatgcctgtccaaaattgcagacttgaaaagtttgttcttcgctcaatttttttgtggactactttttttatatcaaatttaagctggatttgggggcataacctaatttgagccaactcctgagttttgctatacttaaggaaagggctatctttgttctttgttagtctcttgaaactggctgctggccaagctttatagccctcaccatttgcctaaggaggtagcagcaatccctaatatatatatatagtgagaactaaaatggatatatttttataatgcagaagaaggaaagtccccctgtgtggtaactgtattgttctagaaatatgctttctagagatatgatgattttgaaactgatttctagaaaaagctgactccatttttgtccctggcgggtaaattaggaatctgcactattttggaggacaagtagcacaaactgtataacggtttatgtccgtagttttatagtcctatttgtagcattcaatagctttattccttagatggttctagggtgggtttacagctttttgtacttttacctccaataaagggaaaatgaagctttttatgtaaattggttgaaaggtctagttttgggaggaaaaaagccgtagtaagaaatggatcatatatattacaactaacttcttcaactatggactttttaagcctaatgaaatcttaagtgtcttatatgtaatcctgtaggttggtacttcccccaaactgattataggtaacagtttaatcatctcacttgctaacatgtttttatttttcactgtaaatatgtttatgttttatttataaaaattctgaaatcaatccatttgggttggtggtgtacagaacacacttaagtgtgttaacttgtgacttctttcaagtctaaatgatttaataaaactttttttaaatt

SEQ ID NO: 6357 - DNA, 2902 bp, Homo sapiens
  source 1..2902: mol_type = unassigned DNA; mol_type = unassigned DNA
aattacttttggttgatggactgcactgcttcatgtgctactcagaaggaggctggagtacatcaggatcaagactccagctcttaattactattattcttttaaaggtatttgggaataagatgatcattccttccctggatggagccctcttccagtgggaccaagaccgtgaaagcatggaaacagttcctttcacagttgaatcacttcttgaatcttcttataaatttggagatgatgttgttttggttggaggaaaatctctgactacatatggactcagtgcatatagtggaaaggtgaggtatatctgttcagctctgggttgtcgccaatgggatagtgacgaaatggaacaagaggaagacatcctgcttctacagcgtacccaaaaaactgttagagctgtcggacctcgcagtggcaatgagaagtggaatttcagtgttggccactttgaacttcggtatattccagacatggaaacgagagccggatttattgaaagcacctttaagcccaatgagaacacagaagagtctaaaattatttcagatgtggaagaacaggaagctgccataatggacatagtgataaaggtttcggttgctgactggaaagttatggcattcagtaagaagggaggacatctggaatgggagtaccagttttgtactccaattgcatctgcctggttacttaaggatgggaaagtcattcccatcagtctttttgatgatacaagttatacatctaatgatgatgttttagaagatgaagaagacattgtagaagctgccagaggagccacagaaaacagtgtttacttgggaatgtatagaggccagctgtatctgcagtcatcagtcagaatttcagaaaagtttccttcaagtcccaaggctttggaatctgtcactaatgaaaacgcaattattcctttaccaacaatcaaatggaaacccttaattcattctccttccagaactcctgtcttggtaggatctgatgaatttgacaaatgtctcagtaatgataagttttctcatgaagaatatagtaatggtgcactttcaatcttgcagtatccatatgataatggttattatctaccatactacaagagggagaggaacaaacgaagcacacagattacagtcagattcctcgacaacccacattacaacaagaatatccgcaaaaaggatcctgttcttcttttacactggtggaaagaaatagttgcaacgattttgttttgtatcatagcaacaacgtttattgtgcgcaggcttttccatcctcatcctcacaggcaaaggaaggagtctgaaactcagtgtcaaactgaaaataaatatgattctgtaagtggtgaagccaatgacagtagctggaatgacataaaaaactctggatatatatcacgatatctaactgattttgagccaattcaatgcctgggacgtggtggctttggagttgtttttgaagctaaaaacaaagtagatgactgcaattatgctatcaagaggatccgtctccccaatagggaattggctcgggaaaaggtaatgcgagaagttaaagccttagccaagcttgaacacccgggcattgttagatatttcaatgcctggctcgaagcaccaccagagaagtggcaagaaaagatggatgaaatttggctgaaagatgaaagcacagactggccactcagctctcctagcccaatggatgcaccatcagttaaaatacgcagaatggatcctttcgctacaaaagaacatattgaaatcatagctccttcaccacaaagaagcaggtctttttcagtagggatttcctgtgaccagacaagttcatctgagagccagttctcaccactggaattctcaggaatggaccatgaggacatcagtgagtcagtggatgcagcatacaacctccaggacagttgccttacagactgtgatgtggaagatgggactatggatggcaatgatgaggggcactcctttgaactttgtccttctgaagcttctccttatgtaaggtcaagggagagaacctcctcttcaatagtatttgaagattctggctgtgataatgcttccagtaaagaagagccgaaaactaatcgattgcatattggcaaccattgtgctaataaactaactgctttcaagcccaccagtagcaaatcttcttctgaagctacattgtctatttctcctccaagaccaaccactttaagtttagatctcactaaaaacaccacagaaaaactccagcccagttcaccaaaggtgtatctttacattcaaatgcagctgtgcagaaaagaaaacctcaaagactggatgaatggacgatgtaccatagaggagagagagaggagcgtgtgtctgcacatcttcctgcagatcgcagaggcagtggagtttcttcacagtaaaggactgatgcacagggacctcaagccatccaacatattctttacaatggatgatgtggtcaaggttggagactttgggttagtgactgcaatggaccaggatgaggaagagcagacggttctgaccccaatgccagcttatgccagacacacaggacaagtagggaccaaactgtatatgagcccagagcagattcatggaaacagctattctcataaagtggacatcttttctttaggcctgattctatttgaattgctgtatccattcagcactcagatggagagagtcaggaccttaactgatgtaagaaatctcaaatttccaccattatttactcagaaatatccttgtgagtacgtgatggttcaagacatgctctctccatcccccatggaacgacctgaagctataaacatcattgaaaatgctgtatttga

SEQ ID NO: 6358 - DNA, 582 bp, Homo sapiens
  source 1..582: mol_type = unassigned DNA; mol_type = unassigned DNA
caccatcagttaaaatacgcagaatggatcctttcgctacaaaagaacctcctcttcaatagtatttgaagattctggctgtgataatgcttccagtaaagaagagccgaaaactaatcgattgcatattggcaaccattgtgctaataaactaactgctttcaagcccaccagtagcaaatcttcttctgaagctacattgtctatttctcctccaagaccaaccactttaagtttagatctcactaaaaacaccacagaaaaactccagcccagttcaccaaaggtgtatctttacattcaaatgcagctgtgcagaaaagaaaacctcaaagactggatgaatggacgatgtaccatagaggagagagagaggagcgtgtgtctgcacatcttcctgcagatcgcagaggcagtggagtttcttcacagtaaaggactgatgcacagggacctcaagccatccaacatattctttacaatggatgatgtggtcaaggttggagactttgggttagtgactgcaatggaccaggatgaggaagagcagacggttctgaccccaatgccagcttatgccag

SEQ ID NO: 6359 - DNA, 666 bp, Homo sapiens
  source 1..666: mol_type = unassigned DNA; mol_type = unassigned DNA
ggaatatgatattttggtagatgataggaagtattggacagcacacatcactagtgcagcagttgtaagaaaaagtgattaacaagtgattcccaattaaacatgtcttttttatttttaatttttttctaggaaacataagaatgtgtttgcttcatttatacaaacaggactaaaaatgctgttaatcaaattcaaaatatactatttattaagatgagttctatgagtttatacatttttatgtgtcataagattgaactgattttcacattaccacaaaatttaaaactgttgcaaacctttataaattttatctctttttaaagatatctaactgattttgagccaattcaatgcctgggacgtggtggctttggagttgtttttgaagctaaaaacaaagtagatgactgcaattatgctatcaagaggatccgtctccccaatagggaattggctcgggaaaaggtaatgcgagaagttaaagccttagccaagcttgaacacccgggcattgttagatatttcaatgcctggctcgaagcaccaccagagaagtggcaagaaaagatggatgaaatttggctgaaagatgaaagcacagactggccactcagctctcctagcccaatggatgcaccatcagttaaaatacgcagaatg

SEQ ID NO: 6360 - DNA, 534 bp, Homo sapiens
  source 1..534: mol_type = unassigned DNA; mol_type = unassigned DNA
tctgcattgtgttgaggaggccatgccatcctatctggccgttttttgagcaaagcacttcaatctctgtttacttcggtagtctcatctgtaaacaacaggattgaacccgatcacctggttttccgatttgatgtgctgctacataattctggtattgtagaaggtgaggtatatctgttcagctctgggttgtcgccaatgggatagtgacgaaatggaacaagaggaagacatcctgcttctacagcgtacccaaaaaactgttagagctgtcggacctcgcagtggcaatgagaagtggaatttcagtgttggccactttgaacttcggtatattccagacatggaaacgagagccggatttattgaaagcacctttaagcccaatgagaacacagaagagtctaaaattatttcagatgtggaagaacaggaagctgccataatggacatagtgataaaggtttcggttgctgactggaaagttatggcattcagtaagaagggaggacatctggaatgggagtacca

SEQ ID NO: 6361 - DNA, 2858 bp, Homo sapiens
  source 1..2858: mol_type = unassigned DNA; mol_type = unassigned DNA
agtattgcctgcacaaatatctaccaggtctgcgacgaatagctccagcaacttcgcaccgtgttttccactcagcctaccgacaggcactgtgcagattcaagcggagagatgtccaagcagtgaggccgctgctgcaccggccatcctgagcccctactcggccttcccgtctccgcttccccgccccgcactaggacccctgcagatgatcaggcggcagccggggtgatttccttcctcttttggcaacatggcgggcggagaagctggagtgactctagggcagccgcatctttcgcgtcaggatctcaccaccttggatgttaccaagttgacgccactttcacacgaagttatcagcagacaagccacaattaacataggtacaattggtcatgtagctcatgggaaatccacagtcgtcaaagctatttctggagttcatactgtcaggttcaaaaatgaactagaaagaaatattacaatcaagcttggatatgctaatgctaagatttataagcttgatgacccaagttgccctcggccagaatgttatagatcttgtgggagcagtacacctgacgagtttcctacggacattccagggaccaaagggaacttcaaattagtcagacatgtttcctttgttgactgtcctggccacgatattttgatggctactatgctgaacggtgcagcagtgatggatgcagctcttctgttgatagctggtaatgaatcttgccctcagcctcagacatcggaacacctggctgctatagagatcatgaaactgaagcatattttgattctacaaaataaaattgatttggtaaaagaaagtcaggctaaagaacaatacgagcagatccttgcatttgtccaaggtacagtagcagagggagctcccattattccaatttcagctcagctgaaatacaatattgaagttgtttgtgagtacatagtaaagaaaattccagtacccccaagagactttacttcagagccccggcttattgttattagatcttttgatgtcaacaaacctggctgtgaagttgatgaccttaagggaggtgtagctggtggtagtatcctaaaaggagtattaaaggtgggccaggagatagaagtaagacctggtattgtttccaaagatagtgaaggaaaactcatgtgtaaaccaatcttttccaaaattgtatcactttttgcggagcataatgatctgcaatatgctgctccaggcggtcttattggagttggaacaaaaattgaccccactttgtgccgggctgacagaatggtggggcaagtacttggtgcagtcggagctttacctgagatattcacagaattggaaatttcctatttcctgcttagacggcttctaggtgtacgcactgaaggagacaagaaagcagcaaaggttcaaaagctgtctaagaatgaagtgctcatggtgaacataggatccctgtcaacaggagggagagttagtgctgtcaaggccgatttgggtaaaattgttttgaccaatccagtgtgcacagaggtaggagaaaaaattgcccttagccgaagagttgaaaaacactggcgtttaattggttggggtcagataagaagaggagtgacaatcaagccaacagtagatgatgactgaagaataccagttaaataatacattcggatggatttggaagttggaattcctcttaacaaccaaggggtttattttcaaagcaatattggggaattgatttcacagttcgttaccttagtaggtaacggtaaggttattctctttttttttttttttttttttggttatgaaaacttagggactaaaattaatataaaaattggcataatgttggattgaatctacattttggcagaagttaaacattcccacataatgtcaaaattatacatcatgcagttctgtttttttgtttgttttattttgttttgtttttgagtctggctctgtcacccaggctggagtgcagtggcgtgatctgcaacctctgccccccgggttcaagcgattctcctgcctcagcctcccgagtagctgagattacaggtgcgcgccaccacacttggctaatttttgtattattagtagagacggggtttcagcatgttggctaggccggtctctcctgacctcagggtgatcagcccacctcggcctcacaaagtgctgggattacaggcgtgagccaccttgcccagcccacatcatacagtttgaaatgaaactttgccacaaccagcctttgctgtagcacacacatatatcactgaacctgtttgaaataaagttttttttctttttcatgattcgtctttgagtacctccaggctgaaagactgttgtaccagtaaaaacttaaaggcacaaattctccttgaagaccttctcccttttatgtggccccatattttatgttgctttatctttgaaattttgcatgaaaaggaaatgaatggattcgaatgaaattgtcctttagagcatgattacttgttcccatggacaaatatttttctccccttgctcttcctggcctgaaacacgggaaaccagagtcaaaagttatctccctctccctgtgatgccttgagatttttttctgcgttgtttaatgcctgaaatccaagtcttcctccatgggaaaatactgttataccaaataattctagatgagtaacaaagatctttttaggccttcattttatgttttttcttaactgttatattatgattgtgacatagattatactactactaatttttggatgtttcaaaaggtcaagaagtaaaagatgttagaaagcaa

SEQ ID NO: 6362 - DNA, 367 bp, Homo sapiens
  source 1..367: mol_type = unassigned DNA; mol_type = unassigned DNA
gatttccttcctcttttggcaacatggcgggcggagaagctggagtgactctagggcagccgcatctttcgcgtcaggatctcaccaccttggatgttaccaagttgacgccactttcacacgaagttatcagcagacaagccacaattaacatagctggtaatgaatcttgccctcagcctcagacatcggaacacctggctgctatagagatcatgaaactgaagcatattttgattctacaaaataaaattgatttggtaaaagaaagtcaggctaaagaacaatacgagcagatccttgcatttgtccaaggtaagaagccataatatgaaataaatctatgaatcactttgagaggcattta

SEQ ID NO: 6363 - DNA, 773 bp, Homo sapiens
  source 1..773: mol_type = unassigned DNA; mol_type = unassigned DNA
ggcgggcggagaagctggagtgactctagggcagccgcatctttcgcgtcaggatctcaccaccttggatgttaccaagttgacgccactttcacacgaagttatcagcagacaagccacaattaacataggtacaattggtcatgtagctcatgggaaatccacagtcgtcaaagctatttctggagttcatactgtcaggttcaaaaatgaactagaaagaaatattacaatcaagcttggatatgctaatgctaagatttataagcttgatgacccaagttgccctcggccagaatgttatagatcttgtgggagcagtacacctgacgagtttcctacggacattccagggaccaaagggaacttcaaattagtcagacatgtttcctttgttgactgtcctggccacgatattttgatggctactatgctgaacggtgcagcagtgatggatgcagctcttctgttgataggtaaatacctcacaattggtttggacaaatcaatgtggaacaaatccaagatgaaatatttaaaggggaactaaggcctttaaggatcatatctattacctaagggtgacatgaatgggaactaacatgtcatccaggatgactttcctacctatcagctatcacaaaatactcaaaaagatagacttggggctgatagcttgcgagaattcttgtggtagcatttgagaaaaagaaaaaaagtcaatagttcatttttctcatttaaatcacatgaggtgatttatttagttttaa

SEQ ID NO: 6364 - DNA, 453 bp, Homo sapiens
  source 1..453: mol_type = unassigned DNA; mol_type = unassigned DNA
aagaaagcagcaaaggttcaaaagctgtctaagaatgaagtgctcatggtgaacataggatccctgtcaacaggagggagagttagtgctgtcaaggccgatttgggtaaaattgttttgaccaatccagtgtgcacagaggtaggagaaaaaattgcccttagccgaagagttgaaaaacactggcggtaagtttgttagtctttgccactgtctaattaaaaaaagacacagtcttgtacagaaaaaaaagcacacaatcttccttgaggacaacagttactgtggctttcagtctcaactatttatttggatgactttgaaaactatacttcggccgggtgcggtggctcacgcctgtaatcccagcactttgggaggcctaggcgggtggatcatgaggtcaggagatcaagaccatcctggctaacatggtgaaaccccgtctctact

SEQ ID NO: 6365 - DNA, 215 bp, Homo sapiens
  source 1..215: mol_type = unassigned DNA; mol_type = unassigned DNA
cggtaagtttgttagtctttgccactgtctaattaaaaaaagacacagtcttgtacagaaaaaaaagcacacaatcttccttgaggacaacagttactgtggctttcagtctcaactatttatttggatgactttgaaaactatacttcggcgtgagccaccttgcccagcccacatcatacagtttgaaatgaaactttgccacaaccagcctt

SEQ ID NO: 6366 - DNA, 1734 bp, Homo sapiens
  source 1..1734: mol_type = unassigned DNA; mol_type = unassigned DNA
acgcacgcacgtctctcgctttcgcatacttaaggcgtctgttctcggcagcggcacagcgaggtcggcagcggcacagcgaggtcggcagcggcacagcgaggtcggcagcggcacagcgaggtcggcagcggcagcgaggtcggcagcggcacagcgaggtcggcagcggcagcgaggtcggcagcggcgcgcgctgtgctcttccgcggactctgaatcatggcgaccacggccacgatggcgacctcgggctcggcgcgaaagcggctgctcaaagaggaagacatgactaaagtggaattcgagaccagcgaggaggtggatgtgacccccacgttcgacaccatgggcctgcgggaggacctgctgcggggcatctacgcttacggttttgaaaaaccatcagcaatccagcaacgagcaatcaagcagatcatcaaagggagagatgtcatcgcacagtctcagtccggcacaggaaaaacagccaccttcagtatctcagtcctccagtgtttggatattcaggttcgtgaaactcaagctttgatcttggctcccacaagagagttggctgtgcagatccagaaggggctgcttgctctcggtgactacatgaatgtccagtgccatgcctgcattggaggcaccaatgttggcgaggacatcaggaagctggattacggacagcatgttgtcgcgggcactccagggcgtgtttttgatatgattcgtcgcagaagcctaaggacacgtgctatcaaaatgttggttttggatgaagctgatgaaatgttgaataaaggtttcaaagagcagatttacgatgtatacaggtacctgcctccagccacacaggtggttctcatcagtgccacgctgccacacgagattctggagatgaccaacaagttcatgaccgacccaatccgcatcttggtgaaacgtgatgaattgactctggaaggcatcaagcaatttttcgtggcagtggagagggaagagtggaaatttgacactctgtgtgacctctacgacacactgaccatcactcaggcggtcatcttctgcaacaccaaaagaaaggtggactggctgacggagaaaatgagggaagccaacttcactgtatcctcaatgcatggagacatgccccagaaagagcgggagtccatcatgaaggagttccggtcgggcgccagccgagtgcttatttctacagatgtctgggccagggggttggatgtccctcaggtgtccctcatcattaactatgatctccctaataacagagaattgtacatacacagaattgggagatcaggtcgatacggccggaagggtgtggccattaactttgtaaagaatgacgacatccgcatcctcagagatatcgagcagtactattccactcagattgatgagatgccgatgaacgttgctgatcttatctgaagcagcagatcagtgggatgagggagactgttcacctgctgtgtactcctgtttggaagtatttagatccagattctacttaatggggtttatatggactttcttctcataaatggcctgccgtctcccttcctttgaagaggatatggggattctgctctcttttcttatttacatgtaaataatacattgttctaagtctttttcattaaaaatttaaaacttttcccataaactctatacttctaaggtgccaccaccttctctagtaactta

SEQ ID NO: 6367 - DNA, 3593 bp, Homo sapiens
  source 1..3593: mol_type = unassigned DNA; mol_type = unassigned DNA
attgtgggtgactcaggccagcctctattgctttttatttggtatctaggactctcggggtgggtttcttgatccctagatcacttcagattgaagaagcaccaaagggaaaccagattccctcaaccagataacactccggtgggcggggagtagggacggagagaacgcgtggatgtggcctggtgctgtaaaaatgagatttcctgtcaaacgtaccttatcaccactctgcctctaacccagtgggaacactgggcgtgcaccttccatttctgggtgtgccgccctaaacatccctcacctgtcttgctccctgtcccaggtttcaaagagcagatttacgatgtatacaggtacctgcctccagccacacaggtggttctcatcagtgccacgctgccacacgagattctggagatgaccaacaagttcatgaccgacccaatccgcatcttggtgaaacggtaggagcccctcttgtcaagtttactaaaacactgggccgcatttataaaggattttatgtcgtaatttcaaaaactttttatagccagagtctggctgtgttgctgaagctcgtgtcaaaacccggacctcaggctatcctcttgcctgagtgtaaaggaattgaaagcatgcaaattcttttaaaattcctgttttaaaaaaccaaataggctgggcaacatatagagaccgtatctctaccaataataaaaaattagccaggtagggcggcacatgcctatagtcccagctactcaggaggctgtggtgggaggatcgcttgaggtcaggaggctgaggctgcagtgagctttgattgtgccactgtacttcagccagggcaacagagcaagaccctgtctcaaacaaaacaaaacaacccatcttttataatcctcattgtggtttgaaccaataattctaaatttaaaaattaggtgactatttatttatcagtgtttcgtttagaatcgtattccatgtggtgcacattgtgaaatgttaagtaggatacagaatggaggcctgtgtgacggaagtggtgataggatggaggacagggctggggctgctgggtctgcaccagatatcacggtgtgaccttttccaccagggtctccctggatcctggcttggcccaccctcaagtcctagaaggaaggatgagtatgtaacaggatttgtctttgtccttcagtgatgaattgactctggaaggcatcaagcaatttttcgtggcagtggagagggaagagtggaaatttgacactctgtgtgacctctacgacacactgaccatcactcaggcggtcatcttctgcaacaccaaaagaaaggtggactggctgacggagaaaatgagggaagccaacttcactgtatcctcaatgcatggagacatgccccagaaagagcgggagtccatcatgaaggagttccggtcgggcgccaggtgggtctgctatgctgtggctctgcaggtcagggtttgctagactgtgtctaagcacttcatatgtaccgcctaagtgcaggccccacacccggggggatgccaagcttctgctctgaaagctgaggccctgggtgagcagaaaaccttccagttaaggaggggtccgctgtgctcctgtaatacttaggttgaggtgataactagccttaactagccaggttggtcaccttggttacaagcgtgtgtcttcttttccagtaagtaggggggttttctgttcatcgtttcgattagtttaattccacagtggtcagaaagcgtggattgggtggtttcattcatttgaacttgattcagacttccttctttgcccaccttgtggtcagcttaacatatgtgctgtgtgtgtctttttttgtttgtttgtttttgagacagtctcacttcgttacccaggccggagtgcagtggcacaatcttggctcactgcaacctctgcctcctgatttcaagtgactcctgtgtctcagcctcccgagtagctggaatggctaatttttttttttttttttcatttttagtagagatggggtttcaccatgttggccaggctggtctcgaactcctgacctcaggtgatccatctgcctcagcctctggcagtgctgggattacaggcataagccgccgccatgcccggctgaagttaccgtttttaattttttgctaggcaaaagtgaagtatttttcccaattattggtttaggaccgattaaacaagttaaagatagtctagtaaaagatgtctatttttttaatctgatggagcacatgaccgaagtaactaaatccaccaacagcccctctgcacaggggtttctggtgctgtccctgaggcttcacgtttgcagacagactgttgagagaggagaatctcgtatattttggacctgcagccaggattccttaaaattagcaatggaagcaagtccagtcttacacttgtatgagtaatttaatcgcctcaaacactctttctttttgcagccgagtgcttatttctacagatgtctgggccagggggttggatgtccctcaggtgtccctcatcattaactatgatctccctaataacagagaattgtacatacacaggtaaggtgcaagctctcattggcttcacttctgtgacacatttactaaatcttgattgttatatatactaactgtaatattattttattcctgaagaattgggagatcaggtcgatacggccggaagggtgtggccattaactttgtaaagaatgacgacatccgcatcctcagagatatcgagcagtactattccactcagattgatgagatgccgatgaacggtaggaaatcgtccagctctactgtaattgtagagggaacttccctattcttagtttggggcacctgagtttgtttttttgttgttgtgggtttttttgttttgtttttgagacgaagtttcgctctgtcacccaggctggagtgcagtggcgcgatttcggctcactgcaacctctgcctcctgggttcaagcaattctcctgcctcagcctcctgagtagctggaattacagacacgtgcaccatagccagctaatttttgtatttttagtagagacggggtttcaccatgttggccaggctggtctcgaactcctggcctcaaatgatctgcccacctcagcctcccaaagtgctgggattacaggcgtgagccactatgtctggcctgttttttgttttgagaagtctgttgtgaggttttagttaaatttacgttaacaaattttcattttgtttgtgttgttccttaatctgtttctttcttcactttcagttgctgatcttatctgaagcagcagatcagtgggatgagggagactgttcacctgctgtgtactcctgtttggaagtatttagatccagattctacttaatggggtttatatggactttcttctcataaatggcctgccgtctcccttcctttgaagaggatatggggattctgctctcttttcttatttacatgtaaataatacattgttctaagtctttttcattaaaaatttaaaacttttcccataaa

SEQ ID NO: 6368 - DNA, 562 bp, Homo sapiens
  source 1..562: mol_type = unassigned DNA; mol_type = unassigned DNA
tctacagatgtctgggccagggggttggatgtccctcaggtgtccctcatcattaactatgatctccctaataacagagaattgtacatacacaggtaaggtgcaagctctcattggcttcacttctgtgacacatttactaaatcttgattgttatatatactaactgtaatattattttattcctgaagaattgggagatcaggtcgatacggccggaagggtgtggccattaactttgtaaagaatgacgacatccgcatcctcagagatatcgagcagtactattccactcagattgatgagatgccgatgaacgttgctgatcttatctgaagcagcagatcagtgggatgagggagactgttcacctgctgtgtactcctgtttggaagtatttagatccagattctacttaatggggtttatatggactttcttctcataaatggcctgccgtctcccttcctttgaagaggatatggggattctgctctcttttcttatttacatgtaaataatacattgttctaagtctttttcattaaaaatttaaaacttt

SEQ ID NO: 6369 - DNA, 697 bp, Homo sapiens
  source 1..697: mol_type = unassigned DNA; mol_type = unassigned DNA
gaatattgatactggttctgcaaatgatgcggtaaagtcccgaatgcacatctctgctttggtatactagcttgcagtagcatctgttgattggatttgtaggtggactggctgacggagaaaatgagggaagccaacttcactgtatcctcaatgcatggagacatgccccagaaagagcgggagtccatcatgaaggagttccggtcgggcgccagccgagtgcttatttctacagatgtctgggccagggggttggatgtccctcaggtgtccctcatcattaactatgatctccctaataacagagaattgtacatacacagaattgggagatcaggtcgatacggccggaagggtgtggccattaactttgtaaagaatgacgacatccgcatcctcagagatatcgagcagtactattccactcagattgatgagatgccgatgaacgttgctgatcttatctgaagcagcagatcagtgggatgagggagactgttcacctgctgtgtactcctgtttggaagtatttagatccagattctacttaatggggtttatatggactttcttctcataaatggcctgccgtctcccttcctttgaagaggatatggggattctgctctcttttcttatttacatgtaaataatacattgttctaagtctttttcattaaaaatttaaaacttt

SEQ ID NO: 6370 - DNA, 831 bp, Homo sapiens
  source 1..831: mol_type = unassigned DNA; mol_type = unassigned DNA
ttgactctggaaggcatcaagcaatttttcgtggcagtggagagggaagagtggaaatttgacactctgtgtgacctctacgacacactgaccatcactcaggcggtcatcttctgcaacaccaaaagaaaggtggactggctgacggagaaaatgagggaagccaacttcactgtatcctcaatgcatggagacatgccccagaaagagcgggagtccatcatgaaggagttccggtcgggcgccaggtgggtctgctatgctgtggctctgcaggtcagggtttgctagactgtgtctaagcacttcatatgtaccgcctaagtgcaggccccacacccggggggatgccaagcttctgctctgaaagctgaggccctgggtgagcagaaaaccttccagttaaggaggggtccgctgtgctcctgtaatacttaggttgaggtgataactagccttaactagccaggttggtcaccttggttacaagcgtgtgtcttcttttccagtaagtaggggggttttctgttcatcgtttcgattagtttaattccacagtggtcagaaagcgtggattgggtggtttcattcatttgaacttgattcagacttccttctttgcccaccttgtggtcagcttaacatatgtgctgtgtgtgtctttttttgtttgtttgtttttgagacagtctcacttcgttacccaggccggagtgcagtggcacaatcttggctcactgcaacctctgcctcctgatttcaagtgactcctgtgtctcagcctcccgagtagctggaatggctaatttttttttttttttttcattttta

SEQ ID NO: 6371 - DNA, 534 bp, Homo sapiens
  source 1..534: mol_type = unassigned DNA; mol_type = unassigned DNA
cctggtgtggtggcgggcgcctgtagtcccagctactcaggaagctgaggcgggagaatggcgtgaaccctggaggcggagcttgcagtgagctaagattgcgctgctgccccccagcatgggccacagagtgagactccgtctcaaaaaaaaaaaaaaaaaagcaaaattaacttgtttttgtcagagaaaagagcaggagaattttgtggtttcgagataataatggcataaataataatcggtgatcatctcggaggagaaacagtctttctttttggaaaacgtggatgtttctctctcccaccctggacgtgaacctgtgctttgtttcaggggctgcttgctctcggtgactacatgaatgtccagtgccatgcctgcattggaggcaccaatgttggcgaggacatcaggaagctggattacggacagcatgttgtcgcgggcactccagggcgtgtttttgatatgattcgtcgcagaagcctaaggacacgtgctatcaaaatgttggttttggatgaagctgat

SEQ ID NO: 6372 - DNA, 553 bp, Homo sapiens
  source 1..553: mol_type = unassigned DNA; mol_type = unassigned DNA
tcggcagcggcacagcgaggtcggcagcggcacagcgaggtcggcagcggcacagcgaggtcggcagcggcacagcgaggtcggcagcggcagcgaggtcggcagcggcacagcgaggtcggcagcggcagcgaggtcggcagcggcgcgcgctgtgctcttccgcggactctgaatcatggcgaccacggccacgatggcgacctcgggctcggcgcgaaagcggctgctcaaagaggaagacatgactaaagtggaattcgagaccagcgaggaggtggatgtgacccccacgttcgacaccatgggcctgcgggaggacctgctgcggggcatctacgcttacggttttgaaaaaccatcagcaatccagcaacgagcaatcaagcagatcatcaaagggagagatgtcatcgcacagtctcagtccggcacaggaaaaacagccaccttcagtatctcagtcctccagtgtttggatattcaggggctgcttgctctcggtgactacatgaatgtccagtgccatgcctgcattggaggcaccaatgtt

SEQ ID NO: 6373 - DNA, 574 bp, Homo sapiens
  source 1..574: mol_type = unassigned DNA; mol_type = unassigned DNA
tcggcagcggcacagcgaggtcggcagcggcacagcgaggtcggcagcggcacagcgaggtcggcagcggcacagcgaggtcggcagcggcagcgaggtcggcagcggcacagcgaggtcggcagcggcagcgaggtcggcagcggcgcgcgctgtgctcttccgcggactctgaatcatggcgaccacggccacgatggcgacctcgggctcggcgcgaaagcggctgctcaaagaggaagacatgactaaagtggaattcgagaccagcgaggaggtggatgtgacccccacgttcgacaccatgggcctgcgggaggacctgctgcggggcatctacgcttacggttttgaaaaaccatcagcaatccagcaacgagcaatcaagcagatcatcaaagggagagatgtcatcgcacagtctcagtccggcacaggaaaaacagccaccttcagtatctcagtcctccagtgtttggatattcaggtaatttgccattcttaaaacaaactgttatgtaattctaggaaatacttgctttttcttctgtaactacagtgttcaaaaagtaca

SEQ ID NO: 6374 - DNA, 3691 bp, Homo sapiens
  source 1..3691: mol_type = unassigned DNA; mol_type = unassigned DNA
gcccgggtgcggccgcgtgtagcgcaagaaggaaactgttgagacgcagacggcaactccaaactaacatggcagtcagactgtgtgatgtggcttctctgcttagaagtggttcgtgggcagcagagccttggaccgggcaggtaattgctgccatggaaacacaactgtctaatgggccaacttgcaataacacagccaatggtccaaccaccataaacaacaactgttcgtcaccagttgactctgggaacacagaagacagcaagaccaacttaatagtcaactaccttcctcagaacatgacacaggaggaactaaagagtctctttgggagcattggtgaaatagagtcctgtaagcttgtaagagacaaaataacagggcagagcttgggatatggctttgtgaactacattgaccccaaggatgcagagaaagctatcaacaccctgaatggattgagacttcaaaccaaaacaataaaagtttcctatgctcgcccaagttcagcttctatcagagatgcaaatttatatgtcagcggacttccaaaaacaatgacccagaaggagttggaacagcttttttcacaatatggacgcattattacttctcgtattcttgtcgaccaggtcactggcatatcaaggggtgtagggtttattcgatttgacaagcgaattgaggcagaagaagctatcaaaggcctaaatggccagaaacctcccggtgccacggagccaatcactgtaaagtttgctaataacccaagccaaaaaaccaatcaggccatcctttcccagctgtaccagtctccaaacagaaggtatccaggaccgctagctcagcaggcacagcgttttaggttggacaatctgctcaatatggcttatggagtaaagagcaggttttctccaatgaccattgacggaatgaccagtttggctggaattaatatccctgggcaccctggaacagggtggtgtatatttgtgtacaacctggctcctgacgcagatgagagtatcctgtggcaaatgtttgggccttttggagctgtcaccaatgtgaaggtcatccgtgactttaacaccaataaatgcaaaggttttggatttgtgactatgacaaactatgatgaggctgccatggcgatagctagcctcaatggataccgtctgggagacagagtactgcaggtctcctttaagacaaacaaaacgcacaaagcctaatgagctcttgtcctcagtccatttatatatgaaaactatacaacaaaggcaagttaagagaaactttatacattagtaaatgtctttgtaagtcagtgttgagatggggataaaatgactacttagcatcctaagaaatatgtgagattttttattgctagtatttgaattaaaacttcttaaatatcttttatgtttgaatatggacaagaggtacagggtttttacctgtcacattgcattctattgccttctttgaagaaggtggaccttttaaagtgtttcagctaagggaagacatttcttttctttttacataactgccttgaacctgtgagtaaatattgaggctttgtgttgtaattcttcagttggttgtgtcttttttttcccccctttttttcctttttctgattagctttgtgtttggtttacatttaaagcattgctgttatgtctgtttaagaaaagtattttgaagtttacatttttatttatgaagtttaaaacagtatttattttgtaattatgatttgggttggggaagggggggctacattataaacgcttattgtaagaatactggagaacttttcgtaaagcagtaccttgccaaagagataagagcctctttgatgtgggtttaaaaaaagcatctatttttataaaaaagaaaatttggagaaactttttactggtcctggaacaaatattttgacttgaatactttgagaaatctcttcatatgacacctagtgagcttttaaaatttaccaggaaatttgcagcggttggaaaatttagaaagatttatggtgtagaaaatacttttgagatctttgtatgaaaggagtagaatcaatggggggaaacactgctggtttcatttttgtaatcaccagtggagcgtctgatcatcctggttattatgtgataggtggctcacattgatttgtgattttgaaacaaataaaaaaaatttacaaaagaatatataagagcaggcaagaaatttaaattaccgagagatgggggaaaaaatctgttcttcctaaagaaatcccttcagatagagctcatggtgtttagtgatgtacttgcagtattgtttgaagaattgttttgtcttaaggaaaaaagacgttgcacatgatttgtactgcagcaaatcagcaaaagtgatctgagttggatatatttgaaggtattttgaaagttacgttcaaggctaacacctgagctttgtgtaatgtaaataagaccttgtgtttatgaacctttcagctaatttaattttttttcccttacatgccaagtgatgttcaggttttgaatgtttttgtatcagttttttcctttgtaaatggcattaacattgttacttgaggtcttgcttaatcacttttgttgtcctgaggacttgaatttacagtgcatcagatttgttgcaaattttgtctgtagatagtctagcttcagctgtttatggtgatgctacattttggtttataaatatgtttgtggtataaaaaaatgagtataaccataggttttgaacaaatttccttacatttttcatacaaaaatcataaatatctgtatgctattgaaatttaactttgtatgatgcttaaaaaccactatttggggaaataataaaataagtctttaccatgtatgaaagaaattttaaaaaatacaaaatattttctgattagcatctagcttataataaattttcaaaaaagctgaaggcaaaaatgccttcatcaggatgcactgagaactatatagttacgtcctgctttttgtataaactgagatgctcacatgcttccccttagaacaggcaatgtgctatgcataacatagttgtacattatctttgcggttgctttgagttttattttttattatttaaaattgtagttataaaatttttcagtatagtacagtacatatactgtgaggcgcgtgctaaagtgaataagcgagttttcatgctgacccactcaatgctattcagaaatcaattggcttagcactttctcatatccttaggtgcatttagattgccagagttaaccttctgcgtttaaaaaaagaaaaacactaaaaaataaaatacatgtatatacttaaaaaaaaataataaggtttccctcaagggaaaacagcagctacatgcttctttcctatactactgtagcaaaccaaggcattgatgagagggcatgcaaattgtgcttcactttacagtgttttatcagagcacttaataaaatgtaaggctggtatttatttgaagttgtacagtatgacttaattcacatctgttggaatagaaaatatattctgttgagtatttaagaggctgtacatgttttcttttgtgtttggattctttgtactttttcatgttcagtacatcaataaacaaagttgaagggaaa

SEQ ID NO: 6375 - DNA, 3763 bp, Homo sapiens
  source 1..3763: mol_type = unassigned DNA; mol_type = unassigned DNA
agtccgaactctgggcgggaacactggtgggggcggcggaggttgtgcccgcgaagttcctagagctcagcccgttgcggcgggagtagagagaattgggcgcctcgggaggtggcaccgcccctcccgtgggcacaagcaggttgggggcggcgggagccgagcggggacagtcgcgcctggcagcgtgcacgggcgtggacgtgcccgggtgcggccgcgtgtagcgcaagaaggaaactgttgagacgcagcaggtaattgctgccatggaaacacaactgtctaatgggccaacttgcaataacacagccaatggtccaaccaccataaacaacaactgttcgtcaccagttgactctgggaacacagaagacagcaagaccaacttaatagtcaactaccttcctcagaacatgacacaggaggaactaaagagtctctttgggagcattggtgaaatagagtcctgtaagcttgtaagagacaaaataacagggcagagcttgggatatggctttgtgaactacattgaccccaaggatgcagagaaagctatcaacaccctgaatggattgagacttcaaaccaaaacaataaaagtttcctatgctcgcccaagttcagcttctatcagagatgcaaatttatatgtcagcggacttccaaaaacaatgacccagaaggagttggaacagcttttttcacaatatggacgcattattacttctcgtattcttgtcgaccaggtcactggcatatcaaggggtgtagggtttattcgatttgacaagcgaattgaggcagaagaagctatcaaaggcctaaatggccagaaacctcccggtgccacggagccaatcactgtaaagtttgctaataacccaagccaaaaaaccaatcaggccatcctttcccagctgtaccagtctccaaacagaaggtatccaggaccgctagctcagcaggcacagcgttttaggttttctccaatgaccattgacggaatgaccagtttggctggaattaatatccctgggcaccctggaacagggtggtgtatatttgtgtacaacctggctcctgacgcagatgagagtatcctgtggcaaatgtttgggccttttggagctgtcaccaatgtgaaggtcatccgtgactttaacaccaataaatgcaaaggttttggatttgtgactatgacaaactatgatgaggctgccatggcgatagctagcctcaatggataccgtctgggagacagagtactgcaggtctcctttaagacaaacaaaacgcacaaagcctaatgagctcttgtcctcagtccatttatatatgaaaactatacaacaaaggcaagttaagagaaactttatacattagtaaatgtctttgtaagtcagtgttgagatggggataaaatgactacttagcatcctaagaaatatgtgagattttttattgctagtatttgaattaaaacttcttaaatatcttttatgtttgaatatggacaagaggtacagggtttttacctgtcacattgcattctattgccttctttgaagaaggtggaccttttaaagtgtttcagctaagggaagacatttcttttctttttacataactgccttgaacctgtgagtaaatattgaggctttgtgttgtaattcttcagttggttgtgtcttttttttcccccctttttttcctttttctgattagctttgtgtttggtttacatttaaagcattgctgttatgtctgtttaagaaaagtattttgaagtttacatttttatttatgaagtttaaaacagtatttattttgtaattatgatttgggttggggaagggggggctacattataaacgcttattgtaagaatactggagaacttttcgtaaagcagtaccttgccaaagagataagagcctctttgatgtgggtttaaaaaaagcatctatttttataaaaaagaaaatttggagaaactttttactggtcctggaacaaatattttgacttgaatactttgagaaatctcttcatatgacacctagtgagcttttaaaatttaccaggaaatttgcagcggttggaaaatttagaaagatttatggtgtagaaaatacttttgagatctttgtatgaaaggagtagaatcaatggggggaaacactgctggtttcatttttgtaatcaccagtggagcgtctgatcatcctggttattatgtgataggtggctcacattgatttgtgattttgaaacaaataaaaaaaatttacaaaagaatatataagagcaggcaagaaatttaaattaccgagagatgggggaaaaaatctgttcttcctaaagaaatcccttcagatagagctcatggtgtttagtgatgtacttgcagtattgtttgaagaattgttttgtcttaaggaaaaaagacgttgcacatgatttgtactgcagcaaatcagcaaaagtgatctgagttggatatatttgaaggtattttgaaagttacgttcaaggctaacacctgagctttgtgtaatgtaaataagaccttgtgtttatgaacctttcagctaatttaattttttttcccttacatgccaagtgatgttcaggttttgaatgtttttgtatcagttttttcctttgtaaatggcattaacattgttacttgaggtcttgcttaatcacttttgttgtcctgaggacttgaatttacagtgcatcagatttgttgcaaattttgtctgtagatagtctagcttcagctgtttatggtgatgctacattttggtttataaatatgtttgtggtataaaaaaatgagtataaccataggttttgaacaaatttccttacatttttcatacaaaaatcataaatatctgtatgctattgaaatttaactttgtatgatgcttaaaaaccactatttggggaaataataaaataagtctttaccatgtatgaaagaaattttaaaaaatacaaaatattttctgattagcatctagcttataataaattttcaaaaaagctgaaggcaaaaatgccttcatcaggatgcactgagaactatatagttacgtcctgctttttgtataaactgagatgctcacatgcttccccttagaacaggcaatgtgctatgcataacatagttgtacattatctttgcggttgctttgagttttattttttattatttaaaattgtagttataaaatttttcagtatagtacagtacatatactgtgaggcgcgtgctaaagtgaataagcgagttttcatgctgacccactcaatgctattcagaaatcaattggcttagcactttctcatatccttaggtgcatttagattgccagagttaaccttctgcgtttaaaaaaagaaaaacactaaaaaataaaatacatgtatatacttaaaaaaaaataataaggtttccctcaagggaaaacagcagctacatgcttctttcctatactactgtagcaaaccaaggcattgatgagagggcatgcaaattgtgcttcactttacagtgttttatcagagcacttaataaaatgtaaggctggtatttatttgaagttgtacagtatgacttaattcacatctgttggaatagaaaatatattctgttgagtatttaagaggctgtacatgttttcttttgtgtttggattctttgtactttttcatgttcagtacatcaataaacaaagttgaagggaaa

SEQ ID NO: 6376 - DNA, 2370 bp, Homo sapiens
  source 1..2370: mol_type = unassigned DNA; mol_type = unassigned DNA
gagcctggcagagcagctgcacacacggcagtgcggaggcagagaaggggttggtgatacggtgctataaatctgtggtccagtccacctcccttttaagacgtcctcccccctatttctgttcttagttagagatgcagcagcttactcctgtagcgacctactaaaaagcaacaaggagaaagacatcgtctttttgaaaaaacgttctttcgtctcttttctttgttccttggtttgtttttcttgcccctttttgtttagttgaacggcaataggagggtagtctctccgtctttttaaactcttttttaagtttcccctcccctttcatattttttttcgccatttcttttagcattggactttggggtcgaaagcgtttctttttatttgcttcttttaagccgagcacagtttaggtttcgtgctgtcttaagagaactatccagcagcttcttgctcatccttattgggagaactgcaccgttactttaaaaacacacatacacaaaaaccttaagggagaaaggtaattgctgccatggaaacacaactgtctaatgggccaacttgcaataacacagccaatggtccaaccaccataaacaacaactgttcgtcaccagttgactctgggaacacagaagacagcaagaccaacttaatagtcaactaccttcctcagaacatgacacaggaggaactaaagagtctctttgggagcattggtgaaatagagtcctgtaagcttgtaagagacaaaataacagggcagagcttgggatatggctttgtgaactacattgaccccaaggatgcagagaaagctatcaacaccctgaatggattgagacttcaaaccaaaacaataaaagtttcctatgctcgcccaagttcagcttctatcagagatgcaaatttatatgtcagcggacttccaaaaacaatgacccagaaggagttggaacagcttttttcacaatatggacgcattattacttctcgtattcttgtcgaccaggtcactggcatatcaaggggtgtagggtttattcgatttgacaagcgaattgaggcagaagaagctatcaaaggcctaaatggccagaaacctcccggtgccacggagccaatcactgtaaagtttgctaataacccaagccaaaaaaccaatcaggccatcctttcccagctgtaccagtctccaaacagaaggtatccaggaccgctagctcagcaggcacagcgttttaggttggacaatctgctcaatatggcttatggagtaaagaggttttctccaatgaccattgacggaatgaccagtttggctggaattaatatccctgggcaccctggaacagggtggtgtatatttgtgtacaacctggctcctgacgcagatgagagtatcctgtggcaaatgtttgggccttttggagctgtcaccaatgtgaaggtcatccgtgactttaacaccaataaatgcaaaggttttggatttgtgactatgacaaactatgatgaggctgccatggcgatagctagcctcaatggataccgtctgggagacagagtactgcaggtctcctttaagacaaacaaaacgcacaaagcctaatgagctcttgtcctcagtccatttatatatgaaaactatacaacaaaggcaagttaagagaaactttatacattagtaaatgtctttgtaagtcagtgttgagatggggataaaatgactacttagcatcctaagaaatatgtgagattttttattgctagtatttgaattaaaacttcttaaatatcttttatgtttgaatatggacaagaggtacagggtttttacctgtcacattgcattctattgccttctttgaagaaggtggaccttttaaagtgtttcagctaagggaagacatttcttttctttttacataactgccttgaacctgtgagtaaatattgaggctttgtgttgtaattcttcagttggttgtgtcttttttttcccccctttttttcctttttctgattagctttgtgtttggtttacatttaaagcattgctgttatgtctgtttaagaaaagtattttgaagtttacatttttatttatgaagtttaaaacagtatttattttgtaattatgatttgggttggggaagggggggctacattataaacgcttattgtaagaatactggagaacttttcgtaaagcagtaccttgccaaagagataagagcctctttgatgtgggtttaaaaaaagcatctatttttataaaaaagaaaatttggagaaactttttactggtcctggaacaaatattttgacttgaatactttgagaaatctcttcata

SEQ ID NO: 6377 - DNA, 777 bp, Homo sapiens
  source 1..777: mol_type = unassigned DNA; mol_type = unassigned DNA
ggctcacgcctgtaatcccagcacattgggaggccgaggttggcagatcagttgaagccaggagttcgagacgagcctggccaacgtggcgaaaccctgtctctactaaaaatacaaaaaaatagctgggtgtggtgatgcatgcctgtaatcccagctacttgggaggccgaggcagaagaatcgcttgaacccaggaggtggaagttgcagtgatccgagatcatgcccactgccatccagtctggatgacagagagagagaccttgcctcaaaagaagaaagatttgaattaatggtttgaaaattcttagaacacttgaccacagggcagagcttgggatatggctttgtgaactacattgaccccaaggatgcagagaaagctatcaacaccctgaatggattgagacttcaaaccaaaacaataaaagtttcctatgctcgcccaagttcagcttctatcagagatgcaaatttatatgtcagcggacttccaaaaacaatgacccagaaggagttggaacagcttttttcacaatatggacgcattattacttctcgtattcttgtcgaccaggtcactggcatatcaaggggtgtagggtttattcgatttgacaagcgaattgaggcagaagaagctatcaaaggcctaaatggccagaaacctcccggtgccacggagccaatcactgtaaagtttgctaataacccaagccaaaaaaccaatcaggccatcctttcccagctgtaccagtctccaaacagaaggta

SEQ ID NO: 6378 - DNA, 723 bp, Homo sapiens
  source 1..723: mol_type = unassigned DNA; mol_type = unassigned DNA
gctttcttcccttgcctttgaagactttctgcaggccctggaattgcctttgttcctctgtctgcccactttgccagtgtgaagcaggttttcatgggattctactggggtaaaccaaaagcagcagaaaaagtgtgaacaggtaattgctgccatggaaacacaactgtctaatgggccaacttgcaataacacagccaatggtccaaccaccataaacaacaactgttcgtcaccagttgactctgggaacacagaagacagcaagaccaacttaatagtcaactaccttcctcagaacatgacacaggaggaactaaagagtctctttgggagcattggtgaaatagagtcctgtaagcttgtaagagacaaaataacagggcagagcttgggatatggctttgtgaactacattgaccccaaggatgcagagaaagctatcaacaccctgaatggattgagacttcaaaccaaaacaataaaagtttcctatgctcgcccaagttcagcttctatcagagatgcaaatttatatgtcagcggacttccaaaaacaatgacccagaaggagttggaacagcttttttcacaatatggacgcattattacttctcgtattcttgtcgaccaggtcactggcatatcaaggggtgtagggtttattcgatttgacaagcgaattgaggcagaagaagctatcaaaggcctaaatggccagaa

SEQ ID NO: 6379 - DNA, 424 bp, Homo sapiens
  source 1..424: mol_type = unassigned DNA; mol_type = unassigned DNA
ctaaaaagcaacaaggagaaagacatcgtctttttgaaaaaacgttctttcgtctcttttctttgttccttggtttgtttttcttgcccctttttgtttagttgaacggcaataggagggtagtctctccgtctttttaaactcttttttaagtttcccctcccctttcatattttttttcgccatttcttttagcattggactttggggtcgaaagcgtttctttttatttgcttcttttaagccgagcacagtttaggtttcgtgctgtcttaagagaactatccagcagcttcttgctcatccttattgggagaactgcaccgttactttaaaaacacacatacacaaaaaccttaagggagaaagacggcaactccaaactaacatggcagtcagactgtgtgatgtggcttctctgctt

SEQ ID NO: 6380 - DNA, 3805 bp, Homo sapiens
  source 1..3805: mol_type = unassigned DNA; mol_type = unassigned DNA
caataggagggtagtctctccgtctttttaaactcttttttaagtttcccctcccctttcatattttttttcgccatttcttttagcattggactttggggtcgaaagcgtttctttttatttgcttcttttaagccgagcacagtttaggtttcgtgctgtcttaagagaactatccagcagcttcttgctcatccttattgggagaactgcaccgttactttaaaaacacacatacacaaaaaccttaagggagaaagcaggtaattgctgccatggaaacacaactgtctaatgggccaacttgcaataacacagccaatggtccaaccaccataaacaacaactgttcgtcaccagttgactctgggaacacagaagacagcaagaccaacttaatagtcaactaccttcctcagaacatgacacaggaggaactaaagagtctctttgggagcattggtgaaatagagtcctgtaagcttgtaagagacaaaataacagggcagagcttgggatatggctttgtgaactacattgaccccaaggatgcagagaaagctatcaacaccctgaatggattgagacttcaaaccaaaacaataaaagtttcctatgctcgcccaagttcagcttctatcagagatgcaaatttatatgtcagcggacttccaaaaacaatgacccagaaggagttggaacagcttttttcacaatatggacgcattattacttctcgtattcttgtcgaccaggtcactggcatatcaaggggtgtagggtttattcgatttgacaagcgaattgaggcagaagaagctatcaaaggcctaaatggccagaaacctcccggtgccacggagccaatcactgtaaagtttgctaataacccaagccaaaaaaccaatcaggccatcctttcccagctgtaccagtctccaaacagaaggtatccaggaccgctagctcagcaggcacagcgttttaggttggacaatctgctcaatatggcttatggagtaaagaggttttctccaatgaccattgacggaatgaccagtttggctggaattaatatccctgggcaccctggaacagggtggtgtatatttgtgtacaacctggctcctgacgcagatgagagtatcctgtggcaaatgtttgggccttttggagctgtcaccaatgtgaaggtcatccgtgactttaacaccaataaatgcaaaggttttggatttgtgactatgacaaactatgatgaggctgccatggcgatagctagcctcaatggataccgtctgggagacagagtactgcaggtctcctttaagacaaacaaaacgcacaaagcctaatgagctcttgtcctcagtccatttatatatgaaaactatacaacaaaggcaagttaagagaaactttatacattagtaaatgtctttgtaagtcagtgttgagatggggataaaatgactacttagcatcctaagaaatatgtgagattttttattgctagtatttgaattaaaacttcttaaatatcttttatgtttgaatatggacaagaggtacagggtttttacctgtcacattgcattctattgccttctttgaagaaggtggaccttttaaagtgtttcagctaagggaagacatttcttttctttttacataactgccttgaacctgtgagtaaatattgaggctttgtgttgtaattcttcagttggttgtgtcttttttttcccccctttttttcctttttctgattagctttgtgtttggtttacatttaaagcattgctgttatgtctgtttaagaaaagtattttgaagtttacatttttatttatgaagtttaaaacagtatttattttgtaattatgatttgggttggggaagggggggctacattataaacgcttattgtaagaatactggagaacttttcgtaaagcagtaccttgccaaagagataagagcctctttgatgtgggtttaaaaaaagcatctatttttataaaaaagaaaatttggagaaactttttactggtcctggaacaaatattttgacttgaatactttgagaaatctcttcatatgacacctagtgagcttttaaaatttaccaggaaatttgcagcggttggaaaatttagaaagatttatggtgtagaaaatacttttgagatctttgtatgaaaggagtagaatcaatggggggaaacactgctggtttcatttttgtaatcaccagtggagcgtctgatcatcctggttattatgtgataggtggctcacattgatttgtgattttgaaacaaataaaaaaaatttacaaaagaatatataagagcaggcaagaaatttaaattaccgagagatgggggaaaaaatctgttcttcctaaagaaatcccttcagatagagctcatggtgtttagtgatgtacttgcagtattgtttgaagaattgttttgtcttaaggaaaaaagacgttgcacatgatttgtactgcagcaaatcagcaaaagtgatctgagttggatatatttgaaggtattttgaaagttacgttcaaggctaacacctgagctttgtgtaatgtaaataagaccttgtgtttatgaacctttcagctaatttaattttttttcccttacatgccaagtgatgttcaggttttgaatgtttttgtatcagttttttcctttgtaaatggcattaacattgttacttgaggtcttgcttaatcacttttgttgtcctgaggacttgaatttacagtgcatcagatttgttgcaaattttgtctgtagatagtctagcttcagctgtttatggtgatgctacattttggtttataaatatgtttgtggtataaaaaaatgagtataaccataggttttgaacaaatttccttacatttttcatacaaaaatcataaatatctgtatgctattgaaatttaactttgtatgatgcttaaaaaccactatttggggaaataataaaataagtctttaccatgtatgaaagaaattttaaaaaatacaaaatattttctgattagcatctagcttataataaattttcaaaaaagctgaaggcaaaaatgccttcatcaggatgcactgagaactatatagttacgtcctgctttttgtataaactgagatgctcacatgcttccccttagaacaggcaatgtgctatgcataacatagttgtacattatctttgcggttgctttgagttttattttttattatttaaaattgtagttataaaatttttcagtatagtacagtacatatactgtgaggcgcgtgctaaagtgaataagcgagttttcatgctgacccactcaatgctattcagaaatcaattggcttagcactttctcatatccttaggtgcatttagattgccagagttaaccttctgcgtttaaaaaaagaaaaacactaaaaaataaaatacatgtatatacttaaaaaaaaataataaggtttccctcaagggaaaacagcagctacatgcttctttcctatactactgtagcaaaccaaggcattgatgagagggcatgcaaattgtgcttcactttacagtgttttatcagagcacttaataaaatgtaaggctggtatttatttgaagttgtacagtatgacttaattcacatctgttggaatagaaaatatattctgttgagtatttaagaggctgtacatgttttcttttgtgtttggattctttgtactttttcatgttcagtacatcaataaacaaagttgaaggg

SEQ ID NO: 6381 - DNA, 3789 bp, Homo sapiens
  source 1..3789: mol_type = unassigned DNA; mol_type = unassigned DNA
acaaacggcgggaccgcggcgcctgggcgtcactgaggcagtagccggccgggtgaggagggcggttgccggcgcggcgcggcgcggcgcgggtggggcgggggttccgccggcttccagtcccctttcccgccgccgccgccgccaccgcctctccgcggagctcgccccgagcgactcctccgcggcagtgctgacggccagcggcacgagccgtagtagctgcagcttcgagtcacagcagcaggtaattgctgccatggaaacacaactgtctaatgggccaacttgcaataacacagccaatggtccaaccaccataaacaacaactgttcgtcaccagttgactctgggaacacagaagacagcaagaccaacttaatagtcaactaccttcctcagaacatgacacaggaggaactaaagagtctctttgggagcattggtgaaatagagtcctgtaagcttgtaagagacaaaataacagggcagagcttgggatatggctttgtgaactacattgaccccaaggatgcagagaaagctatcaacaccctgaatggattgagacttcaaaccaaaacaataaaagtttcctatgctcgcccaagttcagcttctatcagagatgcaaatttatatgtcagcggacttccaaaaacaatgacccagaaggagttggaacagcttttttcacaatatggacgcattattacttctcgtattcttgtcgaccaggtcactggcatatcaaggggtgtagggtttattcgatttgacaagcgaattgaggcagaagaagctatcaaaggcctaaatggccagaaacctcccggtgccacggagccaatcactgtaaagtttgctaataacccaagccaaaaaaccaatcaggccatcctttcccagctgtaccagtctccaaacagaaggtatccaggaccgctagctcagcaggcacagcgttttaggttggacaatctgctcaatatggcttatggagtaaagaggttttctccaatgaccattgacggaatgaccagtttggctggaattaatatccctgggcaccctggaacagggtggtgtatatttgtgtacaacctggctcctgacgcagatgagagtatcctgtggcaaatgtttgggccttttggagctgtcaccaatgtgaaggtcatccgtgactttaacaccaataaatgcaaaggttttggatttgtgactatgacaaactatgatgaggctgccatggcgatagctagcctcaatggataccgtctgggagacagagtactgcaggtctcctttaagacaaacaaaacgcacaaagcctaatgagctcttgtcctcagtccatttatatatgaaaactatacaacaaaggcaagttaagagaaactttatacattagtaaatgtctttgtaagtcagtgttgagatggggataaaatgactacttagcatcctaagaaatatgtgagattttttattgctagtatttgaattaaaacttcttaaatatcttttatgtttgaatatggacaagaggtacagggtttttacctgtcacattgcattctattgccttctttgaagaaggtggaccttttaaagtgtttcagctaagggaagacatttcttttctttttacataactgccttgaacctgtgagtaaatattgaggctttgtgttgtaattcttcagttggttgtgtcttttttttcccccctttttttcctttttctgattagctttgtgtttggtttacatttaaagcattgctgttatgtctgtttaagaaaagtattttgaagtttacatttttatttatgaagtttaaaacagtatttattttgtaattatgatttgggttggggaagggggggctacattataaacgcttattgtaagaatactggagaacttttcgtaaagcagtaccttgccaaagagataagagcctctttgatgtgggtttaaaaaaagcatctatttttataaaaaagaaaatttggagaaactttttactggtcctggaacaaatattttgacttgaatactttgagaaatctcttcatatgacacctagtgagcttttaaaatttaccaggaaatttgcagcggttggaaaatttagaaagatttatggtgtagaaaatacttttgagatctttgtatgaaaggagtagaatcaatggggggaaacactgctggtttcatttttgtaatcaccagtggagcgtctgatcatcctggttattatgtgataggtggctcacattgatttgtgattttgaaacaaataaaaaaaatttacaaaagaatatataagagcaggcaagaaatttaaattaccgagagatgggggaaaaaatctgttcttcctaaagaaatcccttcagatagagctcatggtgtttagtgatgtacttgcagtattgtttgaagaattgttttgtcttaaggaaaaaagacgttgcacatgatttgtactgcagcaaatcagcaaaagtgatctgagttggatatatttgaaggtattttgaaagttacgttcaaggctaacacctgagctttgtgtaatgtaaataagaccttgtgtttatgaacctttcagctaatttaattttttttcccttacatgccaagtgatgttcaggttttgaatgtttttgtatcagttttttcctttgtaaatggcattaacattgttacttgaggtcttgcttaatcacttttgttgtcctgaggacttgaatttacagtgcatcagatttgttgcaaattttgtctgtagatagtctagcttcagctgtttatggtgatgctacattttggtttataaatatgtttgtggtataaaaaaatgagtataaccataggttttgaacaaatttccttacatttttcatacaaaaatcataaatatctgtatgctattgaaatttaactttgtatgatgcttaaaaaccactatttggggaaataataaaataagtctttaccatgtatgaaagaaattttaaaaaatacaaaatattttctgattagcatctagcttataataaattttcaaaaaagctgaaggcaaaaatgccttcatcaggatgcactgagaactatatagttacgtcctgctttttgtataaactgagatgctcacatgcttccccttagaacaggcaatgtgctatgcataacatagttgtacattatctttgcggttgctttgagttttattttttattatttaaaattgtagttataaaatttttcagtatagtacagtacatatactgtgaggcgcgtgctaaagtgaataagcgagttttcatgctgacccactcaatgctattcagaaatcaattggcttagcactttctcatatccttaggtgcatttagattgccagagttaaccttctgcgtttaaaaaaagaaaaacactaaaaaataaaatacatgtatatacttaaaaaaaaataataaggtttccctcaagggaaaacagcagctacatgcttctttcctatactactgtagcaaaccaaggcattgatgagagggcatgcaaattgtgcttcactttacagtgttttatcagagcacttaataaaatgtaaggctggtatttatttgaagttgtacagtatgacttaattcacatctgttggaatagaaaatatattctgttgagtatttaagaggctgtacatgttttcttttgtgtttggattctttgtactttttcatgttcagtacatcaataaacaaagttgaaggg

SEQ ID NO: 6382 - DNA, 4729 bp, Homo sapiens
  source 1..4729: mol_type = unassigned DNA; mol_type = unassigned DNA
cgcagcgcgggccggagggagggagggagggtgggcgaggggagaggacttgaacacacgggaccggacaggaccgaccgaggggcggcggcgaaaggcagagcgccgcgatctctgtcgggaagcgcaacctccccgggccccgcggggccgcgcagggggcgtcctcaaccccgcgcccgctccctctttccatcccctgccgcccgcaggccaccccggggcccggccatccgcgcgcgcatccccgggttcgggcccgtccctggccctcgagggagccgccgccttcatcgccacatctgcagcggccgcaccagaggccgcccgggcgggaccccagcgtgagcatcgggcgcccccctaggagtgcaccacccccggagcccccctcaacacggaccgcgcccgccgggcacacaagaatggtcactcagatactgggggccatggagtctcaggtgggggggggcccggccggcccggccctgcccaacgggccactccttggtacaaatggagccactgacgacagcaagaccaacctcatcgtcaactacctgccccagaacatgacccaggatgagttcaagagtctcttcggcagcattggcgacatcgagtcctgcaagttggttcgggacaagatcacagggcagagccttggctacgggtttgtgaactattctgaccccaatgatgcagacaaagccatcaacaccctcaacggcctcaaattacagacgaagaccatcaaggtgtcctatgccagacccagttcagcatccatccgggatgctaacctgtacgtcagcgggctccccaagaccatgagccagaaagagatggagcagctcttctcccagtacggccgcatcatcacgtcccgcatcctggtggaccaggtcacaggtgtctctcggggtgtgggattcatccgctttgacaagaggattgaggccgaagaggctatcaaaggactgaatgggcagaagccgctgggcgcagctgagcccatcacagtcaagttcgcgaacaacccaagtcagaagacggggcaggcgctgctcacccacctctaccagtcatccgcccggcgctacgcaggccccctacaccatcagacccagcgtttccggctggacaatttgctcaacatggcctacggcgtcaagagtcccctgtcgctcatcgccaggttctcgccgatcgccatcgatggtatgagcggcctggcgggcgtgggcctgtcggggggcgcggcgggcgccggctggtgcatcttcgtgtacaacctgtcaccggaggcagacgagagcgtgctgtggcagctgttcgggccttttggggcagtcaccaacgtcaaggtcatccgtgatttcaccaccaacaagtgcaagggtttcggcttcgtgaccatgaccaactatgacgaggcggccatggccatcgccagcctgaacggctatcgcctgggcgagcgcgtgctgcaggtctccttcaagaccagcaaacagcacaaggcgtgagcccaccccgcctgccctcccaccccctccccgggcagcagagagagagagagagaaagagagagagagagagagaaggggcccaagagagacagcacaggcagccccacggacgacgcgagggccccacgtccctgcggaagccacagggtgagcactctggggtgggagggtctgcagggaattgggggggtgcccggggatcccccgccccatcctcctgcccccaccccaggctgggctgttcactctctcgtcttggtttggttcatggtgaaggtttttgtttcttttttcggctaaaaagaatgcagagatgtgcccccacccccaccctcgaccacccccgatgggatggcttggggggctccagggggtgccctcccagacccccttgcccaggcctccccagcacctaggtggggcctggggtaggaggaacaggtttaaaaatccccaaaaaagcgaaccgtgaggaggggtgtgggcacccccggcccagtgccccctggtggaatgcgggggagcaggcagtggggctggaagcagaaacaaaatgaaaaaaaaaggggggtgggaggggaagaaaaactctatttttgtaaaaagggaaaaagacctcgtggagaatttttactggggattcttgaacttgaaaaaaaaaaacacaaaaaaagacaaaaaaaaaaaaagaaaatattttggcaggttatgtttaccaactggggcgggggtggggggggcccagggagcagggcttaggggctagcagcccacggggccacacagagaaacaaccacgcagacagtcacaccacggggacacacggacagacgcagacggacacagcgacatgccccagacacgttaagggactggttggccaaactcagacacgtggacagggatagacagaaagagacagaagctggggctacgtccatgtggacacagaccacagatgtgggcacacgaatccatccacctgtccacgtgcacacgtgaatgtagcgatagatatttggacatcaaatttggacaccaggtcacggagaaacacaaacaccacccaggaacacgcagacatatgcccatagcatcccacaggcccaggcaggaggtcccaccccagaccctgccccagacgctccctcaccctctcggccccctcgccctggcccccaggttctctgcagagatctctcctggacccccagcggtctccttggcgcccacgaacacaggcgtgcacacgcagcgcacatgcattgagacacacgatacctcgttccaccttggcgtcacggtgggctggaggcagcccccccccccacaacacttgaggccaaaggacacccctgtccccggggctcagcctccccctgggccgaggccttggcccacacagctgagggagaggcccagccctgagcctcccccaccaggactgggcctccccggcagcaagaccccggcactccccgccaggcccagggtggggtggatgggcccaaaggcccagccccacactcctttcccgtccacttgtcacctacctatcccctttcggtttgttgggtttttcgtctttccagattgcagtggacacagcccccgatctcgagccccggcccccggcttctgtctggacattgcatcgccctagttttctttctttaaaaaaaaaaaattccaacagaagccacaggccggagcccctgggagccctcgcaccgctccccaccccactcagcggccccatcggaactgagaattgcaaaacccccgactttagctatagttaagttgccttcccccggtgtccccacgtttggtgtctggctatggcgcccccatctgactgtccagctctctctcccccacccctcccggtgttgttattaaacgtctgtggagcttctgctgcaaggaacaaaaaagaaaaaaatcaaaaaagcgacaaaaaaacacaaacagaagaggaaaaaaaagcaacaaaaaaagaaaacacacagaagagatttaaaaaaaaaaaaggaaaaaaaaaaaagacataaactggcaccagttaactttcttgtacttttttgctgaatttagcttcttgtagttttaacttattgctatgttaactatttattctcctcgttgccctgtaaggacatccgtgtatatttctgttacttcatccggtttgcaagttaaaggaacgacaatgttctctttgtttctttaagttttgccgagacatggttatgcctaatttatttataaaaggggaagtggaatcattaaagtaataataattattaataacagtaatggtagccgagtggcacgcgggggcgtgtgctctgcgggacagtccccacggccagcgacgtccaggtcaccaatgggattctttttgctcttgtcttgagaattttttcagtcctatttagctggtgaaatccctagcttgttcttgatacacgaacctatttattctcgtggttttaagtcctccctgccctctctcctctcccctgcagcagggcagggacccctctcccctgctgtctcttggggctctctcccctccgccctctgcattcgggaacacgcacgtccgcgtgggaagcttgcagcagggcgtccgagcaataagggctgggtttgtcccccaccctggggggggccaggctccagagagggggcacctccccacacaccccccccccaccgaggcctaggcccctgccacccccaagactgggaggggacttctttttctaaaacacaaaactcagcccagccaggccccctccctggaggccagcccctccccgcagggggccaggccggggctcccaggcgagggggacttggggcttccacgtccctggggggcaggggccaggccaggggggagggggctcagcccctccacccctcccttcatcctgttatttattcggaaggtttcaaatcacgacagagtccatgttggaggtgataaaaaactgtaaaaaaaaaaaaaaaaaaaaagacaaaacaaaagacaaaaaaaaaaaaaaaacccaacaagaacacttcgcgttgcgtttagactatttattaccgggatcacaggcctggccgcggtaacagacttttacatggaattgtttaattatttgtacttttcatgccagaaaataaaagttcagaatcttaa

SEQ ID NO: 6383 - DNA, 1223 bp, Homo sapiens
  source 1..1223: mol_type = unassigned DNA; mol_type = unassigned DNA
ccgccgggcacacaagaatggtcactcagatactgggggccatggagtctcaggtgggggggggcccggccggcccggccctgcccaacgggccactccttggtacaaatggagccactgacgacagcaagaccaacctcatcgtcaactacctgccccagaacatgacccaggatgagttcaagagtctcttcggcagcattggcgacatcgagtcctgcaagttggttcgggacaagatcacagggcagagccttggctacgggtttgtgaactattctgaccccaatgatgcagacaaagccatcaacaccctcaacggcctcaaattacagacgaagaccatcaaggtgtcctatgccagacccagttcagcatccatccgggatgctaacctgtacgtcagcgggctccccaagaccatgagccagaaagagatggagcagctcttctcccagtacggccgcatcatcacgtcccgcatcctggtggaccaggtcacaggtgtctctcggggtgtgggattcatccgctttgacaagaggattgaggccgaagaggctatcaaaggactgaatgggcagaagccgctgggcgcagctgagcccatcacagtcaagttcgcgaacaacccaagtcagaagacggggcaggcgctgctcacccacctctaccagtcatccgcccggcgctacgcaggccccctacaccatcagacccagcgtttccggctggacaatttgctcaacatggcctacggcgtcaagaggttctcgccgatcgccatcgatggtatgagcggcctggcgggcgtgggcctgtcggggggcgcggcgggcgccggctggtgcatcttcgtgtacaacctgtcaccggaggcagacgagagcgtgctgtggcagctgttcgggccttttggggcagtcaccaacgtcaaggtcatccgtgatttcaccaccaacaagtgcaagggtttcggcttcgtgaccatgaccaactatgacgaggcggccatggccatcgccagcctgaacggctatcgcctgggcgagcgcgtgctgcaggtctccttcaagaccagcaaacagcacaaggcgtgagcccaccccgcctgccctcccaccccctccccgggcagcagagagagagagagagaaagagagagagagagagagaaggggcccaagagagacagcacaggcagccccacggacgacgcgagg

SEQ ID NO: 6384 - DNA, 367 bp, Homo sapiens
  source 1..367: mol_type = unassigned DNA; mol_type = unassigned DNA
accccagcgtgagcatcgggcgcccccctaggagtgcaccacccccggagcccccctcaacacggaccgcgcccgccgggcacacaagaatggtcactcagatactgggggccatggagtctcaggtgggggggggcccggccggcccggccctgcccaacgggccactccttggtacaaatggagccactgacgacagcaagaccaacctcatcgtcaactacctgccccagaacatgacccaggatgagttcaagagtctcttcggcagcattggcgacatcgagtcctgcaagttggttcgggacaagatcacagacaaagccatcaacaccctcaacggcctcaaattacagacgaagaccat

SEQ ID NO: 6385 - DNA, 466 bp, Homo sapiens
  source 1..466: mol_type = unassigned DNA; mol_type = unassigned DNA
agagcgcggagcgcgcagcgcgggccggagggagggagggagggtgggcgaggggagaggacttgaacacacgggaccggacaggaccgaccgaggggcggcggcgaaaggcagagcgccgcgatctctgtcgggaagcgcaacctccccgggccccgcggggccgcgcagggggcgtcctcaaccccgcgcccgctccctctttccatcccctgccgcccgcaggccaccccggggcccggccatccgcgcgcgcatccccgggttcgggcccgtccctggccctcgagggagccgccgccttcatcgccacatctgcagcggccgcaccagaggccgcccgggcgggaccccagcgtgagcatcgggcgcccccctaggagtgcaccacccccggagcccccctcaacacggaccgcgcccgccgggcacacaagaatggtcactgcccagaccccgcaggccg

SEQ ID NO: 6386 - DNA, 3775 bp, Homo sapiens
  source 1..3775: mol_type = unassigned DNA; mol_type = unassigned DNA
gtctgacttggagttttgtgctgttgcacgtgaatgctctggaactgccctaatcgactgaaaatgagccggctacagtcatatggaacagataattagcaccatggagcctcaggtgtcaaatggtccgacatccaatacaagcaatggaccctccagcaacaacagaaactgtccttctcccatgcaaacaggggcaaccacagatgacagcaaaaccaacctcatcgtcaactatttaccccagaatatgacccaagaagaattcaggagtctcttcgggagcattggtgaaatagaatcctgcaaacttgtgagagacaaaattacaggacagagtttagggtatggatttgttaactatattgatccaaaggatgcagagaaagccatcaacactttaaatggactcagactccagaccaaaaccataaaggtctcatatgcccgtccgagctctgcctcaatcagggatgctaacctctatgttagcggccttcccaaaaccatgacccagaaggaactggagcaacttttctcgcaatacggccgtatcatcacctcacgaatcctggttgatcaagtcacaggagtgtccagaggggtgggattcatccgctttgataagaggattgaggcagaagaagccatcaaagggctgaatggccagaagcccagcggtgctacggaaccgattactgtgaagtttgccaacaaccccagccagaagtccagccaggccctgctctcccagctctaccagtcccccaaccggcgctacccaggtccacttcaccaccaggctcagaggttcaggctggacaatttgcttaatatggcctatggcgtaaagaggttctccccaattaccattgatggaatgacaagccttgtgggaatgaacatccctggtcacacaggaactgggtggtgcatctttgtctacaacctgtcccccgattccgatgagagtgtcctctggcagctctttggcccctttggagcagtgaacaacgtaaaggtgattcgtgacttcaacaccaacaagtgcaagggattcggctttgtcaccatgaccaactatgatgaggcggccatggccatcgccagcctcaacgggtaccgcctgggagacagagtgttgcaagtttcctttaaaaccaacaaagcccacaagtcctgaatttcccattcttacttactaaaatatatatagaaatatatacgaacaaaacacacgcgcgcacacacacacatacacgaaagagagagaaacaaacttttcaaggcttatattcaaccatggactttataagccagtgttgcctaagtattaaaacattggattatcctgaggtgtaccaggaaaggattttataatgcttagaaaaaaagaaaaaaaaaaaacaaaaaatacctttgatgcattgaatgttctttcatagctgtcgttgttgaatataatatacatagatagcgatgtgcagggatttttacccagccagctaactttactaccttccttgaaggtggatctttttaagatgaccattcgctcatttgaagaagaaaaacaaaaaacaaaaaaaataataaaaataaaacaatttttacaaagtaatgggattcaaagaaaggaaaaaaagatttttcttttttgtcaaaatatcgatccaatcagattggtaaaaacccccacacaaattaaagaggaataataaaaattgcaaaaataaaaaaaaacttttgcaaatttttttatttttccttctttcttttatatcatgtgaactaaaacagtcttctgttaggggatgggggcaagggggatacctgatgacattaacaatttaataacattaacattgttgccaaagaggtggtctctttgctgaaaatgggtttcaagaaaaatctatttttataaaatataaagaatttttacaagagaatctggatttgagaaaaaaatattttgactggctaatttaggggaaattgacaactttgtcgcgttcatactgcactggtaactttttagagatcaagatgtgtgttttaaactggattcgtagactgttttttgaaggatgggctataaacagatgatcttcatatcttttcatagcatgtaataataattaaaaaacaattattaattactaggggaaaggagtgttcgttctacccagggtaccacagttccccacagtcaaaacccaaaagcaaggagatgagttgaaagacagtttttctttaagtcatcagtatgggatgtcagcagaacaaaaattaaaaagattaattttccttttgatctaaaacttccttagtttgagcagtaggtgctacaaaattatttacatatcttagtatcatagttaaatgtaatgtgtttaggagaggaaaacaaaagatacatttgctttaaattcattaagaaattttcaaattcactttgtagcccatgctgatagaattgggctgtgttggtacatttgaaacactgtttatgttgcttgaaacacttatttatttaatcgccgatgtgatgatgcctatggccgagatcaaatatagctagattggctagactacttatttgtttacttaaactatgggaagaagcatattattgtgtcattctgttgtgtgtgtatgtgtatatacaatataaatatatatatataaagttattttttctttgggttaatttattataagttgtaacacttggctagttttgtttgtatatgtcttaaaatgttttcttatgatatttaagtgacagttaaagaggtatcaaggtaacttgtgtagaactattctttgatatattgtcatgtttgttgtgaatattttttcttactgcacagtagaaaaataaaaacaactgagtctttattttaatgtaactcagattggggaaaacaaaacagagctaagggaacaaaatgactgagggagcactctcccacgtccagtgcactgatcattttagtatgtttgtgctttgtacggttatatatttaaaacgaaaacaaaacaaaaaaatacaagggttcatgctcttccctgggtaatagaaacagttactcgctatgcataatctagttgatagttaaatttgctattgcttttcttgtcttgttatataaaatcttttcaatacaagtttagtcttaatggtaataaaacgttatggttatttataacttgtgcttattttgtgcattttttcccatgctgaacccactaagtgcatgtagacaggactgttgttttcacactgaaaaggcaaactttgtagtagtcgttgtagtggtagacagataacgaataccaaggctgcatcatagactcctcctttaaattttttttctgtttttttttcctcttttcggttttggatataacaccagatttcagttcagagaacactcgttcaacattcagggaaagctttttacgtcacctgctatgaatgaacgtagtttgctggcaaagttttgatgcatttgctaagcattagtgggaaaggcatgccaaaatcttctctataatgtgttcaatcttgggggaaaaaaaaaggaaaaaaaatcttaggaccaggcagttgtatactttagttattaatgaatgacttcatgttaatcttgctagtttagatgatttccaagggaaagtattgtaaatgtttttttttcataatcttgttgtgtttgaattatttgtactttatctgtccagacaataaatgaaagtgtgtagaatg

SEQ ID NO: 6387 - DNA, 489 bp, Homo sapiens
  source 1..489: mol_type = unassigned DNA; mol_type = unassigned DNA
tcttgcaaagagagcagtacatataacaggagtctactgtgtgtgagataaggggaaaattcagctcactgactagaggttttaatgtacgaactctagggaaataatatattgactgttccgtggtgcgcaagaaaattgaagaaccctttgcagacggagtgctttgcaaaggattctatctgtttctcttaaaacaaaatctgtggcaagatgtttgaaatcagcaggacgcttaatgctgctttgttaaataatgagataattagcaccatggagcctcaggtgtcaaatggtccgacatccaatacaagcaatggaccctccagcaacaacagaaactgtccttctcccatgcaaacaggggcaaccacagatgacagcaaaaccaacctcatcgtcaactatttaccccagaatatgacccaagaagaattcaggagtctcttcgggagcattggtgaaatagaatcctgcaaacttgtgaga

SEQ ID NO: 6388 - DNA, 1442 bp, Homo sapiens
  source 1..1442: mol_type = unassigned DNA; mol_type = unassigned DNA
tgccggcgactgatgctgagatatctgcaacctttgggatgtgtgcatggtggcaaggggctgactgatatgagattacttcttttaagggaaattgtcattaatgagtcaagaaactgctcatttatgataattagcaccatggagcctcaggtgtcaaatggtccgacatccaatacaagcaatggaccctccagcaacaacagaaactgtccttctcccatgcaaacaggggcaaccacagatgacagcaaaaccaacctcatcgtcaactatttaccccagaatatgacccaagaagaattcaggagtctcttcgggagcattggtgaaatagaatcctgcaaacttgtgagagacaaaattacaggacagagtttagggtatggatttgttaactatattgatccaaaggatgcagagaaagccatcaacactttaaatggactcagactccagaccaaaaccataaaggtctcatatgcccgtccgagctctgcctcaatcagggatgctaacctctatgttagcggccttcccaaaaccatgacccagaaggaactggagcaacttttctcgcaatacggccgtatcatcacctcacgaatcctggttgatcaagtcacaggagtgtccagaggggtgggattcatccgctttgataagaggattgaggcagaagaagccatcaaagggctgaatggccagaagcccagcggtgctacggaaccgattactgtgaagtttgccaacaaccccagccagaagtccagccaggccctgctctcccagctctaccagtcccccaaccggcgctacccaggtccacttcaccaccaggctcagaggttcaggctggacaatttgcttaatatggcctatggcgtaaagaggttctccccaattaccattgatggaatgacaagccttgtgggaatgaacatccctggtcacacaggaactgggtggtgcatctttgtctacaacctgtcccccgattccgatgagagtgtcctctggcagctctttggcccctttggagcagtgaacaacgtaaaggtgattcgtgacttcaacaccaacaagtgcaagggattcggctttgtcaccatgaccaactatgatgaggcggccatggccatcgccagcctcaacgggtaccgcctgggagacagagtgttgcaagtttcctttaaaaccaacaaagcccacaagtcctgaatttcccattcttacttactaaaatatatatagaaatatatacgaacaaaacacacgcgcgcacacacacacatacacgaaagagagagaaacaaacttttcaaggcttatattcaaccatggactttataagccagtgttgcctaagtattaaaacattggattatcctgaggtgtaccaggaaaggattttataatgcttagaaaaaaagaaaaaaaaa

SEQ ID NO: 6389 - DNA, 3966 bp, Homo sapiens
  source 1..3966: mol_type = unassigned DNA; mol_type = unassigned DNA
caaggctctgttcagttgttcttatctacatcctagaatcgggggtttcagctcactgctccttttcttttttttctttctctcccccgcccacccccccaaaaataattgatttgctttacaatcatccacactgtgttttgtggatctttaattatatataacaatagtagtcattttaaatatatattctgaaatctttgcaaattttaacagaagagtcgaagctctgcgagacccaatatttgccaataagaatggttatgataattagcaccatggagcctcaggtgtcaaatggtccgacatccaatacaagcaatggaccctccagcaacaacagaaactgtccttctcccatgcaaacaggggcaaccacagatgacagcaaaaccaacctcatcgtcaactatttaccccagaatatgacccaagaagaattcaggagtctcttcgggagcattggtgaaatagaatcctgcaaacttgtgagagacaaaattacaggacagagtttagggtatggatttgttaactatattgatccaaaggatgcagagaaagccatcaacactttaaatggactcagactccagaccaaaaccataaaggtctcatatgcccgtccgagctctgcctcaatcagggatgctaacctctatgttagcggccttcccaaaaccatgacccagaaggaactggagcaacttttctcgcaatacggccgtatcatcacctcacgaatcctggttgatcaagtcacaggagtgtccagaggggtgggattcatccgctttgataagaggattgaggcagaagaagccatcaaagggctgaatggccagaagcccagcggtgctacggaaccgattactgtgaagtttgccaacaaccccagccagaagtccagccaggccctgctctcccagctctaccagtcccccaaccggcgctacccaggtccacttcaccaccaggctcagaggttcaggctggacaatttgcttaatatggcctatggcgtaaagaggttctccccaattaccattgatggaatgacaagccttgtgggaatgaacatccctggtcacacaggaactgggtggtgcatctttgtctacaacctgtcccccgattccgatgagagtgtcctctggcagctctttggcccctttggagcagtgaacaacgtaaaggtgattcgtgacttcaacaccaacaagtgcaagggattcggctttgtcaccatgaccaactatgatgaggcggccatggccatcgccagcctcaacgggtaccgcctgggagacagagtgttgcaagtttcctttaaaaccaacaaagcccacaagtcctgaatttcccattcttacttactaaaatatatatagaaatatatacgaacaaaacacacgcgcgcacacacacacatacacgaaagagagagaaacaaacttttcaaggcttatattcaaccatggactttataagccagtgttgcctaagtattaaaacattggattatcctgaggtgtaccaggaaaggattttataatgcttagaaaaaaagaaaaaaaaaaaacaaaaaatacctttgatgcattgaatgttctttcatagctgtcgttgttgaatataatatacatagatagcgatgtgcagggatttttacccagccagctaactttactaccttccttgaaggtggatctttttaagatgaccattcgctcatttgaagaagaaaaacaaaaaacaaaaaaaataataaaaataaaacaatttttacaaagtaatgggattcaaagaaaggaaaaaaagatttttcttttttgtcaaaatatcgatccaatcagattggtaaaaacccccacacaaattaaagaggaataataaaaattgcaaaaataaaaaaaaacttttgcaaatttttttatttttccttctttcttttatatcatgtgaactaaaacagtcttctgttaggggatgggggcaagggggatacctgatgacattaacaatttaataacattaacattgttgccaaagaggtggtctctttgctgaaaatgggtttcaagaaaaatctatttttataaaatataaagaatttttacaagagaatctggatttgagaaaaaaatattttgactggctaatttaggggaaattgacaactttgtcgcgttcatactgcactggtaactttttagagatcaagatgtgtgttttaaactggattcgtagactgttttttgaaggatgggctataaacagatgatcttcatatcttttcatagcatgtaataataattaaaaaacaattattaattactaggggaaaggagtgttcgttctacccagggtaccacagttccccacagtcaaaacccaaaagcaaggagatgagttgaaagacagtttttctttaagtcatcagtatgggatgtcagcagaacaaaaattaaaaagattaattttccttttgatctaaaacttccttagtttgagcagtaggtgctacaaaattatttacatatcttagtatcatagttaaatgtaatgtgtttaggagaggaaaacaaaagatacatttgctttaaattcattaagaaattttcaaattcactttgtagcccatgctgatagaattgggctgtgttggtacatttgaaacactgtttatgttgcttgaaacacttatttatttaatcgccgatgtgatgatgcctatggccgagatcaaatatagctagattggctagactacttatttgtttacttaaactatgggaagaagcatattattgtgtcattctgttgtgtgtgtatgtgtatatacaatataaatatatatatataaagttattttttctttgggttaatttattataagttgtaacacttggctagttttgtttgtatatgtcttaaaatgttttcttatgatatttaagtgacagttaaagaggtatcaaggtaacttgtgtagaactattctttgatatattgtcatgtttgttgtgaatattttttcttactgcacagtagaaaaataaaaacaactgagtctttattttaatgtaactcagattggggaaaacaaaacagagctaagggaacaaaatgactgagggagcactctcccacgtccagtgcactgatcattttagtatgtttgtgctttgtacggttatatatttaaaacgaaaacaaaacaaaaaaatacaagggttcatgctcttccctgggtaatagaaacagttactcgctatgcataatctagttgatagttaaatttgctattgcttttcttgtcttgttatataaaatcttttcaatacaagtttagtcttaatggtaataaaacgttatggttatttataacttgtgcttattttgtgcattttttcccatgctgaacccactaagtgcatgtagacaggactgttgttttcacactgaaaaggcaaactttgtagtagtcgttgtagtggtagacagataacgaataccaaggctgcatcatagactcctcctttaaattttttttctgtttttttttcctcttttcggttttggatataacaccagatttcagttcagagaacactcgttcaacattcagggaaagctttttacgtcacctgctatgaatgaacgtagtttgctggcaaagttttgatgcatttgctaagcattagtgggaaaggcatgccaaaatcttctctataatgtgttcaatcttgggggaaaaaaaaaggaaaaaaaatcttaggaccaggcagttgtatactttagttattaatgaatgacttcatgttaatcttgctagtttagatgatttccaagggaaagtattgtaaatgtttttttttcataatcttgttgtgtttgaattatttgtactttatctgtccagacaataaatgaaagtgtgtagaatggatttgacttcccaaa

SEQ ID NO: 6390 - DNA, 1591 bp, Homo sapiens
  source 1..1591: mol_type = unassigned DNA; mol_type = unassigned DNA
tagaatcgggggtttcagctcactgctccttttcttttttttctttctctcccccgcccacccccccaaaaataattgatttgctttacaatcatccacactgtgttttgtggatctttaattatatataacaatagtagtcattttaaatatatattctgaaatctttgcaaattttaacagaagagtcgaagctctgcgagacccaatatttgccaataagaatggttatgataattagcaccatggagcctcaggtgtcaaatggtccgacatccaatacaagcaatggaccctccagcaacaacagaaactgtccttctcccatgcaaacaggggcaaccacagatgacagcaaaaccaacctcatcgtcaactatttaccccagaatatgacccaagaagaattcaggagtctcttcgggagcattggtgaaatagaatcctgcaaacttgtgagagacaaaattacaggacagagtttagggtatggatttgttaactatattgatccaaaggatgcagagaaagccatcaacactttaaatggactcagactccagaccaaaaccataaaggtctcatatgcccgtccgagctctgcctcaatcagggatgctaacctctatgttagcggccttcccaaaaccatgacccagaaggaactggagcaacttttctcgcaatacggccgtatcatcacctcacgaatcctggttgatcaagtcacaggagtgtccagaggggtgggattcatccgctttgataagaggattgaggcagaagaagccatcaaagggctgaatggccagaagcccagcggtgctacggaaccgattactgtgaagtttgccaacaaccccagccagaagtccagccaggccctgctctcccagctctaccagtcccccaaccggcgctacccaggtccacttcaccaccaggctcagaggttcaggctggacaatttgcttaatatggcctatggcgtaaagagactgatgtctggaccagtccccccttctgcttgtccccccaggttctccccaattaccattgatggaatgacaagccttgtgggaatgaacatccctggtcacacaggaactgggtggtgcatctttgtctacaacctgtcccccgattccgatgagagtgtcctctggcagctctttggcccctttggagcagtgaacaacgtaaaggtgattcgtgacttcaacaccaacaagtgcaagggattcggctttgtcaccatgaccaactatgatgaggcggccatggccatcgccagcctcaacgggtaccgcctgggagacagagtgttgcaagtttcctttaaaaccaacaaagcccacaagtcctgaatttcccattcttacttactaaaatatatatagaaatatatacgaacaaaacacacgcgcgcacacacacacatacacgaaagagagagaaacaaacttttcaaggcttatattcaaccatggactttataagccagtgttgcctaagtattaaaacattggattatcctgaggtgtaccaggaaaggattttataatgcttagaaaaaaagaaaaaaaaaaaa

SEQ ID NO: 6391 - DNA, 3349 bp, Homo sapiens
  source 1..3349: mol_type = unassigned DNA; mol_type = unassigned DNA
taaacctcgagaggcagctcctggatactgaacactgagatgggcagttgtgtttcgggggactgcgcagtcaaaacggcaaagagagtgatttatttgggcttcagtaaatgctgcatcttgtatttcaaagagtttcctgtcatgacctcataaaaaagaggaggcggcttgtatgtgtagcagtgcctggcgtgttgagttgttgcttccttctctgggcagcagctctgtaagaaggaatgtcagcttttacataacgttcctttccgcttttgacacactgtgtgagggtccatcttcttctgatcacagatggagtggaatggcttgaagatgataattagcaccatggagcctcaggtgtcaaatggtccgacatccaatacaagcaatggaccctccagcaacaacagaaactgtccttctcccatgcaaacaggggcaaccacagatgacagcaaaaccaacctcatcgtcaactatttaccccagaatatgacccaagaagaattcaggagtctcttcgggagcattggtgaaatagaatcctgcaaacttgtgagagacaaaattacaggacagagtttagggtatggatttgttaactatattgatccaaaggatgcagagaaagccatcaacactttaaatggactcagactccagaccaaaaccataaaggtctcatatgcccgtccgagctctgcctcaatcagggatgctaacctctatgttagcggccttcccaaaaccatgacccagaaggaactggagcaacttttctcgcaatacggccgtatcatcacctcacgaatcctggttgatcaagtcacaggagtgtccagaggggtgggattcatccgctttgataagaggattgaggcagaagaagccatcaaagggctgaatggccagaagcccagcggtgctacggaaccgattactgtgaagtttgccaacaaccccagccagaagtccagccaggccctgctctcccagctctaccagtcccccaaccggcgctacccaggtccacttcaccaccaggctcagaggttcaggctggacaatttgcttaatatggcctatggcgtaaagagactgatgtctggaccagtccccccttctgcttgtccccccaggttctccccaattaccattgatggaatgacaagccttgtgggaatgaacatccctggtcacacaggaactgggtggtgcatctttgtctacaacctgtcccccgattccgatgagagtgtcctctggcagctctttggcccctttggagcagtgaacaacgtaaaggtgattcgtgacttcaacaccaacaagtgcaagggattcggctttgtcaccatgaccaactatgatgaggcggccatggccatcgccagcctcaacgggtaccgcctgggagacagagtgttgcaagtttcctttaaaaccaacaaagcccacaagtcctgaatttcccattcttacttactaaaatatatatagaaatatatacgaacaaaacacacgcgcgcacacacacacatacacgaaagagagagaaacaaacttttcaaggcttatattcaaccatggactttataagccagtgttgcctaagtattaaaacattggattatcctgaggtgtaccaggaaaggattttataatgcttagaaaaaaagaaaaaaaaaaaacaaaaaatacctttgatgcattgaatgttctttcatagctgtcgttgttgaatataatatacatagatagcgatgtgcagggatttttacccagccagctaactttactaccttccttgaaggtggatctttttaagatgaccattcgctcatttgaagaagaaaaacaaaaaacaaaaaaaataataaaaataaaacaatttttacaaagtaatgggattcaaagaaaggaaaaaaagatttttcttttttgtcaaaatatcgatccaatcagattggtaaaaacccccacacaaattaaagaggaataataaaaattgcaaaaataaaaaaaaacttttgcaaatttttttatttttccttctttcttttatatcatgtgaactaaaacagtcttctgttaggggatgggggcaagggggatacctgatgacattaacaatttaataacattaacattgttgccaaagaggtggtctctttgctgaaaatgggtttcaagaaaaatctatttttataaaatataaagaatttttacaagagaatctggatttgagaaaaaaatattttgactggctaatttaggggaaattgacaactttgtcgcgttcatactgcactggtaactttttagagatcaagatgtgtgttttaaactggattcgtagactgttttttgaaggatgggctataaacagatgatcttcatatcttttcatagcatgtaataataattaaaaaacaattattaattactaggggaaaggagtgttcgttctacccagggtaccacagttccccacagtcaaaacccaaaagcaaggagatgagttgaaagacagtttttctttaagtcatcagtatgggatgtcagcagaacaaaaattaaaaagattaattttccttttgatctaaaacttccttagtttgagcagtaggtgctacaaaattatttacatatcttagtatcatagttaaatgtaatgtgtttaggagaggaaaacaaaagatacatttgctttaaattcattaagaaattttcaaattcactttgtagcccatgctgatagaattgggctgtgttggtacatttgaaacactgtttatgttgcttgaaacacttatttatttaatcgccgatgtgatgatgcctatggccgagatcaaatatagctagattggctagactacttatttgtttacttaaactatgggaagaagcatattattgtgtcattctgttgtgtgtgtatgtgtatatacaatataaatatatatatataaagttattttttctttgggttaatttattataagttgtaacacttggctagttttgtttgtatatgtcttaaaatgttttcttatgatatttaagtgacagttaaagaggtatcaaggtaacttgtgtagaactattctttgatatattgtcatgtttgttgtgaatattttttcttactgcacagtagaaaaataaaaacaactgagtctttattttaatgtaactcagattggggaaaacaaaacagagctaagggaacaaaatgactgagggagcactctcccacgtccagtgcactgatcattttagtatgtttgtgctttgtacggttatatatttaaaacgaaaacaaaacaaaaaaatacaa

SEQ ID NO: 6392 - DNA, 2467 bp, Homo sapiens
  source 1..2467: mol_type = unassigned DNA; mol_type = unassigned DNA
aaagagagtgatttatttgggcttcagtaaatgctgcatcttgtatttcaaagagtttcctgtcatgacctcataaaaaagaggaggcggcttgtatgtgtagcagtgcctggcgtgttgagttgttgcttccttctctgggcagcagctctgtaagaaggaatgtcagcttttacataacgttcctttccgcttttgacacactgtgtgagggtccatcttcttctgatcacagatggagtggaatggcttgaagatgataattagcaccatggagcctcaggtgtcaaatggtccgacatccaatacaagcaatggaccctccagcaacaacagaaactgtccttctcccatgcaaacaggggcaaccacagatgacagcaaaaccaacctcatcgtcaactatttaccccagaatatgacccaagaagaattcaggagtctcttcgggagcattggtgaaatagaatcctgcaaacttgtgagagacaaaattacaggacagagtttagggtatggatttgttaactatattgatccaaaggatgcagagaaagccatcaacactttaaatggactcagactccagaccaaaaccataaaggtctcatatgcccgtccgagctctgcctcaatcagggatgctaacctctatgttagcggccttcccaaaaccatgacccagaaggaactggagcaacttttctcgcaatacggccgtatcatcacctcacgaatcctggttgatcaagtcacaggagtgtccagaggggtgggattcatccgctttgataagaggattgaggcagaagaagccatcaaagggctgaatggccagaagcccagcggtgctacggaaccgattactgtgaagtttgccaacaaccccagccagaagtccagccaggccctgctctcccagctctaccagtcccccaaccggcgctacccaggtccacttcaccaccaggctcagaggttcaggctggacaatttgcttaatatggcctatggcgtaaagaggttctccccaattaccattgatggaatgacaagccttgtgggaatgaacatccctggtcacacaggaactgggtggtgcatctttgtctacaacctgtcccccgattccgatgagagtgtcctctggcagctctttggcccctttggagcagtgaacaacgtaaaggtgattcgtgacttcaacaccaacaagtgcaagggattcggctttgtcaccatgaccaactatgatgaggcggccatggccatcgccagcctcaacgggtaccgcctgggagacagagtgttgcaagtttcctttaaaaccaacaaagcccacaagtcctgaatttcccattcttacttactaaaatatatatagaaatatatacgaacaaaacacacgcgcgcacacacacacatacacgaaagagagagaaacaaacttttcaaggcttatattcaaccatggactttataagccagtgttgcctaagtattaaaacattggattatcctgaggtgtaccaggaaaggattttataatgcttagaaaaaaagaaaaaaaaaaaacaaaaaatacctttgatgcattgaatgttctttcatagctgtcgttgttgaatataatatacatagatagcgatgtgcagggatttttacccagccagctaactttactaccttccttgaaggtggatctttttaagatgaccattcgctcatttgaagaagaaaaacaaaaaacaaaaaaaataataaaaataaaacaatttttacaaagtaatgggattcaaagaaaggaaaaaaagatttttcttttttgtcaaaatatcgatccaatcagattggtaaaaacccccacacaaattaaagaggaataataaaaattgcaaaaataaaaaaaaacttttgcaaatttttttatttttccttctttcttttatatcatgtgaactaaaacagtcttctgttaggggatgggggcaagggggatacctgatgacattaacaatttaataacattaacattgttgccaaagaggtggtctctttgctgaaaatgggtttcaagaaaaatctatttttataaaatataaagaatttttacaagagaatctggatttgagaaaaaaatattttgactggctaatttaggggaaattgacaactttgtcgcgttcatactgcactggtaactttttagagatcaagatgtgtgttttaaactggattcgtagactgttttttgaaggatgggctataaacagatgatcttcatatcttttcatagcatgtaataataattaaaaaacaattattaattactaggggaaaggagtgttcgttctacccagggtaccacagttccccacagtcaaaacccaaaagcaaggagatgagttgaaagacagtttttctttaagtcatcagtatgggatgtcagcagaacaaaaattaaaaa

SEQ ID NO: 6393 - DNA, 458 bp, Homo sapiens
  source 1..458: mol_type = unassigned DNA; mol_type = unassigned DNA
tggcgtgttgagttgttgcttccttctctgggcagcagctctgtaagaaggaatgtcagcttttacataacgttcctttccgcttttgacacactgtgtgagggtccatcttcttctgatcacagatggagtggaatggcttgaagatgccttctagaatcctaaagttgacctgaagccaagaagaaaattctggtgatgggagaagtggagccacttaaattacttacatgatgataattagcaccatggagcctcaggtgtcaaatggtccgacatccaatacaagcaatggaccctccagcaacaacagaaactgtccttctcccatgcaaacaggggcaaccacagatgacagcaaaaccaacctcatcgtcaactatttaccccagaatatgacccaagaagaattcaggagtctcttcgggagcattggtgaaatagaatcctgcaaactt

SEQ ID NO: 6394 - DNA, 2106 bp, Homo sapiens
  source 1..2106: mol_type = unassigned DNA; mol_type = unassigned DNA
ttagataattagcaccatggagcctcaggtgtcaaatggtccgacatccaatacaagcaatggaccctccagcaacaacagaaactgtccttctcccatgcaaacaggggcaaccacagatgacagcaaaaccaacctcatcgtcaactatttaccccagaatatgacccaagaagaattcaggagtctcttcgggagcattggtgaaatagaatcctgcaaacttgtgagagacaaaattacaggacagagtttagggtatggatttgttaactatattgatccaaaggatgcagagaaagccatcaacactttaaatggactcagactccagaccaaaaccataaaggccactgtttacctctgcttcagtttgctttgataagtgacatgagatctatctctttgctctgactcccatgaaggaatagttaacttgcctatctggaaaaaaaccaagtatcttctttggaagcgtacattacagaggtctcaggaccatctagtacatgtttgtgaactttggtcaaatttccccctccttttcaaatttctggagtgcaaaacactctactttaaatgttatgcacaaagtaggttcaggcaaatcaatagttaattccaaagctgtgaaggttaatgattaacagctggattcagggaaggttctggaaagctctaaggcatcggtggagactgtagtgagctgtaaagaagacagctattctgctgctgctgctaactgtttaaacccagattgttgccagatctaccagttgtccaatacacatgaaaatctagatttttttcctgccaatctcccaatttttaaaagctagaaaataactcaaagaattttaagaattatgtaggtgggccaaacagaacttaatagttgaccttttgacaggcagtttgcaaaccaccccccaacccacccccaccaaaaaaaaaatgaactcaaatttaaatatgaaaacatcgttttgccaattggtagtgaatggctcattacaggtccactacaggctgagcatcccaaattggaaaatctgaaacccaaaatgctccaaaatttgaaactttttgagcacctacatgacactcaaaggaaatgctcattggtgcattttagatttcaagtttttggattaaggatgttgaatcagtataatgcaaatattccaaaatctaaaatttgtggtcccatttctgataagggatactcaacctgtactaggaggtacccacaaatgatggttcccagtcaacaaatatccatttcccttttattaggggcagtgttacatgactctgtgtgaatactgacagcattcagagagcaatctgacctctgttctccagaagcatgcaatctaggcatcggcacagcaccaaagcagagaaagagcatgatgtgtaattaagcttccaatgcatagtgtggatggtgactccaggggaattgttctttgggttataacttctttagtgggagaaagttcccaccacacatcttggagatcaggctcagagacactaagtgacttgtccaaagccatacaacaggccagcagtggagctcaagttagcttcaaaagggcctctgaaggattctgccagaagaggagctgcttaatatgttagcatgagcttgaaataataataataaagattaatagtaatgctaatttatagtgagtattcactctgtatccaatactattataacccttttacatgcttaatatcatttcatctttgaaatatccctggagctaggtgctttacacacatcaactctaattcttaaaatagccctgtcaggaggtactattacctcctttatacaggtgaggaaactgaggcccaaggaggcttagagacacacccaggatgacacaattgataagcaagacttggagtaagaaaaaatgttctaaaaataactctctggcagtaggtcgtaagtgttggaatgtcacactgcctgcttgctcagcaacacgtgcattctgtgagggtgtgtgggtgtgtatttggctctgtgcacacatgggttatactctctggcatgggaaggagaataaaaagcaaacaaatgaa

SEQ ID NO: 6395 - DNA, 600 bp, Homo sapiens
  source 1..600: mol_type = unassigned DNA; mol_type = unassigned DNA
aaggatgcagagaaagccatcaacactttaaatggactcagactccagaccaaaaccataaaggtctcatatgcccgtccgagctctgcctcaatcagggatgctaacctctatgttagcggccttcccaaaaccatgacccagaaggaactggagcaacttttctcgcaatacggccgtatcatcacctcacgaatcctggttgatcaagtcacaggagtgtccagaggggtgggattcatccgctttgataagaggattgaggcagaagaagccatcaaagggctgaatggccagaagcccagcggtgctacggaaccgattactgtgaagtttgccaacaaccccagccagaagtccagccaggccctgctctcccagctctaccagtcccccaaccggcgctacccaggtccacttcaccaccaggctcagaggttcaggctggacaatttgcttaatatggcctatggcgtaaagaggtaattaaaactccacagattgccagatgtccatgttggcacagactggggctagaattttttttttttaattcactaactttactttaaaagaaaaaaattcttcctttttcttcca

SEQ ID NO: 6396 - DNA, 1951 bp, Homo sapiens
  source 1..1951: mol_type = unassigned DNA; mol_type = unassigned DNA
aggtgggcagggggtggcggcggcgacggtggcggagccgcagagcgagctagagagcgagagcggtgagactctgcggacgtcttcccgcccgccgcgctccgccccacccagcctccgcagcctcgggccggatcgcccggcggggaagatgcgcctcaagaaccagataattagcaccatggagcctcaggtgtcaaatggtccgacatccaatacaagcaatggaccctccagcaacaacagaaactgtccttctcccatgcaaacaggggcaaccacagatgacagcaaaaccaacctcatcgtcaactatttaccccagaatatgacccaagaagaattcaggagtctcttcgggagcattggtgaaatagaatcctgcaaacttgtgagagacaaaattacaggacagagtttagggtatggatttgttaactatattgatccaaaggatgcagagaaagccatcaacactttaaatggactcagactccagaccaaaaccataaaggtctcatatgcccgtccgagctctgcctcaatcagggatgctaacctctatgttagcggccttcccaaaaccatgacccagaaggaactggagcaacttttctcgcaatacggccgtatcatcacctcacgaatcctggttgatcaagtcacaggagtgtccagaggggtgggattcatccgctttgataagaggattgaggcagaagaagccatcaaagggctgaatggccagaagcccagcggtgctacggaaccgattactgtgaagtttgccaacaaccccagccagaagtccagccaggccctgctctcccagctctaccagtcccccaaccggcgctacccaggtccacttcaccaccaggctcagaggttcaggctggacaatttgcttaatatggcctatggcgtaaagaggttctccccaattaccattgatggaatgacaagccttgtgggaatgaacatccctggtcacacaggaactgggtggtgcatctttgtctacaacctgtcccccgattccgatgagagtgtcctctggcagctctttggcccctttggagcagtgaacaacgtaaaggtgattcgtgacttcaacaccaacaagtgcaagggattcggctttgtcaccatgaccaactatgatgaggcggccatggccatcgccagcctcaacgggtaccgcctgggagacagagtgttgcaagtttcctttaaaaccaacaaagcccacaagtcctgaatttcccattcttacttactaaaatatatatagaaatatatacgaacaaaacacacgcgcgcacacacacacatacacgaaagagagagaaacaaacttttcaaggcttatattcaaccatggactttataagccagtgttgcctaagtattaaaacattggattatcctgaggtgtaccaggaaaggattttataatgcttagaaaaaaagaaaaaaaaaaaacaaaaaatacctttgatgcattgaatgttctttcatagctgtcgttgttgaatataatatacatagatagcgatgtgcagggatttttacccagccagctaactttactaccttccttgaaggtggatctttttaagatgaccattcgctcatttgaagaagaaaaacaaaaaacaaaaaaaataataaaaataaaacaatttttacaaagtaatgggattcaaagaaaggaaaaaaagatttttcttttttgtcaaaatatcgatccaatcagattggtaaaaacccccacacaaattaaagaggaataataaaaattgcaaaaataaaaaaaaacttttgcaaatttttttatttttccttctttcttttatatcatgtgaactaaaacagtcttctgttaggggatgggggcaagggggatacctgatgacattaacaatttaataacattaacattgttgcc

SEQ ID NO: 6397 - DNA, 3005 bp, Homo sapiens
  source 1..3005: mol_type = unassigned DNA; mol_type = unassigned DNA
gccgttaggtggtggggtttctcagcccggcggcgggaggcgggccggcctcggcttcctgtcggaggacgcgcaaggatccgggcgtcggagtgtgtgcgagtgcgtgagtgtgtgtcggtcgcacggcgtgtgtctccggccgcgggttccgcctcctcccctgccgccgctgctcacggtgtaagtcaatgtgaagcagcagctccagccccgggataaacatggcgacgtctctgcatgagggacccacgaaccagctggatctgctcatccgggccgtggaagcatcagttcacagcagtaatgcacactgtacagataagacaattgaagctgctgaagccctgcttcatatggaatctcctacctgcttgagggattcaagaagtcctgtggaagtgtttgttcctccttgtgtatcaactccagaattcatccatgctgctatgaggccagatgtcattacagaaactgtagtggaggtgtcaactgaagagtctgaacccatggatacctctcctattccaacatcaccagatagccatgaaccaatgaaaaagaaaaaaggaaacacaacctatttgtgggagtttcttttagatctacttcaagataaaaatacttgtcccaggtatattaaatggactcagagagaaaaaggcatattcaagctggtggattcaaaggctgtctctaagctttggggaaagcataagaacaaaccagacatgaactatgaaaccatgggacgagctttgagatactactaccaaaggggaattcttgcaaaggttgaaggacagaggcttgtatatcagttcaaggatatgccgaaaaacatagtggtcatagatgatgacaaaagtgaaacctgtaatgaagatttagcaggaactactgatgaaaaatcattagaacgagtgtcactgtctgcagaaagtctcctgaaagcagcatcctctgttcgcagtggaaaaaattcatcccctataaactgctccagagcagagaagggtgtagctagagttgtgaatatcacttcccctgggcacgatgcttcatccaggtctcctactaccactgcatctgtgtcagcaacagcagctccaaggacagttcgtgtggcaatgcaggtacctgttgtaatgacatcattgggtcagaaaatttcaactgtggcagttcagtcagttaatgcaggtgcaccattaataaccagcactagtccaacaacagcgacctctccaaaggtagtcattcagacaatccctactgtgatgccagcttctactgaaaatggagacaaaatcaccatgcagcctgccaaaattattaccatcccagctacacagcttgcacagtgtcaactgcagacaaagtcaaatctgactggatcaggaagcattaacattgttggaaccccattggctgtgagagcacttacccctgtttcaatagcccatggtacacctgtaatgagactatcaatgcctactcagcaggcatctggccagactcctcctcgagttatcagtgcagtcataaaggggccagaggttaaatcggaagcagtggcaaaaaagcaagaacatgatgtgaaaactttgcagctagtagaagaaaaaccagcagatggaaataagacagtgacccacgtagtggttgtcagtgcgccttcagctattgcccttcctgtaactatgaaaacagaaggactagtgacatgtgagaaataaaatagcagctccaccatggacttcaggctgttagtggcagtactgacataaacatttgcaagggaagtcatcaagaaaagtcaaagaagactttaaaacatttttaatgcatatacaaaaacaatcagacttactggaaataaattacctatcccatgtttcagtgggaaatgaactacatattgagatgctgacagaaaactgcctcttacagtaggaaacaactgaacccatcaataagaaaaaggatcgaaagggaccaagcagctcactacgatatcaagttacactaagacttggaacactaacattctgtaagaggttatatagttttcagtgggaggggttgggatgggtaatctcattgttacatatagcaatttttgatgcattttatatgcataccagcaattattactgtgttcgcacagttctcacttaactggtgctatgtgaagactctgctaatataggtattttagaatgtgaattgaagaatggatcccaaaaacttcagaaagaggatagcaaaaaaagatctagtgcgattttatatatatatatatatatatatacatacatatatatatatcatatagcttaagctgatttaaaacaaaggccttagactaattttcgattttctttcttgaaataagctaatggcttgtttgtgtaaagcttttttattaaaagaaaaattttaaaaatcttgtacctagcacagtattgttatagaatatacatgtaacattttatatggtagtttaagtctgtcagtttcttaattgtggacaaattaacagttggctctggccttttgctgtaacatgcctgtgtcactcacttagccttggcatttgtgcagacataccattttcagttctgctgtcacttggaagttcaggctcagcatgaatttttggcaggtagctctaatacctggagttttctttgtttttttttcttttttttagttgaagtttatgagggaaataccagtgttcagttttgaactataatagtttgtatattcaacatttgaagtatattctattttgttgtactcttgtttcaaagtgtattcaagtaggttttctgaaatatagaaatgaaatttatcttctgttttggtctctggtgatattttaaacaatatttaaaagtcagtatagaagtgttttagttaggaagtgataaaacatctctcttctccttcccaactactgcatgaagaaattctacttccattatattaatatttgg

SEQ ID NO: 6398 - DNA, 3278 bp, Homo sapiens
  source 1..3278: mol_type = unassigned DNA; mol_type = unassigned DNA
gattttagctcttcccaagttgtgaaaatagtgaaggatgcttagactacttaacatacaaactgctttctggttaatcatctttagaagactggatttctggatatctactccactccatctctattgacttttaaaacatgataatgcaaacctataacactggcaaccatcagtgaacctttaatttcattgattaatagcgtttgaagcttcctcagggaataacaatgacatcagcagtggttgacagtggaggtactattttggagctttccagcaatggagtagaaaatcaagaggaaagtgaaaaggtttctgaatatccagcagtgattgtggagccagttccaagtgccagattagagcagggctatgcagcccaggttctggtttatgatgatgagacttatatgatgcaagatgtggcagaagaacaagaagttgagaccgagaatgtggaaacagtggaagcatcagttcacagcagtaatgcacactgtacagataagacaattgaagctgctgaagccctgcttcatatggaatctcctacctgcttgagggattcaagaagtcctgtggaagtgtttgttcctccttgtgtatcaactccagaattcatccatgctgctatgaggccagatgtcattacagaaactgtagtggaggtgtcaactgaagagtctgaacccatggatacctctcctattccaacatcaccagatagccatgaaccaatgaaaaagaaaaaagttggccgtaaaccaaagacccagcaatcaccaatttccaatgggtctcctgagttaggtataaagaagaaaccaagagaaggaaaaggaaacacaacctatttgtgggagtttcttttagatctacttcaagataaaaatacttgtcccaggtatattaaatggactcagagagaaaaaggcatattcaagctggtggattcaaaggctgtctctaagctttggggaaagcataagaacaaaccagacatgaactatgaaaccatgggacgagctttgagatactactaccaaaggggaattcttgcaaaggttgaaggacagaggcttgtatatcagttcaaggatatgccgaaaaacatagtggtcatagatgatgacaaaagtgaaacctgtaatgaagatttagcaggaactactgatgaaaaatcattagaacgagtgtcactgtctgcagaaagtctcctgaaagcagcatcctctgttcgcagtggaaaaaattcatcccctataaactgctccagagcagagaagggtgtagctagagttgtgaatatcacttcccctgggcacgatgcttcatccaggtctcctactaccactgcatctgtgtcagcaacagcagctccaaggacagttcgtgtggcaatgcaggtacctgttgtaatgacatcattgggtcagaaaatttcaactgtggcagttcagtcagttaatgcaggtgcaccattaataaccagcactagtccaacaacagcgacctctccaaaggtagtcattcagacaatccctactgtgatgccagcttctactgaaaatggagacaaaatcaccatgcagcctgccaaaattattaccatcccagctacacagcttgcacagtgtcaactgcagacaaagtcaaatctgactggatcaggaagcattaacattgttggaaccccattggctgtgagagcacttacccctgtttcaatagcccatggtacacctgtaatgagactatcaatgcctactcagcaggcatctggccagactcctcctcgagttatcagtgcagtcataaaggggccagaggttaaatcggaagcagtggcaaaaaagcaagaacatgatgtgaaaactttgcagctagtagaagaaaaaccagcagatggaaataagacagtgacccacgtagtggttgtcagtgcgccttcagctattgcccttcctgtaactatgaaaacagaaggactagtgacatgtgagaaataaaatagcagctccaccatggacttcaggctgttagtggcagtactgacataaacatttgcaagggaagtcatcaagaaaagtcaaagaagactttaaaacatttttaatgcatatacaaaaacaatcagacttactggaaataaattacctatcccatgtttcagtgggaaatgaactacatattgagatgctgacagaaaactgcctcttacagtaggaaacaactgaacccatcaataagaaaaaggatcgaaagggaccaagcagctcactacgatatcaagttacactaagacttggaacactaacattctgtaagaggttatatagttttcagtgggaggggttgggatgggtaatctcattgttacatatagcaatttttgatgcattttatatgcataccagcaattattactgtgttcgcacagttctcacttaactggtgctatgtgaagactctgctaatataggtattttagaatgtgaattgaagaatggatcccaaaaacttcagaaagaggatagcaaaaaaagatctagtgcgattttatatatatatatatatatatatacatacatatatatatatcatatagcttaagctgatttaaaacaaaggccttagactaattttcgattttctttcttgaaataagctaatggcttgtttgtgtaaagcttttttattaaaagaaaaattttaaaaatcttgtacctagcacagtattgttatagaatatacatgtaacattttatatggtagtttaagtctgtcagtttcttaattgtggacaaattaacagttggctctggccttttgctgtaacatgcctgtgtcactcacttagccttggcatttgtgcagacataccattttcagttctgctgtcacttggaagttcaggctcagcatgaatttttggcaggtagctctaatacctggagttttctttgtttttttttcttttttttagttgaagtttatgagggaaataccagtgttcagttttgaactataatagtttgtatattcaacatttgaagtatattctattttgttgtactcttgtttcaaagtgtattcaagtaggttttctgaaatatagaaatgaaatttatcttctgttttggtctctggtgatattttaaacaatatttaaaagtcagtatagaagtgttttagttaggaagtgataaaacatctctcttctccttcccaactactgcatgaagaaattctacttccattatattaatatttgg

SEQ ID NO: 6399 - DNA, 2219 bp, Homo sapiens
  source 1..2219: mol_type = unassigned DNA; mol_type = unassigned DNA
ggatccgggcgtcggagtgtgtgcgagtgcgtgagtgtgtgtcggtcgcacggcgtgtgtctccggccgcgggttccgcctcctcccctgccgccgctgctcacggtgtaagtcaatgtgaagcagcagctccagccccgggataaacatggcgacgtctctgcatgagggacccacgaaccagctggatctgctcatccgggccgtggaagcatcagttcacagcagtaatgcacactgtacagataagacaattgaagctgctgaagccctgcttcatatggaatctcctacctgcttgagggattcaagaagtcctgaattcatccatgctgctatgaggccagatgtcattacagaaactgtagtggaggtgtcaactgaagagtctgaacccatggatacctctcctattccaacatcaccagatagccatgaaccaatgaaaaagaaaaaagttggccgtaaaccaaagacccagcaatcaccaatttccaatgggtctcctgagttaggtataaagaagaaaccaagagaaggaaaaggtaatttggggagggttgctttggaagtgagatgattttttttcagttaggtgacatttttgtatttgtaagaaaactatttctagtacatgcacatatgagaatactgtcgctggtaatagttcttaataagggatgtatcagcatcacgtggggagctttttcaaaatatctgtgcccagttcctacaccacagagattctgtaaccatagttgtatcatgggggatatagggacttggaaaaagtccaaaggatgtctgatacatatcctccttaagaaccattgacttacaggataatagcacccatcctcatatatagctacccataattcaaaggggtttacaactaaaccttgtttctaataatttctttcttttcttatttttgtgagacagtgtcttgctctgttgcccaggctggtgtgtggtggtgtgatcatggcacattgcagccttgacctcctggtcttaagtaatctttccgcctcagccttctgagttgctgggaccacaggcacatgccaccatgcctggctaatttctttctttctttttttttttttaattttttgtatagatgaggtctcactgtcattcaggcaggtcttaaactcctaggctcaagtgatccttctgcctcagcctctgaaagtgctgggactataggcatgagccactgcaactagcctgatacataacttcttaactgtttagaagaattcaaggtgagctaaatttaattttccaatcaataaatgtcagtcacatcagtcacaattcagaacaaaaccatgtttttgcttatttattgacttatttttacagacagggctagaatgcagtggcatgaccatacctcactgcagccttgcgctactgtgcttgtagcctcccaagtagctgggactacacgcacacaccaccgcacccagctaatttgttttttttttttttaagagatgggggtcttgtgctttgttgcccaggcggatctcgaattcctagcttcaagagatcctccggcctcacactcccagagtgctgagattataagcgtgagccactgccccttgcctatttttgctttagaatttgtgtatcctgattaaaaatgaaaacagcaccaaacctcccccattctgtgctttcctaatttgtggagtaagatgatttcaagtaacatttctttttaaaattatttttattatcttttttttttaattttaaaatcttttgtagaaacagagtgcccctgttttgcccaggcttgtcccaaacccctcgcctcaagcgatcctcccatcttggcctcccaaagtgttgggattatagacatgagccaccgtacctggcctttaattttcttgtcactcagattctgacagataaagtatcatttcagtagtggttttagatgtgttctgtctgcccatctgataaccgaaaatttatcactttcatgaataagtgttttcagaccaatattcaatagttggataaattttacattaatatatttaaatttattctgtccttatcaggtggtttgatttaataattttaaataattaaaacagaaattaagtctagtttaaaaaaaattgtctccagtaagcctaccaagaaatttggtatttcattaggtcaaaaaaaaaaaaaaaaaaaaaaaa

SEQ ID NO: 6400 - DNA, 563 bp, Homo sapiens
  source 1..563: mol_type = unassigned DNA; mol_type = unassigned DNA
ttattttccttatgtagtttaaatcatatcgaatattcagcaaattaacttcttcagtattaagctcttatcctgctttgattaattcttaacacacctcgcctcttctaaatattgaactgtccacataagaaacattgatgggggtgggaaattttaatttttcaacttttttttatagtggaagtgtttgttcctccttgtgtatcaactccagaattcatccatgctgctatgaggccagatgtcattacagaaactgtagtggaggtgtcaactgaagagtctgaacccatggatacctctcctattccaacatcaccagatagccatgaaccaatgaaaaagaaaaaagttggccgtaaaccaaagacccagcaatcaccaatttccaatgggtctcctgagttaggtataaagaagaaaccaagagaaggaaaaggaaacacaacctatttgtgggagtttcttttagatctacttcaagataaaaatacttgtcccaggtatattaaatggactcagagagaaaaaggcatattcaagctggtggattcaaaggc

SEQ ID NO: 6401 - DNA, 682 bp, Homo sapiens
  source 1..682: mol_type = unassigned DNA; mol_type = unassigned DNA
atagatatcaatggcttagagttagtcatgttattttatatttatttatttttcatttctctttcaggagtgaatatgtttatttcttagtaatatgttttagtcatgtgtttagtgtatttttaattgagtagaacttatttttcctccagtggaagcatcagttcacagcagtaatgcacactgtacagataagacaattgaagctgctgaagccctgcttcatatggaatctcctacctgcttgagggattcaagaagtcctgaattcatccatgctgctatgaggccagatgtcattacagaaactgtagtggaggtgtcaactgaagagtctgaacccatggatacctctcctattccaacatcaccagatagccatgaaccaatgaaaaagaaaaaagttggccgtaaaccaaagacccagcaatcaccaatttccaatgggtctcctgagttaggtataaagaagaaaccaagagaaggaaaaggaaacacaacctatttgtgggagtttcttttagatctacttcaagataaaaatacttgtcccaggtatattaaatggactcagagagaaaaaggcatattcaagctggtggattcaaaggctgtctctaagctttggggaaagcataagaacaaaccagacatgaactatgaaaccatgggacgagctttg

SEQ ID NO: 6402 - DNA, 611 bp, Homo sapiens
  source 1..611: mol_type = unassigned DNA; mol_type = unassigned DNA
aatgtgaagcagcagctccagccccgggataaacatggcgacgtctctgcatgagggacccacgaaccagctggatctgctcatccgggccgtggaagcatcagttcacagcagtaatgcacactgtacagataagacaattgaagctgctgaagccctgcttcatatggaatctcctacctgcttgagggattcaagaagtcctgaattcatccatgctgctatgaggccagatgtcattacagaaactgtagtggaggtgtcaactgaagagtctgaacccatggatacctctcctattccaacatcaccagatagccatgaaccaatgaaaaagaaaaaaggaaacacaacctatttgtgggagtttcttttagatctacttcaagataaaaatacttgtcccaggtatattaaatggactcagagagaaaaaggcatattcaagctggtggattcaaaggctgtctctaagctttggggaaagcataagaacaaaccagacatgaactatgaaaccatgggacgagctttgagatactactaccaaaggggaattcttgcaaaggttgaaggacagaggcttgtatatcagttcaaggatatgccga

SEQ ID NO: 6403 - DNA, 510 bp, Homo sapiens
  source 1..510: mol_type = unassigned DNA; mol_type = unassigned DNA
atagtggtcatagatgatgacaaaagtgaaacctgtaatgaagatttagcaggaactactgatgaaaaatcattagaacgagtgtcactgtctgcagaaagtctcctgaaagcagcatcctctgttcgcagtggaaaaaattcatcccctataaactgctccagagcagagaagggtgtagctagagttgtgaatatcacttcccctgggcacgatgcttcatccaggtctcctactaccactgcatctgtgtcagcaacagcagctccaaggtggcagtcacagaccagacaagaaagctgaagcgtcatccagacaagactgaaccataccttcagccaggacagactcatatggaaaagctctctaaagagaagggaatcccctccatgataaatgcttagtttaacatgttcgactggtgctcaattgtctattggctgacaaatcatttccacaagctgggcttttctagcacaatcctctgaaataaaaatgtgaaaaagcaaa

SEQ ID NO: 6404 - DNA, 1434 bp, Homo sapiens
  source 1..1434: mol_type = unassigned DNA; mol_type = unassigned DNA
attgctcccagcgccaagctctgtgtcgccgccgtcgcctaggcggttgggggtcggtggggcggcgcgggcgggggtcgctgcgcggggcggcgagcctctgttttgtctccttctctccctgtggagcggctcgggctgctggggaggccccggctccctccggacgctcggccaacggcggcggctagtccgcggccctgctgagagggaaaaggacgccgcggtcttcccaggcgtcgcggagagcagttccaaagaactactggttcagattttagctcttcccaagttgtgaaaatagtgaaggatgcttagactacttaacatacaaactgctttctggttaatcatctttagaagactggatttctggatatctactccactccatctctattgacttttaaaacatgataatgcaaacctataacactggcaaccatcagtgaacctttaatttcattgattaatagcgtttgaagcttcctcagggaataacaatgacatcagcagtggttgacagtggaggtactattttggagctttccagcaatggagtagaaaatcaagaggttaggcattcaatgaattacatttctattttcttcatagaaatttgtgcatgaactaattttgaaattaataggaaacatatttgagagtaaaaatgtacaaagcatgaaattatacatgtacatgtcgtgtatccttatataatttaggtaatagaaggtcaaggaaggtattgcagggcttacgtgaattgttggaacatacatatattagaatgaacttggagggaggaaaggaatggaaagaacactatagtattagttgagagttaaatttaaatccctcataaaacccattgtcttggattatactgtaggtatatactatgcccaaatacctaaattagattcattctaagttagaattttgtatgtgctttacttattatctttgtttcttgattattttatatctaaatcggtgtggagatccattgtattttaatctcatttaaacacgaatttagataattagtaagtcagaaaatgaattcagattttgaaattttatgcgtgtaggattttgaatcattagcatatttggttattttgttattgataacattgaagaattagatgagaataaaaaaataacagtagtagaaataccggggcttctaggtcctggcttctgttcttagcattcagtaaagagtgaatattggggccagtcgcggtggctcacgcctgtaatcccagcactttgggaggcccaggtgggcggatcaccaggtcaggcatttgagaccatcctggctaacatggcgaaaccctgcctctactaaaaatacaaaaaaattagccaggcgtggtggcgggcgcctgtagtcccagctactcgggaggctgaggcaggaga

SEQ ID NO: 6405 - DNA, 1766 bp, Homo sapiens
  source 1..1766: mol_type = unassigned DNA; mol_type = unassigned DNA
tctgtgtcgccgccgtcgcctaggcggttgggggtcggtggggcggcgcgggcgggggtcgctgcgcggggcggcgagcctctgttttgtctccttctctccctgtggagcggctcgggctgctggggaggccccggctccctccggacgctcggccaacggcggcggctagtccgcggccctgctgagagggaaaaggacgccgcggtcttcccaggcgtcgcggagagcagttccaaagaactactggttcagattttagctcttcccaagttgtgaaaatagtgaaggatgcttagactacttaacatacaaactgctttctggttaatcatctttagaagactggatttctggatatctactccactccatctctattgacttttaaaacatgataatgcaaacctataacactggcaaccatcagtgaacctttaatttcattgattaatagcgtttgaagcttcctcagggaataacaatgacatcagcagtggttgacagtggaggtactattttggagctttccagcaatggagtagaaaatcaagaggaaagtgaaaaggtttctgaatatccagcagtgattgtggagccagttccaagtgccagattagagcagggctatgcagcccaggttctggtttatgatgatgagacttatatgatgcaagatgtggcagaagaacaagaagttgagaccgagaatgtggaaacaggtggaatctcactctgtcacccaggctggagtgcggtggtgtgatctcggctcactgcaacctccgcctcccgggttcaagtgattctcctgcctcagcctcccaagtggctgggactacagaaatcctccctgtggcacaaaaggactcctttaattagaaaatattgttgccacagggaggtagaagatcgacatgaaaaactggggatctgaaaacgagcccctatcctaggattacctgaaggtgaaacagattgagccagaaggaagacaatgctgagaccgggtttcactgtgttagccaggatggtctcgatgtcttgacctcgtgatccacccacctcggcctcccaaagtgctgggatgacaggcgtgagccactgcgcccggccctgatacttcttatatatggtgtttgacaagtctttcaggaaaatctgaatttttttccccatatgaccttttttctgatgtgtaatagttggaaaataaaggcaggatttagaataattactgagaatgaaaaacttcttttgaagaggaaaccaagaacttggttcaagaggagaaagaaattaaaaggtggtaatttctttttgagacatttactttcttgaataaacttgacatcccccccttttttttttttatctttttctttagggacattggtctatagttagtatctaggtttacaacattaagcttttttcattttgtttggaaaaacaaggctggcagaattacatttgtttttaattccattgctaatattacatacttaggaggctatcaggtgcaagttatttacttgagacaagaagcactgattattttggctaggcttcatctgaaggcctatgttctgggaagggaggcctccataaaaaaggaagaacctttagtgacctttatccttgggaataaaagtaaagatcagaagccagtgcattcagtttaccgtcttacaaaaggagtcaagtattgtataggtcagagaccactattgtaagatcatataaatcctgtgtctaattttgtt

SEQ ID NO: 6406 - DNA, 882 bp, Homo sapiens
  source 1..882: mol_type = unassigned DNA; mol_type = unassigned DNA
gatccgggcgtcggagtgtgtgcgagtgcgtgagtgtgtgtcggtcgcacggcgtgtgtctccggccgcgggttccgcctcctcccctgccgccgctgctcacggtgtaagtcaatgtgaagcagcagctccagccccgggataaacatggcgacgtctctgcatgagggacccacgaaccagctggatctgctcatccgggccgtggaagcatcagttcacagcagtaatgcacactgtacagataagacaattgaagctgctgaagccctgcttcatatggaatctcctacctgcttgagggattcaagaagtcctgtggaagtgtttgttcctccttgtgtatcaactccagaattcatccatgctgctatgaggccagatgtcattacagaaactgtagtggaggtgtcaactgaagagtctgaacccatggatacctctcctattccaacatcaccagatagccatgaaccaatgaaaaagaaaaaaggaaacacaacctatttgtgggagtttcttttagatctacttcaagataaaaatacttgtcccaggtatattaaatggactcagagagaaaaaggcatattcaagctggtggattcaaaggctgtctctaagctttggggaaagcataagaacaaaccagacatgaactatgaaaccatgggacgagctttgagatactactaccaaaggggaattcttgcaaaggttgaaggacagaggcttgtatatcagttcaaggatatgccgaaaaacatagtggtcatagatgatgacaaaagtgaaacctgtaatgaagatttagcaggaactactgatgaaaaatcattagaacgagtgtcactgtctgcagaaagtctcctgaaagcagca

SEQ ID NO: 6407 - DNA, 1965 bp, Homo sapiens
  source 1..1965: mol_type = unassigned DNA; mol_type = unassigned DNA
ggagtgtgtgcgagtgcgtgagtgtgtgtcggtcgcacggcgtgtgtctccggccgcgggttccgcctcctcccctgccgccgctgctcacggtgtaagtcaatgtgaagcagcagctccagccccgggataaacatggcgacgtctctgcatgagggacccacgaaccagctggatctgctcatccgggccgtggaagcatcagttcacagcagtaatgcacactgtacagataagacaattgaagctgctgaagccctgcttcatatggaatctcctacctgcttgagggattcaagaagtcctgaattcatccatgctgctatgaggccagatgtcattacagaaactgtagtggaggtgtcaactgaagagtctgaacccatggatacctctcctattccaacatcaccagatagccatgaaccaatgaaaaagaaaaaagttggccgtaaaccaaagacccagcaatcaccaatttccaatgggtctcctgagttaggtataaagaagaaaccaagagaaggaaaaggaaacacaacctatttgtgggagtttcttttagatctacttcaagataaaaatacttgtcccaggtatattaaatggactcagagagaaaaaggcatattcaagctggtggattcaaaggctgtctctaagctttggggaaagcataagaacaaaccagacatgaactatgaaaccatgggacgagctttgagatactactaccaaaggggaattcttgcaaaggttgaaggacagaggcttgtatatcagttcaaggatatgccgaaaaacatagtggtcatagatgatgacaaaagtgaaacctgtaatgaagatttagcaggaactactgatgaaaaatcattagaacgagtgtcactgtctgcagaaagtctcctgaaagcagcatcctctgttcgcagtggaaaaaattcatcccctataaactgctccagagcagagaagggtgtagctagagttgtgaatatcacttcccctgggcacgatgcttcatccaggtctcctactaccactgcatctgtgtcagcaacagcagctccaaggacagttcgtgtggcaatgcaggtacctgttgtaatgacatcattgggtcagaaaatttcaactgtggcagttcagtcagttaatgcaggtgcaccattaataaccagcactagtccaacaacagcgacctctccaaaggtagtcattcagacaatccctactgtgatgccagcttctactgaaaatggagacaaaatcaccatgcagcctgccaaaattattaccatcccagctacacagcttgcacagtgtcaactgcagacaaagtcaaatctgactggatcaggaagcattaacattgttggaaccccattggctgtgagagcacttacccctgtttcaatagcccatggtacacctgtaatgagactatcaatgcctactcagcaggcatctggccagactcctcctcgagttatcagtgcagtcataaaggggccagaggttaaatcggaagcagtggcaaaaaagcaagaacatgatgtgaaaactttgcagctagtagaagaaaaaccagcagatggaaataagacagtgacccacgtagtggttgtcagtgcgccttcagctattgcccttcctgtaactatgaaaacagaaggactagtgacatgtgagaaataaaatagcagctccaccatggacttcaggctgttagtggcagtactgacataaacatttgcaagggaagtcatcaagaaaagtcaaagaagactttaaaacatttttaatgcatatacaaaaacaatcagacttactggaaataaattacctatcccatgtttcagtgggaaatgaactacatattgagatgctgacagaaaactgcctcttacagtaggaaacaactgaacccatcaataagaaaaaggatcgaaagggaccaag

SEQ ID NO: 6408 - DNA, 3036 bp, Homo sapiens
  source 1..3036: mol_type = unassigned DNA; mol_type = unassigned DNA
cgcgttgccagctgcggcggccgccacagccacagccgccgccgccgccgccgccgcccctgcccctgccgcccctgcccctgccgttaggtggtggggtttctcagcccggcggcgggaggcgggccggcctcggcttcctgtcggaggacgcgcaaggatccgggcgtcggagtgtgtgcgagtgcgtgagtgtgtgtcggtcgcacggcgtgtgtctccggccgcgggttccgcctcctcccctgccgccgctgctcacggtgtaagtcaatgtgaagcagcagctccagccccgggataaacatggcgacgtctctgcatgagggacccacgaaccagctggatctgctcatccgggccgtggaagcatcagttcacagcagtaatgcacactgtacagataagacaattgaagctgctgaagccctgcttcatatggaatctcctacctgcttgagggattcaagaagtcctgtggaagtgtttgttcctccttgtgtatcaactccagaattcatccatgctgctatgaggccagatgtcattacagaaactgtagtggaggtgtcaactgaagagtctgaacccatggatacctctcctattccaacatcaccagatagccatgaaccaatgaaaaagaaaaaagttggccgtaaaccaaagacccagcaatcaccaatttccaatgggtctcctgagttaggtataaagaagaaaccaagagaaggaaaaggaaacacaacctatttgtgggagtttcttttagatctacttcaagataaaaatacttgtcccaggtatattaaatggactcagagagaaaaaggcatattcaagctggtggattcaaaggctgtctctaagctttggggaaagcataagaacaaaccagacatgaactatgaaaccatgggacgagctttgagatactactaccaaaggggaattcttgcaaaggttgaaggacagaggcttgtatatcagttcaaggatatgccgaaaaacatagtggtcatagatgatgacaaaagtgaaacctgtaatgaagatttagcaggaactactgatgaaaaatcattagaacgagtgtcactgtctgcagaaagtctcctgaaagcagcatcctctgttcgcagtggaaaaaattcatcccctataaactgctccagagcagagaagggtgtagctagagttgtgaatatcacttcccctgggcacgatgcttcatccaggtctcctactaccactgcatctgtgtcagcaacagcagctccaaggacagttcgtgtggcaatgcaggtacctgttgtaatgacatcattgggtcagaaaatttcaactgtggcagttcagtcagttaatgcaggtgcaccattaataaccagcactagtccaacaacagcgacctctccaaaggtagtcattcagacaatccctactgtgatgccagcttctactgaaaatggagacaaaatcaccatgcagcctgccaaaattattaccatcccagctacacagcttgcacagtgtcaactgcagacaaagtcaaatctgactggatcaggaagcattaacattgttggaaccccattggctgtgagagcacttacccctgtttcaatagcccatggtacacctgtaatgagactatcaatgcctactcagcaggcatctggccagactcctcctcgagttatcagtgcagtcataaaggggccagaggttaaatcggaagcagtggcaaaaaagcaagaacatgatgtgaaaactttgcagctagtagaagaaaaaccagcagatggaaataagacagtgacccacgtagtggttgtcagtgcgccttcagctattgcccttcctgtaactatgaaaacagaaggactagtgacatgtgagaaataaaatagcagctccaccatggacttcaggctgttagtggcagtactgacataaacatttgcaagggaagtcatcaagaaaagtcaaagaagactttaaaacatttttaatgcatatacaaaaacaatcagacttactggaaataaattacctatcccatgtttcagtgggaaatgaactacatattgagatgctgacagaaaactgcctcttacagtaggaaacaactgaacccatcaataagaaaaaggatcgaaagggaccaagcagctcactacgatatcaagttacactaagacttggaacactaacattctgtaagaggttatatagttttcagtgggaggggttgggatgggtaatctcattgttacatatagcaatttttgatgcattttatatgcataccagcaattattactgtgttcgcacagttctcacttaactggtgctatgtgaagactctgctaatataggtattttagaatgtgaattgaagaatggatcccaaaaacttcagaaagaggatagcaaaaaaagatctagtgcgattttatatatatatatatatatatatacatacatatatatatatcatatagcttaagctgatttaaaacaaaggccttagactaattttcgattttctttcttgaaataagctaatggcttgtttgtgtaaagcttttttattaaaagaaaaattttaaaaatcttgtacctagcacagtattgttatagaatatacatgtaacattttatatggtagtttaagtctgtcagtttcttaattgtggacaaattaacagttggctctggccttttgctgtaacatgcctgtgtcactcacttagccttggcatttgtgcagacataccattttcagttctgctgtcacttggaagttcaggctcagcatgaatttttggcaggtagctctaatacctggagttttctttgtttttttttcttttttttagttgaagtttatgagggaaataccagtgttcagttttgaactataatagtttgtatattcaacatttgaagtatattctattttgttgtactcttgtttcaaagtgtattcaagtaggttttctgaaatatagaaatgaaatttatcttctg

SEQ ID NO: 6409 - DNA, 4012 bp, Homo sapiens
  source 1..4012: mol_type = unassigned DNA; mol_type = unassigned DNA
attgctcccagcgccaagctctgtgtcgccgccgtcgcctaggcggttgggggtcggtggggcggcgcgggcgggggtcgctgcgcggggcggcgagcctctgttttgtctccttctctccctgtggagcggctcgggctgctggggaggccccggctccctccggacgctcggccaacggcggcggctagtccgcggccctgctgagagggaaaaggacgccgcggtcttcccaggcgtcgcggagagcagttccaaagaactactggttcagattttagctcttcccaagttgtgaaaatagtgaaggatgcttagactacttaacatacaaactgctttctggttaatcatctttagaagactggatttctggatatctactccactccatctctattgacttttaaaacatgataatgcaaacctataacactggcaaccatcagtgaacctttaatttcattgattaatagcgtttgaagcttcctcagggaataacaatgacatcagcagtggttgacagtggaggtactattttggagctttccagcaatggagtagaaaatcaagaggaaagtgaaaaggtttctgaatatccagcagtgattgtggagccagttccaagtgccagattagagcagggctatgcagcccaggttctggtttatgatgatgagacttatatgatgcaagatgtggcagaagaacaagaagttgagaccgagaatgtggaaacagtggaagcatcagttcacagcagtaatgcacactgtacagataagacaattgaagctgctgaagccctgcttcatatggaatctcctacctgcttgagggattcaagaagtcctgaattcatccatgctgctatgaggccagatgtcattacagaaactgtagtggaggtgtcaactgaagagtctgaacccatggatacctctcctattccaacatcaccagatagccatgaaccaatgaaaaagaaaaaagttggccgtaaaccaaagacccagcaatcaccaatttccaatgggtctcctgagttaggtataaagaagaaaccaagagaaggaaaaggaaacacaacctatttgtgggagtttcttttagatctacttcaagataaaaatacttgtcccaggtatattaaatggactcagagagaaaaaggcatattcaagctggtggattcaaaggctgtctctaagctttggggaaagcataagaacaaaccagacatgaactatgaaaccatgggacgagctttgagatactactaccaaaggggaattcttgcaaaggttgaaggacagaggcttgtatatcagttcaaggatatgccgaaaaacatagtggtcatagatgatgacaaaagtgaaacctgtaatgaagatttagcaggaactactgatgaaaaatcattagaacgagtgtcactgtctgcagaaagtctcctgaaagcagcatcctctgttcgcagtggaaaaaattcatcccctataaactgctccagagcagagaagggtgtagctagagttgtgaatatcacttcccctgggcacgatgcttcatccaggtctcctactaccactgcatctgtgtcagcaacagcagctccaaggacagttcgtgtggcaatgcaggtacctgttgtaatgacatcattgggtcagaaaatttcaactgtggcagttcagtcagttaatgcaggtgcaccattaataaccagcactagtccaacaacagcgacctctccaaaggtagtcattcagacaatccctactgtgatgccagcttctactgaaaatggagacaaaatcaccatgcagcctgccaaaattattaccatcccagctacacagcttgcacagtgtcaactgcagacaaagtcaaatctgactggatcaggaagcattaacattgttggaaccccattggctgtgagagcacttacccctgtttcaatagcccatggtacacctgtaatgagactatcaatgcctactcagcaggcatctggccagactcctcctcgagttatcagtgcagtcataaaggggccagaggttaaatcggaagcagtggcaaaaaagcaagaacatgatgtgaaaactttgcagctagtagaagaaaaaccagcagatggaaataagacagtgacccacgtagtggttgtcagtgcgccttcagctattgcccttcctgtaactatgaaaacagaaggactagtgacatgtgagaaataaaatagcagctccaccatggacttcaggctgttagtggcagtactgacataaacatttgcaagggaagtcatcaagaaaagtcaaagaagactttaaaacatttttaatgcatatacaaaaacaatcagacttactggaaataaattacctatcccatgtttcagtgggaaatgaactacatattgagatgctgacagaaaactgcctcttacagtaggaaacaactgaacccatcaataagaaaaaggatcgaaagggaccaagcagctcactacgatatcaagttacactaagacttggaacactaacattctgtaagaggttatatagttttcagtgggaggggttgggatgggtaatctcattgttacatatagcaatttttgatgcattttatatgcataccagcaattattactgtgttcgcacagttctcacttaactggtgctatgtgaagactctgctaatataggtattttagaatgtgaattgaagaatggatcccaaaaacttcagaaagaggatagcaaaaaaagatctagtgcgattttatatatatatatatatatatatacatacatatatatatatcatatagcttaagctgatttaaaacaaaggccttagactaattttcgattttctttcttgaaataagctaatggcttgtttgtgtaaagcttttttattaaaagaaaaattttaaaaatcttgtacctagcacagtattgttatagaatatacatgtaacattttatatggtagtttaagtctgtcagtttcttaattgtggacaaattaacagttggctctggccttttgctgtaacatgcctgtgtcactcacttagccttggcatttgtgcagacataccattttcagttctgctgtcacttggaagttcaggctcagcatgaatttttggcaggtagctctaatacctggagttttctttgtttttttttcttttttttagttgaagtttatgagggaaataccagtgttcagttttgaactataatagtttgtatattcaacatttgaagtatattctattttgttgtactcttgtttcaaagtgtattcaagtaggttttctgaaatatagaaatgaaatttatcttctgttttggtctctggtgatattttaaacaatatttaaaagtcagtatagaagtgttttagttaggaagtgataaaacatctctcttctccttcccaactactgcatgaagaaattctacttccattatattaatatttggcaaatatctgcatgttgccagtttctttctaattatgatgaactataatgttctgcttaacgtaatgaatttagtattttagttggctgcacttaaagaatttatatttgtaaaacactttaaaccatttgtttcacaatcagaccttttgtggattaaaaagaacaattactcttctagcccttttacagattaggaagttaaggtatctgaaggattacataaactatgtaattttactactgtctgtcactccatatcttaatgctctttctactacaaagaaaagttatctatttttacatgttttagaaatgtagatgaactcatacataatattttttgtcttttaattgatcacatactacttaggtcagaaattgtttataacagttccctttgtaatcttttaaacttttccataaatatattgatgatacttttatacaaaagctcaaagaaaaactcacttgattattttcccatttgggagttac

SEQ ID NO: 6410 - DNA, 3845 bp, Homo sapiens
  source 1..3845: mol_type = unassigned DNA; mol_type = unassigned DNA
tacgttggtctcccaaagtgctgggattacaggtgcagctgccttggcgaccatttgtcctacagtttgtccggacccaggctgtccttctgtgtgctggaatgaggcgaacatgtctttgagcccagcagggaggaatcctccagcctattcctcgctggtgcatcaggtcgttggcgggccctgacacacaacaggaacgtcggagcaggaggagtcagtggagccatcaggacacccaggcccatggggcaggaggcctcggtcaccacaggactggggcggaagacgagaggcggccggccgtgagggaggcgccctccctccccgcgcttacgtcgcgcggccatgcggtttgggacaggacacccctgagagtgcaggcacctccccctcccgcccctccatccctctgggggctggcgcctggccccccacctggtccccctgggcaggctgaattggggctccctgcagggcggtcccgatggccgggcgtgggtggggcgcgctgtgggtgtgcgtggcggccgccaccctgctgcacgctggcggcctggcccgcgcagactgctggctgatcgagggcgacaagggcttcgtgtggctggccatctgcagccagaaccaacccccctacgaggccatcccacagcagatcaacagcaccatcgtggacctgcggctcaacgagaaccgtatccgcagcgtgcagtacgcctcgctcagccgctttggcaacctcacgtacctcaacctcaccaagaacgagatcggctacatcgaggacggcgccttctcgggccagttcaacctgcaggtgctgcagctgggctacaaccggctgcgcaacctcacggagggcatgctgcgcggcctgggcaagctggagtacctgtacctgcaggccaacctcatcgaggtggtcatggccagcagcttctgggagtgtcccaacatcgtcaacatcgacctgtccatgaaccgcatccagcagctcaacagcggcaccttcgccggcctggccaagctgtcggtgtgcgagctctacagcaaccccttctactgctcctgcgagctgctgggcttcctgcgctggctggccgccttcaccaacgccacacagacgtacgaccgcatgcagtgcgagtcgccgcccgtctactccggctactacctcctgggccagggccgccgcggccaccgcagcatcctcagcaaactgcagtcagtctgcaccgaggactcgtacgcggctgaggtggtcgggcccccacgtccagcatccgggcgctcacagccgggccgctccccgccgcccccgcctccgccggagcccagtgacatgccctgtgccgatgatgagtgcttctccggggacggcaccacgccactggtggccctgcccacgctggccacgcaggccgaggcccgccccctcatcaaggtcaagcagctcactcagaactcggccaccatcaccgtccagctgcccagcccgttccaccggatgtacaccctggagcatttcaacaacagcaaggcctccaccgtgtccaggctgaccaaggcccaggaggagatccgtctgaccaacctgttcacgctcaccaactacacctactgcgtggtgtccaccagcgccgggctgcgccacaaccacacctgcctcaccatctgcttgccccggctgcccagcccgcctggtccggtgcccagcccctccacggccacccactacatcatgaccatcctgggctgcctcttcggcatggtgctggtgctgggcgccgtctactactgcctgcgcaggcggcggcgccaggaggagaagcacaagaaggccgcctcggcagccgcagctggcagcctcaagaagaccatcatcgagctcaagtacgggccagagctggaggcgcccggcctggccccgctgtcccagggcccgctgctgggccccgaggccgtgacgcgcatcccttacctgcctgcggccggcgaggtggagcagtacaagctggtggagagcgcggacacccccaaggccagcaagggcagctacatggaggttcgaaccggggaccctccggaacgcagggactgtgagctgggccggccgggccccgacagccagagttcggtggccgagatctccaccatcgccaaggaggtggacaaggtcaaccagatcatcaacaactgcatcgacgcgctcaagtccgagtccacctccttccagggcgtcaagtcggggcccgtgtccgtcgcggagccgccgctggtgctgctgtccgagccgctggccgccaagcacggcttcctggcgcccgggtacaaggacgccttcggccacagcctgcagcggcaccacagcgtggaggccgccgggccccctcgtgccagcacctcgtccagcggctccgtgcgcagcccccgcgccttccgagccgaggccgtcggggtgcacaaggccgcggccgccgaggccaagtacatcgagaagggctcccccgcggccgacgccatcctcactgtgacacccgcggccgccgtgctgcgggccgaggccgagaagggtcgccagtacggcgagcaccggcactcgtaccccggctcccacccggccgagccacctgcgccccccgggccaccgccgccgcctccgcacgagggcctggggcgcaaggcgtccatcctggagccactcacccggccgcggccccgcgacctcgcctactcgcagctgtccccgcagtaccacagcctgagctactcctccagccccgagtacacctgccgggcctcccagagcatctgggagcgcttcagactgagccgccggcggcacaaggaggaagaggagttcatggccgcgggccatgccctgcgcaagaaggttcagttcgccaaagacgaggatctgcacgacatcctggactactggaagggcgtgtcggcccagcacaagtcctgagccccccaagaccggcgatgcccactggaccaaaaaggatgcaggatccacccagagactcagcaccaaacccaacacacgcacgccaccacagcaactgtgacagcggggggccctgcagaggcgaggggggagcgagtggggacagacaagggggacacgtcccgagctcctgtggccggtcctgggatgcgcttgtcgccccgggtggcacgtgtccacacacacacacacacacacacacacacacacgagggacttcggaaaactgtgtcttagggatggggggtgggggtggggatttttttttcattatctttcctcttttgagtcttctctgccttttcttttcctctctatctctttactttcttccttttttaaaaaaatataataaaagacaagttattttaaaaagacataaaatgccatccgtggggggtgtggccggcgtggccacctcggggcccctcacgtgatctcctcggtccgtggttttctgtggattctctgtccagtccgtctcttcattgccgcctccggagtccactgcagaggggcagagtgaatgccggcggccaagtggcctccgggacaggtcctggagccctgctggactcagggtgggtggaggctgtgcctgtggacggccggggtggccaggacggccaagggctgggaggcacgtcccccagcccagcccccatgtacactgtagtcgttctattgtacagaaaaaaatatttctatatttgcaatgtttgctgtaaaatgagaaagaaaaaaagactatgtctactaaaaaaaaaaaaaaaaagactatgtctacttaaaaaaaaatctgcaaaggaaaacaaatcaaatgcttgtt

SEQ ID NO: 6411 - DNA, 3742 bp, Homo sapiens
  source 1..3742: mol_type = unassigned DNA; mol_type = unassigned DNA
gaggcgaacatgtctttgagcccagcagggaggaatcctccagcctattcctcgctggtgcatcaggtcgttggcgggccctgacacacaacaggaacgtcggagcaggaggagtcagtggagccatcaggacacccaggcccatggggcaggaggcctcggtcaccacaggactggggcggaagacgagaggcggccggccgtgagggaggcgccctccctccccgcgcttacgtcgcgcggccatgcggtttgggacaggacacccctgagagtgcaggcacctccccctcccgcccctccatccctctgggggctggcgcctggccccccacctggtccccctgggcaggctgaattggggctccctgcagggcggtcccgatggccgggcgtgggtggggcgcgctgtgggtgtgcgtggcggccgccaccctgctgcacgctggcggcctggcccgcgcagactgctggctgatcgagggcgacaagggcttcgtgtggctggccatctgcagccagaaccaacccccctacgaggccatcccacagcagatcaacagcaccatcgtggacctgcggctcaacgagaaccgtatccgcagcgtgcagtacgcctcgctcagccgctttggcaacctcacgtacctcaacctcaccaagaacgagatcggctacatcgaggacggcgccttctcgggccagttcaacctgcaggtgctgcagctgggctacaaccggctgcgcaacctcacggagggcatgctgcgcggcctgggcaagctggagtacctgtacctgcaggccaacctcatcgaggtggtcatggccagcagcttctgggagtgtcccaacatcgtcaacatcgacctgtccatgaaccgcatccagcagctcaacagcggcaccttcgccggcctggccaagctgtcggtgtgcgagctctacagcaaccccttctactgctcctgcgagctgctgggcttcctgcgctggctggccgccttcaccaacgccacacagacgtacgaccgcatgcagtgcgagtcgccgcccgtctactccggctactacctcctgggccagggccgccgcggccaccgcagcatcctcagcaaactgcagtcagtctgcaccgaggactcgtacgcggctgaggtggtcgggcccccacgtccagcatccgggcgctcacagccgggccgctccccgccgcccccgcctccgccggagcccagtgacatgccctgtgccgatgatgagtgcttctccggggacggcaccacgccactggtggccctgcccacgctggccacgcaggccgaggcccgccccctcatcaaggtcaagcagctcactcagaactcggccaccatcaccgtccagctgcccagcccgttccaccggatgtacaccctggagcatttcaacaacagcaaggcctccaccgtgtccaggctgaccaaggcccaggaggagatccgtctgaccaacctgttcacgctcaccaactacacctactgcgtggtgtccaccagcgccgggctgcgccacaaccacacctgcctcaccatctgcttgccccggctgcccagcccgcctggtccggtgcccagcccctccacggccacccactacatcatgaccatcctgggctgcctcttcggcatggtgctggtgctgggcgccgtctactactgcctgcgcaggcggcggcgccaggaggagaagcacaagaaggccgcctcggcagccgcagctggcagcctcaagaagaccatcatcgagctcaagtacgggccagagctggaggcgcccggcctggccccgctgtcccagggcccgctgctgggccccgaggccgtgacgcgcatcccttacctgcctgcggccggcgaggtggagcagtacaagctggtggagagcgcggacacccccaaggccagcaagggcagctacatggaggttcgaaccggggaccctccggaacgcagggactgtgagctgggccggccgggccccgacagccagagttcggtggccgagatctccaccatcgccaaggaggtggacaaggtcaaccagatcatcaacaactgcatcgacgcgctcaagtccgagtccacctccttccagggcgtcaagtcggggcccgtgtccgtcgcggagccgccgctggtgctgctgtccgagccgctggccgccaagcacggcttcctggcgcccgggtacaaggacgccttcggccacagcctgcagcggcaccacagcgtggaggccgccgggccccctcgtgccagcacctcgtccagcggctccgtgcgcagcccccgcgccttccgagccgaggccgtcggggtgcacaaggccgcggccgccgaggccaagtacatcgagaagggctcccccgcggccgacgccatcctcactgtgacacccgcggccgccgtgctgcgggccgaggccgagaagggtcgccagtacggcgagcaccggcactcgtaccccggctcccacccggccgagccacctgcgccccccgggccaccgccgccgcctccgcacgagggcctggggcgcaaggcgtccatcctggagccactcacccggccgcggccccgcgacctcgcctactcgcagctgtccccgcagtaccacagcctgagctactcctccagccccgagtacacctgccgggcctcccagagcatctgggagcgcttcagactgagccgccggcggcacaaggaggaagaggagttcatggccgcgggccatgccctgcgcaagaaggttcagttcgccaaagacgaggatctgcacgacatcctggactactggaagggcgtgtcggcccagcacaagtcctgagccccccaagaccggcgatgcccactggaccaaaaaggatgcaggatccacccagagactcagcaccaaacccaacacacgcacgccaccacagcaactgtgacagcggggggccctgcagaggcgaggggggagcgagtggggacagacaagggggacacgtcccgagctcctgtggccggtcctgggatgcgcttgtcgccccgggtggcacgtgtccacacacacacacacacacacacacacacacacgagggacttcggaaaactgtgtcttagggatggggggtgggggtggggatttttttttcattatctttcctcttttgagtcttctctgccttttcttttcctctctatctctttactttcttccttttttaaaaaaatataataaaagacaagttattttaaaaagacataaaatgccatccgtggggggtgtggccggcgtggccacctcggggcccctcacgtgatctcctcggtccgtggttttctgtggattctctgtccagtccgtctcttcattgccgcctccggagtccactgcagaggggcagagtgaatgccggcggccaagtggcctccgggacaggtcctggagccctgctggactcagggtgggtggaggctgtgcctgtggacggccggggtggccaggacggccaagggctgggaggcacgtcccccagcccagcccccatgtacactgtagtcgttctattgtacagaaaaaaatatttctatatttgcaatgtttgctgtaaaatgagaaagaaaaaaagactatgtctactaaaaaaaaaaaaaaaaagactatgtctacttaaaaaaaaatctgcaaaggaaaacaaatcaaatgcttgtt

SEQ ID NO: 6412 - DNA, 2524 bp, Homo sapiens
  source 1..2524: mol_type = unassigned DNA; mol_type = unassigned DNA
tgatgaatatgaactatctccagcccatcaccagctttttctttttcttcttgtccttatttgttttttagttctttataagaaaaagtgggggatatattgagaagtaccaagacggggagctatgggtttattgacaaaagagcataggacactaaaatagaaacgaagttattatttttctcttgtgatactctaagagaaaagctcttcctggaaaagccgatgatctctgaagatgctaaataaatgagcaggagtttccctgaaatggaggcgccctttgattggctgatctttccccgactcctgccaatcggagcatccctgggctccagctccataaacataagcaaagctacatgcttattcttctggacttggagtgtataccatttaaaggtgtgcggcgggtctctgttcacatggctcaactggaaacctgtttcatgaacaagcttactcaggaaccatctggtggtattccagcacattgttcttcagggggacgactctaagtcgctttgtggtggcagcagcttagaatcagtatttgtggttgggaaagatggacttacgggagcttggtaatgcaggtggtgaaggagcaggttatgagagcacttacaaccaagcctagctccctggaccagttcaagagcaaactgcagaacctgagctacactgagatcctgaaaatccgccagtccgagaggatgaaccaggaagatttccagtcccgcccgattttggaactaaaggagaagattcagccagaaatcttagagctgatcaaacagcaacgcctgaaccgccttgtggaagggacctgctttaggaaactcaatgcccggcggaggcaagacaagttttggtattgtcggctttcgccaaatcacaaagtcctgcattacggagacttagaagagagtcctcagggagaagtgccccacgattccttgcaggacaaactgccggtggcagatatcaaagccgtggtgacgggaaaggactgccctcatatgaaagagaaaggtgcccttaaacaaaacaaggaggtgcttgaactcgctttctccatcttgtatgactcaaactgccaactgaacttcatcgctcctgacaagcatgagtactgtatctggacggatggactgaatgcgctactcgggaaggacatgatgagcgacctgacgcggaatgacctggacaccctgctcagcatggaaatcaagctccgcctcctggacctggaaaacatccagatccctgacgcacctccgccgattcccaaggagcccagcaactatgacttcgtctatgactgtaactgaagtggccgggcccagacatgccccttccaaaactggaacacctagctaacaggagagaggaatgaaaacacacccacgccttggaaccgtcctttggtaaagggaagctgtgggtccacattcccttcagcatcacctctagccctggcaactttcagcccctagctggcatcttgctcaccgccctgattctgttcctcggctccactgcttcaggtcacttcccatggctgcagtccactggtgggacaagagcaaagcccactgccagtaagaaggccaaagggcccttccatcctagccctctgcaggcatgcccttccttcccttgggcaggaaagccagcagccccagactgcccaaaaacttgcccaccagaccaagggcagtgccccaaggcccctgtctggaggaaatggcctagctatttgatgagaagaccaaaccccacatcctcctttcccctctctctagaatcatctcgcaccaccagttacacttgaattaagatctgcgctcaaatctcctcccacctctctccctgcttttgccttgctctgttcctctttggtcccaagagcagcagccgcagcctcctcgtgatcctccctagcataaatttcccaaacagtccacaggtcccatgcccactttgcgtctgcactgtgatcgtgacaaatcttccctcctcaccagctagtctggggtttcctctccctgccccaggccagaactgccttcttcatttccacccacgctcccagcctcttagctgaaagcacaaatggtgaaatcagtagtctcgctccatctctaatagactaaacctaaatgcctctaggacggactgttgctatccaagcgtttggtgttaccttctcctgggaggtcctgctgcaactcaagttccacaggatggtcaagctgtcagacatccaagtttacatcattgtaattattactggtatttacaatttgcaagagttttgggttagtttttttttttttttttgctttgtttttgtacaaaagagtctaacattttttgccaaacagatatatatttaatgaaaagaagagatacataaatgtgtgaatttccagtttttttttaattattttaatcccaaacatcttcctgaaaataacattcccttaaacatgctgtggaataaaatggattgtgatga

SEQ ID NO: 6413 - DNA, 4022 bp, Homo sapiens
  source 1..4022: mol_type = unassigned DNA; mol_type = unassigned DNA
aattagtgcctccaaacgccgtgtgtgagctcatcgaagtcatgctctgcacacatattatttatagcagatctgaggcatgcatggtgtttgacatttctgtcttttaagtagggggacttcaaaaagtcgtgggcatccccctaggcaaagtgcagtgggcagggaccaggcagggtgcgggcgcaaggcgaacgcgcagaccacgagtgtcctggcgcaggtgccgggggcggcggctgcaactccgcagcgtccgctcgggaggagagttcgcggctgatctccggatgccttgcagatgcaaaatgtgtctctggccagcaggaggaaggaagaggaagtgagagcagcggcagccggcggtgcagcagccggccgacccagagtgtaagtgcgtgtgctggggcgagcgggagcgggcgaggatgggcacaggatagaggcagagccacccacgccgccgcggccccacgctgggcgacagagcctccagttccccttcaatggtggcgggtcgccggagctctgatcgccgggaacccttgccgctgctgtcctgcgaccccaagcaggtatagacacgtgtggccgtttacgctgtaggatcctcattcccactggctttgaacattttggggacttacaatgccgccacccgcggacatcgtcaaggtggccatagaatggccgggcgcctaccccaaactcatggaaattgatcagaaaaaaccactgtctgcaataataaaggaagtctgtgatgggtggtctcttgccaaccatgaatattttgcactccagcatgccgatagttcaaacttctatatcacagaaaagaaccgcaatgagataaaaaatggcactatccttcgattaaccacatctccagctcagaacgcccagcagctccatgaacgaatccagtcctcgagtatggatgccaagctggaagccctgaaggacttggccagcctctcccgggatgtcacgtttgcccaggagtttataaacctggacggtatctctctcctcacgcagatggtggagagcggcactgagcgataccagaaattgcagaagatcatgaagccttgctttggagacatgctgtccttcaccctgacggccttcgttgagctgatggaccatggcatagtgtcctgggatacattttcggtggcgttcattaagaagatagcaagttttgtgaacaagtcagccatagacatctcgatcctgcagcggtccttggccattttggagtcgatggtgctcaatagccatgacctctaccagaaagtggcgcaggagatcaccatcggccagctcattccacacctgcaagggtcagatcaagaaatccaaacctatactattgcagtgattaatgcgcttttcctgaaggctcctgatgagaggaggcaggagatggcgaatattttggctcagaagcaactgcgttccatcattttaacacatgtcatccgagcccagcgggccatcaacaatgagatggcgcaccagctgtatgttctacaagtgctcacctttaacctcctggaagacaggatgatgaccaaaatggacccccaggaccaggctcagagggacatcatatttgaacttcgaagaattgcttttgatgctgagtctgaacctaacaacagcagtggcagcatggagaaacgcaagtccatgtacacgcgagattataagaagcttgggttcattaatcatgtcaaccctgccatggacttcacgcagactccacctgggatgttggctctggacaacatgctgtactttgccaagcaccaccaagatgcctacatccggattgtgcttgagaacagtagtcgagaagacaagcatgaatgtccctttggccgcagtagtatagagctgaccaagatgctatgtgagatcttgaaagtgggcgagttgcctagtgagacctgcaacgacttccacccgatgttcttcacccacgacagatcctttgaggagtttttctgcatctgtatccagctcctgaacaagacatggaaggaaatgagggcaacttctgaagacttcaacaaggtaatgcaggtggtgaaggagcaggttatgagagcacttacaaccaagcctagctccctggaccagttcaagagcaaactgcagaacctgagctacactgagatcctgaaaatccgccagtccgagaggatgaaccaggaagatttccagtcccgcccgattttggaactaaaggagaagattcagccagaaatcttagagctgatcaaacagcaacgcctgaaccgccttgtggaagggacctgctttaggaaactcaatgcccggcggaggcaagacaagttttggtattgtcggctttcgccaaatcacaaagtcctgcattacggagacttagaagagagtcctcagggagaagtgccccacgattccttgcaggacaaactgccggtggcagatatcaaagccgtggtgacgggaaaggactgccctcatatgaaagagaaaggtgcccttaaacaaaacaaggaggtgcttgaactcgctttctccatcttgtatgactcaaactgccaactgaacttcatcgctcctgacaagcatgagtactgtatctggacggatggactgaatgcgctactcgggaaggacatgatgagcgacctgacgcggaatgacctggacaccctgctcagcatggaaatcaagctccgcctcctggacctggaaaacatccagatccctgacgcacctccgccgattcccaaggagcccagcaactatgacttcgtctatgactgtaactgaagtggccgggcccagacatgccccttccaaaactggaacacctagctaacaggagagaggaatgaaaacacacccacgccttggaaccgtcctttggtaaagggaagctgtgggtccacattcccttcagcatcacctctagccctggcaactttcagcccctagctggcatcttgctcaccgccctgattctgttcctcggctccactgcttcaggtcacttcccatggctgcagtccactggtgggacaagagcaaagcccactgccagtaagaaggccaaagggcccttccatcctagccctctgcaggcatgcccttccttcccttgggcaggaaagccagcagccccagactgcccaaaaacttgcccaccagaccaagggcagtgccccaaggcccctgtctggaggaaatggcctagctatttgatgagaagaccaaaccccacatcctcctttcccctctctctagaatcatctcgcaccaccagttacacttgaattaagatctgcgctcaaatctcctcccacctctctccctgcttttgccttgctctgttcctctttggtcccaagagcagcagccgcagcctcctcgtgatcctccctagcataaatttcccaaacagtccacaggtcccatgcccactttgcgtctgcactgtgatcgtgacaaatcttccctcctcaccagctagtctggggtttcctctccctgccccaggccagaactgccttcttcatttccacccacgctcccagcctcttagctgaaagcacaaatggtgaaatcagtagtctcgctccatctctaatagactaaacctaaatgcctctaggacggactgttgctatccaagcgtttggtgttaccttctcctgggaggtcctgctgcaactcaagttccacaggatggtcaagctgtcagacatccaagtttacatcattgtaattattactggtatttacaatttgcaagagttttgggttagtttttttttttttttttgctttgtttttgtacaaaagagtctaacattttttgccaaacagatatatatttaatgaaaagaagagatacataaatgtgtgaatttccagtttttttttaattattttaatcccaaacatcttcctgaaaataacattcccttaaacatgctgtggaataaaatggattgtgatga

SEQ ID NO: 6414 - DNA, 1982 bp, Homo sapiens
  source 1..1982: mol_type = unassigned DNA; mol_type = unassigned DNA
tggaggggcagcgtggggaacgagaaactctttgcctgtagggacccttctagctgcaaacttaaaaatgtatgtggcaagatgcaacccaagcaccgagcaggattccagacgagttataatcattctgaacggggagaggaaaggtaatgcaggtggtgaaggagcaggttatgagagcacttacaaccaagcctagctccctggaccagttcaagagcaaactgcagaacctgagctacactgagatcctgaaaatccgccagtccgagaggatgaaccaggaagatttccagtcccgcccgattttggaactaaaggagaagattcagccagaaatcttagagctgatcaaacagcaacgcctgaaccgccttgtggaagggacctgctttaggaaactcaatgcccggcggaggcaagacaagttttggtattgtcggctttcgccaaatcacaaagtcctgcattacggagacttagaagagagtcctcagggagaagtgccccacgattccttgcaggacaaactgccggtggcagatatcaaagccgtggtgacgggaaaggactgccctcatatgaaagagaaaggtgcccttaaacaaaacaaggaggtgcttgaactcgctttctccatcttgtatgactcaaactgccaactgaacttcatcgctcctgacaagcatgagtactgtatctggacggatggactgaatgcgctactcgggaaggacatgatgagcgacctgacgcggaatgacctggacaccctgctcagcatggaaatcaagctccgcctcctggacctggaaaacatccagatccctgacgcacctccgccgattcccaaggagcccagcaactatgacttcgtctatgactgtaactgaagtggccgggcccagacatgccccttccaaaactggaacacctagctaacaggagagaggaatgaaaacacacccacgccttggaaccgtcctttggtaaagggaagctgtgggtccacattcccttcagcatcacctctagccctggcaactttcagcccctagctggcatcttgctcaccgccctgattctgttcctcggctccactgcttcaggtcacttcccatggctgcagtccactggtgggacaagagcaaagcccactgccagtaagaaggccaaagggcccttccatcctagccctctgcaggcatgcccttccttcccttgggcaggaaagccagcagccccagactgcccaaaaacttgcccaccagaccaagggcagtgccccaaggcccctgtctggaggaaatggcctagctatttgatgagaagaccaaaccccacatcctcctttcccctctctctagaatcatctcgcaccaccagttacacttgaattaagatctgcgctcaaatctcctcccacctctctccctgcttttgccttgctctgttcctctttggtcccaagagcagcagccgcagcctcctcgtgatcctccctagcataaatttcccaaacagtccacaggtcccatgcccactttgcgtctgcactgtgatcgtgacaaatcttccctcctcaccagctagtctggggtttcctctccctgccccaggccagaactgccttcttcatttccacccacgctcccagcctcttagctgaaagcacaaatggtgaaatcagtagtctcgctccatctctaatagactaaacctaaatgcctctaggacggactgttgctatccaagcgtttggtgttaccttctcctgggaggtcctgctgcaactcaagttccacaggatggtcaagctgtcagacatccaagtttacatcattgtaattattactggtatttacaatttgcaagagttttgggttagtttttttttttttttttgctttgtttttgtacaaaagagtctaacattttttgccaaacagatatatatttaatgaaaagaagagatacataaa

SEQ ID NO: 6415 - DNA, 3154 bp, Homo sapiens
  source 1..3154: mol_type = unassigned DNA; mol_type = unassigned DNA
ataaacgcaggtcacctgagccagtagcagcaacctgggtccccttccacgctgtggaatctttgtttttttttcactgctcgcaataaatcttgctgctgcttattatttgggtccgtgttacctttatgagctgtagcactcaccgcgaaggtttgcagcttcgctattcactcttgaagccagcgagaccacgaacccaccgggaggaagaaacaactccggacgcgccacctttaagagctgtaacactaacggtgaaagtctgcggtatcactcctgaagtcagggagaccacgaaccccccagaagaaactccggacgcatctgaacatctgaaggaacaaactctggacacaccatctttaagaactgaaacaccgcgacagttcgctgcttcattcttaaaggcagtgagaccgagaacgcaccaattctggacacaaaaggaccttagcaggctcaggaaatggcaagccatttatgaagagggaagagatagcaaacgttggtctcaagttctctagttctttacccagaccatagctggctgggggatgatcctgatttagtctggggggttcctttacgcattgccaccagcaggtgccgcaaatggaccattggcagtcttaaggtatagacacgtgtggccgtttacgctgtaggatcctcattcccactggctttgaacattttggggacttacaatgccgccacccgcggacatcgtcaaggtggccatagaatggccgggcgcctaccccaaactcatggaaattgatcagaaaaaaccactgtctgcaataataaaggaagtctgtgatgggtggtctcttgccaaccatgaatattttgcactccagcatgccgatagttcaaacttctatatcacagaaaagaaccgcaatgagataaaaaatggcactatccttcgattaaccacatctccagctcagaacgcccagcagctccatgaacgaatccagtcctcgagtatggatgccaagctggaagccctgaaggacttggccagcctctcccgggatgtcacgtttgcccaggagtttataaacctggacggtatctctctcctcacgcagatggtggagagcggcactgagcgataccagaaattgcagaagatcatgaagccttgctttggagacatgctgtccttcaccctgacggccttcgttgagctgatggaccatggcatagtgtcctgggatacattttcggtggcgttcattaagaagatagcaagttttgtgaacaagtcagccatagacatctcgatcctgcagcggtccttggccattttggagtcgatggtgctcaatagccatgacctctaccagaaagtggcgcaggagatcaccatcggccagctcattccacacctgcaagggtcagatcaagaaatccaaacctatactattgcagtgattaatgcgcttttcctgaaggctcctgatgagaggaggcaggagatggcgaatattttggctcagaagcaactgcgttccatcattttaacacatgtcatccgagcccagcgggccatcaacaatgagatggcgcaccagctgtatgttctacaagtgctcacctttaacctcctggaagacaggatgatgaccaaaatggacccccaggaccaggctcagagggacatcatatttgaacttcgaagaattgcttttgatgctgagtctgaacctaacaacagcagtggcagcatggagaaacgcaagtccatgtacacgcgagattataagaagcttgggttcattaatcatgtcaaccctgccatggacttcacgcagactccacctgggatgttggctctggacaacatgctgtactttgccaagcaccaccaagatgcctacatccggattgtgcttgagaacagtagtcgagaagacaagcatgaatgtccctttggccgcagtagtatagagctgaccaagatgctatgtgagatcttgaaagtgggcgagttgcctagtgagacctgcaacgacttccacccgatgttcttcacccacgacagatcctttgaggagtttttctgcatctgtatccagctcctgaacaagacatggaaggaaatgagggcaacttctgaagacttcaacaaggtaatgcaggtggtgaaggagcaggttatgagagcacttacaaccaagcctagctccctggaccagttcaagagcaaactgcagaacctgagctacactgagatcctgaaaatccgccagtccgagaggatgaaccaggaagatttccagtcccgcccgattttggaactaaaggagaagattcagccagaaatcttagagctgatcaaacagcaacgcctgaaccgccttgtggaagggacctgctttaggaaactcaatgcccggcggaggcaagacaagttttggtattgtcggctttcgccaaatcacaaagtcctgcattacggagacttagaagagagtcctcagggagaagtgccccacgattccttgcaggacaaactgccggtggcagatatcaaagccgtggtgacgggaaaggactgccctcatatgaaagagaaaggtgcccttaaacaaaacaaggaggtgcttgaactcgctttctccatcttgtatgactcaaactgccaactgaacttcatcgctcctgacaagcatgagtactgtatctggacggatggactgaatgcgctactcgggaaggacatgatgagcgacctgacgcggaatgacctggacaccctgctcagcatggaaatcaagctccgcctcctggacctggaaaacatccagatccctgacgcacctccgccgattcccaaggagcccagcaactatgacttcgtctatgactgtaactgaagtggccgggcccagacatgccccttccaaaactggaacacctagctaacaggagagaggaatgaaaacacacccacgccttggaaccgtcctttggtaaagggaagctgtgggtccacattcccttcagcatcacctctagccctggcaactttcagcccctagctggcatcttgctcaccgccctgattctgttcctcggctccactgcttcaggtcacttcccatggctgcagtccactggtgggacaagagcaaag

SEQ ID NO: 6416 - DNA, 877 bp, Homo sapiens
  source 1..877: mol_type = unassigned DNA; mol_type = unassigned DNA
tttactgggtttttgtttgtttgtttgtttgtttgtttttgtggcctctctggaagggagatgctgaagaaaggagaataacacagttttggtggcgggcgaggaggcaggcggtgctgtcaccttggacactcattgagcctctctaagccccacctcataaaggagatgaaaacacttgctacatgggctgcatgcgaattaaatgagatagttcacagaccgccgtgaatggagagaaggaatcatgccgtgaaccttgaagagcatggttcctccttccatcagcctcattgcagctccgcttggctagacaagctggccctatgccatggtcaatgtgcagccatttgcaactgcaaaatgaaatgtgccgattttccttaaggtgctgttttctctcatctcttgtaggaggtgcttgaactcgctttctccatcttgtatgactcaaactgccaactgaacttcatcgctcctgacaagcatgagtactgtatctggacggatggactgaatgcgctactcgggaaggacatgatgagcgacctgacgcggaatgacctggacaccctgctcagcatggaaatcaagctccgcctcctggacctggaaaacatccagatccctgacgcacctccgccgattcccaaggagcccagcaactatgacttcgtctatgactgtaactgaagtggccgggcccagacatgccccttccaaaactggaacacctagctaacaggagagaggaatgaaaacacacccacgccttggaaccgtcctttggtaaagggaagctgtgggtccacattcccttcagcatcacctctagccctggcaactttcagcccctagctggcatcttgctcaccgc

SEQ ID NO: 6417 - DNA, 568 bp, Homo sapiens
  source 1..568: mol_type = unassigned DNA; mol_type = unassigned DNA
acatgcttattcttctggacttggagtgtataccatttaaaggtgtgcggcgggtctctgttcacatggctcaactggaaacctgtttcatgaacaagcttactcaggaaccatctggtggtattccagcacattgttcttcagggggacgactctaagtcgctttgtggtggcagcagcttagaatcagtatttgtggttgggaaagatggacttacgggagcttggtaatgcaggaggtgcttgaactcgctttctccatcttgtatgactcaaactgccaactgaacttcatcgctcctgacaagcatgagtactgtatctggacggatggactgaatgcgctactcgggaaggacatgatgagcgacctgacgcggaatgacctggacaccctgctcagcatggaaatcaagctccgcctcctggacctggaaaacatccagatccctgacgcacctccgccgattcccaaggagcccagcaactatgacttcgtctatgactgtaactgaagtggccgggcccagacatgccccttccaaaactggaacacctagctaacagg

SEQ ID NO: 6418 - DNA, 2621 bp, Homo sapiens
  source 1..2621: mol_type = unassigned DNA; mol_type = unassigned DNA
gagctcatcgaagtcatgctctgcacacatattatttatagcagatctgaggcatgcatggtgtttgacatttctgtcttttaagtagggggacttcaaaaagtcgtgggcatccccctaggcaaagtgcagtgggcagggaccaggcagggtgcgggcgcaaggcgaacgcgcagaccacgagtgtcctggcgcaggtgccgggggcggcggctgcaactccgcagcgtccgctcgggaggagagttcgcggctgatctccggatgccttgcagatgcaaaatgtgtctctggccagcaggaggaaggaagaggaagtgagagcagcggcagccggcggtgcagcagccggccgacccagagtgtatagacacgtgtggccgtttacgctgtaggatcctcattcccactggctttgaacattttggggacttacaatgccgccacccgcggacatcgtcaaggtggccatagaatggccgggcgcctaccccaaactcatggaaattgatcagaaaaaaccactgtctgcaataataaaggaagtctgtgatgggtggtctcttgccaaccatgaatattttgcactccagcatgccgatagttcaaacttctatatcacagaaaagaaccgcaatgagataaaaaatggcactatccttcgattaaccacatctccagctcagaacgcccagcagctccatgaacgaatccagtcctcgagtatggatgccaagctggaagccctgaaggacttggccagcctctcccgggatgtcacgtttgcccaggagtttataaacctggacggtatctctctcctcacgcagatggtggagagcggcactgagcgataccagaaattgcagaagatcatgaagccttgctttggagacatgctgtccttcaccctgacggccttcgttgagctgatggaccatggcatagtgtcctgggatacattttcggtggcgttcattaagaagatagcaagttttgtgaacaagtcagccatagacatctcgatcctgcagcggtccttggccattttggagtcgatggtgctcaatagccatgacctctaccagaaagtggcgcaggagatcaccatcggccagctcattccacacctgcaagggtcagatcaagaaatccaaacctatactattgcagtgattaatgcgcttttcctgaaggctcctgatgagaggaggcaggagatggcgaatattttggctcagaagcaactgcgttccatcattttaacacatgtcatccgagcccagcgggccatcaacaatgagatggcgcaccagctgtatgttctacaagtgctcacctttaacctcctggaagacaggatgatgaccaaaatggacccccaggaccaggctcagagggacatcatatttgaacttcgaagaattgcttttgatgctgagtctgaacctaacaacagcagtggcagcatggagaaacgcaagtccatgtacacgcgagattataagaagcttgggttcattaatcatgtcaaccctgccatggacttcacgcagactccacctgggatgttggctctggacaacatgctgtactttgccaagcaccaccaagatgcctacatccggattgtgcttgagaacagtagtcgagaagacaagcatgaatgtccctttggccgcagtagtatagagctgaccaagatgctatgtgagatcttgaaagtgggcgagttgcctagtgagacctgcaacgacttccacccgatgttcttcacccacgacagatcctttgaggagtttttctgcatctgtatccagctcctgaacaagacatggaaggaaatgagggcaacttctgaagacttcaacaaggtaatgcaggtggtgaaggagcaggttatgagagcacttacaaccaagcctagctccctggaccagttcaagagcaaactgcagaacctgagctacactgagatcctgaaaatccgccagtccgagaggatgaaccaggaagatttccagtcccgcccgattttggaactaaaggagaagattcagccagaaatcttagagctgatcaaacagcaacgcctgaaccgccttgtggaagggacctgctttaggaaactcaatgcccggcggaggcaagacaagttttggtattgtcggctttcgccaaatcacaaagtcctgcattacggagacttagaagagagtcctcagggagaagtgccccacgattccttgcaggacaaactgccggtggcagatatcaaagccgtggtgacgggaaaggactgccctcatatgaaagagaaaggtgcccttaaacaaaacaaggaggtgcttgaactcgctttctccatcttgtatgactcaaactgccaactgaacttcatcgctcctgacaagcatgagtactgtatctggacggatggactgaatgcgctactcgggaaggacatgatgagcgacctgacgcggaatgacctggacaccctgctcagcatggaaatcaagctccgcctcctggacctggaaaacatccagatccctgacgcacctccgccgattcccaaggagcccagcaactatgacttcgtctatgactgtaactga

SEQ ID NO: 6419 - DNA, 549 bp, Homo sapiens
  source 1..549: mol_type = unassigned DNA; mol_type = unassigned DNA
catttaaaggtgtgcggcgggtctctgttcacatggctcaactggaaacctgtttcatgaacaagcttactcaggaaccatctggtggtattccagcacattgttcttcagggggacgactctaagtcgctttgtggtggcagcagcttagaatcagtatttgtggttgggaaagatggacttacgggagcttggtaatgcaggtggtgaaggagcaggttatgagagcacttacaaccaagcctagctccctggaccagttcaagagcaaactgcagaacctgagctacactgagatcctgaaaatccgccagtccgagaggatgaaccaggaagatttccagtcccgcccgattttacaagttttggtattgtcggctttcgccaaatcacaaagtcctgcattacggagacttagaagagagtcctcagggagaagtgccccacgattccttgcaggacaaactgccggtggcagatatcaaagccgtggtgacgggaaaggactgccctcatatgaaagagaaaggtgcccttaaacaaaacaag

SEQ ID NO: 6420 - DNA, 881 bp, Homo sapiens
  source 1..881: mol_type = unassigned DNA; mol_type = unassigned DNA
gcgaatattttggctcagaagcaactgcgttccatcattttaacacatgtcatccgagcccagcgggccatcaacaatgagatggcgcaccagctgtatgttctacaagtgctcacctttaacctcctggaagacaggatgatgaccaaaatggacccccaggaccaggctcagagggacatcatatttgaacttcgaagaattgcttttgatgctgagtctgaacctaacaacagcagtggcagcatggagaaacgcaagtccatgtacacgcgagattataagaagcttgggttcattaatcatgtcaaccctgccatggacttcacgcagactccacctgggatgttggctctggacaacatgctgtactttgccaagcaccaccaagatgcctacatccggattgtgcttgagaacagtagtcgagaagacaagcatgaatgtccctttggccgcagtagtatagagctgaccaagatgctatgtgagatcttgaaagtgggcgagttgcatcacttatctcctgaaaaattcacactgccgtgaacacgatccagccttgcagtgtgtctcggagctagtgagacctgcaacgacttccacccgatgttcttcacccacgacagatcctttgaggagtttttctgcatctgtatccagctcctgaacaagacatggaaggaaatgagggcaacttctgaagacttcaacaaggtaatgcaggtggtgaaggagcaggttatgagagcacttacaaccaagcctagctccctggaccagttcaagagcaaactgcagaacctgagctacactgagatcctgaaaatccgccagtccgagaggatgaaccaggaagatttccagtcccgcccgatttt

SEQ ID NO: 6421 - DNA, 570 bp, Homo sapiens
  source 1..570: mol_type = unassigned DNA; mol_type = unassigned DNA
attctgaagacgagagaaagaggagcaggaagaatcttccatgaactctgcaaacctacaaactttccaatgagaagtggtgcacactcccgagatggtgcttgggacaacatggttaaaaggaatcatgtcaaccctgccatggacttcacgcagactccacctgggatgttggctctggacaacatgctgtactttgccaagcaccaccaagatgcctacatccggattgtgcttgagaacagtagtcgagaagacaagcatgaatgtccctttggccgcagtagtatagagctgaccaagatgctatgtgagatcttgaaagtgggcgagttgcctagtgagacctgcaacgacttccacccgatgttcttcacccacgacagatcctttgaggagtttttctgcatctgtatccagctcctgaacaagacatggaaggaaatgagggcaacttctgaagacttcaacaaggtaatgcaggtggtgaaggagcaggttatgagagcacttacaaccaagcctagctccctggaccagttcaagagcaaactgcagaacctgagctac

SEQ ID NO: 6422 - DNA, 580 bp, Homo sapiens
  source 1..580: mol_type = unassigned DNA; mol_type = unassigned DNA
atcaagaaatccaaacctatactattgcagtgattaatgcgcttttcctgaaggctcctgatgagaggaggcaggttgatgtagagagcaatgttgacatccttgattgtcctctgactgagatggcgaatattttggctcagaagcaactgcgttccatcattttaacacatgtcatccgagcccagcgggccatcaacaatgagatggcgcaccagctgtatgttctacaagtgctcacctttaacctcctggaagacaggatgatgaccaaaatggacccccaggaccaggctcagagggacatcatatttgaacttcgaagaattgcttttgatgctgagtctgaacctaacaacagcagtggcagcatggagaaacgcaagtccatgtacacgcgagattataagaagcttgggttcattaatcatgtcaaccctgccatggacttcacgcagactccacctgggatgttggctctggacaacatgctgtactttgccaagcaccaccaagatgcctacatccggattgtgcttgagaacagtagtcgagaagacaagcatgaatgtccctttgg

SEQ ID NO: 6423 - DNA, 655 bp, Homo sapiens
  source 1..655: mol_type = unassigned DNA; mol_type = unassigned DNA
caggagatcaccatcggccagctcattccacacctgcaagggtcagatcaagaaatccaaacctatactattgcagtgattaatgcgcttttcctgaaggctcctgatgagaggaggcaggagatggcgaatattttggctcagaagcaactgcgttccatcattttaacacatgtcatccgagcccagcgggccatcaacaatgagatggcgcaccagctgtatgttctacaagtgctcacctttaacctcctggaagacaggatgatgaccaaaatggacccccaggaccaggctcagagggacatcatatttgaacttcgaagaattgcttttgatgctgagtctgaacctaacaacagcagtggcagcatggagaaacgcaagtccatgtacacgcgagattataagaagcttgggttcattaatcatgtcaaccctgccatggacttcacgcagactccacctgggatgttggctctggacaacatgctgtactttgccaagcaccaccaagatgcctacatccgggtaagcaagaagccccttttcagatattgtgtgtttcctactcaatgttaatttcaaactcacaaatacggagggattacctttagatgagtgaccccatattttctgtctttcttagtaaact

SEQ ID NO: 6424 - DNA, 610 bp, Homo sapiens
  source 1..610: mol_type = unassigned DNA; mol_type = unassigned DNA
caggagatggcgaatattttggctcagaagcaactgcgttccatcattttaacacatgtcatccgagcccagcgggccatcaacaatgagatggcgcaccagctgtatgttctacaagtgctcacctttaacctcctggaagacaggatgatgaccaaaatggacccccaggaccaggctcagagggacatcatatttgaacttcgaagaattgcttttgatgctgagtctgaacctaacaacagcagtggcagcatggagaaacgcaagtccatgtacacgcgagattataagaagcttgggttcattgtaagtaagctatctccagtatgcgctctccctccagcctccccgggcctgacctcagccacataactgatgtctcttccgagcgtgtggtcctcttgcgctttacggaatagtttccacatttccagatgtttagctggtttaaacaggatcacatgaaaatctcttctggcttcagtgaaatggaataacttgcacaagtgtgactaatactgcatttgtttattcagttctgattaagtgtaaccgagagtagttagcccggaatgtatctcgacttcattaaatctatttcacaaga

SEQ ID NO: 6425 - DNA, 576 bp, Homo sapiens
  source 1..576: mol_type = unassigned DNA; mol_type = unassigned DNA
gtatagacacgtgtggccgtttacgctgtaggatcctcattcccactggctttgaacattttggggacttacaatgccgccacccgcggacatcgtcaaggtggccatagaatggccgggcgcctaccccaaactcatggaaattgatcagaaaaaaccactgtctgcaataataaaggaagtctgtgatgggtggtctcttgccaaccatgaatattttgcactccagcatgccgatagttcaaacttctatatcacagaaaagaaccgcaatgagataaaaaatggcactatccttcgattaaccacatctccagctcagaacgcccagcagctccatgaacgaatccagtcctcgagtatggatgccaagctggaagccctgaaggacttggccagcctctcccgggatgtcacgtttgcccaggagtttataaacctggacggtatctctctcctcacgcagatggtggagagcggcactgactttggagacatgctgtccttcaccctgacggccttcgttgagctgatggaccatggcatagtgtcctgggatacattttcggtggcgtt

SEQ ID NO: 6426 - DNA, 650 bp, Homo sapiens
  source 1..650: mol_type = unassigned DNA; mol_type = unassigned DNA
gaccatgacttcctgggcaatctgtccttcctcagactgttgagtgccagacgtttatatgcatgtctggacagagagtgagcctggctcattcagaccctgggcaccattcagagcagaactcagtggtatagacacgtgtggccgtttacgctgtaggatcctcattcccactggctttgaacattttggggacttacaatgccgccacccgcggacatcgtcaaggtggccatagaatggccgggcgcctaccccaaactcatggaaattgatcagaaaaaaccactgtctgcaataataaaggaagtctgtgatgggtggtctcttgccaaccatgaatattttgcactccagcatgccgatagttcaaacttctatatcacagaaaagaaccgcaatgagataaaaaatggcactatccttcgattaaccacatctccagctcagaacgcccagcagctccatgaacgaatccagtcctcgagtatggatgccaagctggaagccctgaaggacttggccagcctctcccgggatgtcacgtttgcccaggagtttataaacctggacggtatctctctcctcacgcagatggtggagagcggcactgagcgataccagaaattgcagaagatcatgaagccttg

SEQ ID NO: 6427 - DNA, 2876 bp, Homo sapiens
  source 1..2876: mol_type = unassigned DNA; mol_type = unassigned DNA
agtgcgtgtgctggggcgagcgggagcgggcgaggatgggcacaggatagaggcagagccacccacgccgccgcggccccacgctgggcgacagagcctccagttccccttcaatggtggcgggtcgccggagctctgatcgccgggaacccttgccgctgctgtcctgcgaccccaagcaggtatagacacgtgtggccgtttacgctgtaggatcctcattcccactggctttgaacattttggggacttacaatgccgccacccgcggacatcgtcaaggtggccatagaatggccgggcgcctaccccaaactcatggaaattgatcagaaaaaaccactgtctgcaataataaaggaagtctgtgatgggtggtctcttgccaaccatgaatattttgcactccagcatgccgatagttcaaacttctatatcacagaaaagaaccgcaatgagataaaaaatggcactatccttcgattaaccacatctccagtaagttgatcttagcttctgacttccagcaaactctttgctctgcgtttctgctatatgtgattgtgggatattaatttttgaggttgactttagtgcaaagcaaaaggcttccagaatgtcctgacatgcagattctggattagcaggaatgcccctccgtagatttcccactgcagaggaggaagaccttattccaggcgaagggcaagcttgtctaacctgcggcccaggatagctttgaattcacaaattcgtaaactttctcaaaacattatgagttgttctgtattttatttagttcatcagctatcgttagcgtattttatgtgtggcccaagacattcttcttcttcctgtggcccagggaagccaaaagattggacacttctgctttaagatttgagtttggaggtcatcttaacaacttctgtgttacagctgggatcactcacctgtaccaattggttttacccacctactcacacatccacctaatgccatctgagcaaattcagacaacaaacaaagcaaacaaaaccaaagtcagttactttcctttaaagtcggttactttcctttaaagtcagtgtggctgggcgcggtggctcatgcctgtaatcccagcactttgggaggccgaggcaggtggatcaggaggtcaggagatcaagaccatcttggctaacacagtgaaaccctgtctctactaaaaatacaaaaaattagccgggcgtggtggtggacgcctgtagtcccagctactcgggaggctaaggcaggagaatggcgtgaaacctaataggtggagcttgcagtgagcagaggtagtgccactgcactccagcctgggtgagagagtgagactccatctcaaaaaaaaaaagaaaaaaaagaaaaagtcagtgtgtgtgtgtgtgtgtgtgtctgtgtgtgtgtgtgtgtgtgtgagagagagagagagtttaagtattttgtagctttaatgggttattatgacaattcataaaaataatttagaaatattgaccacttcactgatccattgacagctgattctacataagaactttagagtcttctgaattaaagctgctaaacaagacgctacagtatatttagactattgtagctgatgatgtctctcttcttggtctttcctacttgcttggagatactttaggtagtaacattagcatatttaactatattattttacagtgcatttcattgctttcctaaaaaattatctgccccaaatacaccaagtgttactattttcactctgcatatgtgatgaaaactgtgtctaactatcattttcagtttccactgaagccatgtggtagactaaaaataaatttaaaaattgggaaaagcatctggctaaaattaagctgtgggtactgtaactaccataaatccttattgttgaaaattacattagtgtggcttagaaactcctaaacattttgcccaataacatcctgaacctaaaaacagtgatgagctcaatggagtgagttgctacagttggctgaactgtctttgatgcctgctttgctacttaatggagattataatctactcatttttcagtggctacatgatgagctgaggcgttttcgtctgactttgcattggtcttcttactcaagtcagcatgaatgaatgttaatttgacctttacaccattgttttatgtgttttttgtagtttctgattatcctgctaaaagtcatcatctgcttgctggacagaaaaagtagaccttgccttttatttcattttagagtctaaaagacagctttttaatcaaagccttctctaagccaaagaaggagttagtttcatttttttactgctgtggatttatgaacaaaaattccgcaatctaagtcactccttgagagaaggcttagatgttaggcagagtgaagtttttcagcatcccaaaagaaacttagcgtgacttgtcatcaggaagaatggaatttgtgttcttgagataatgatcctcacattcccagctcagtgaatggaaagatgtgaaagccagtgtaagaggcactattaaaagatgggagcagccgggtgcagtggctcacgcctgtaatcccagcactttgggaggccgaggcaggcggatcaccaggtcaggagatcaagaccatcctggctaacacggtgtaaaccccgtctctactaaaaatacaaaaaaaattagccaggcgtggtggcaggcgcctgtagtcccagctactcgggaggctgacgcaggagaatggcgtgaacccaggaggtggagcttacagtgagcagagatgacgccactgcactccagcctgggcaacagagtgagactatgtctctgtctc

SEQ ID NO: 6428 - DNA, 503 bp, Homo sapiens
  source 1..503: mol_type = unassigned DNA; mol_type = unassigned DNA
agatgcaaaatgtgtctctggccagcaggaggaaggaagaggaagtgagagcagcggcagccggcggtgcagcagccggccgacccagagtggggcagagcagggagcacttataccatacaaggcagagaagatacagatcaagatatgcccaaggcccttctagttcagcctctccttggagtaggtatagacacgtgtggccgtttacgctgtaggatcctcattcccactggctttgaacattttggggacttacaatgccgccacccgcggacatcgtcaaggtggccatagaatggccgggcgcctaccccaaactcatggaaattgatcagaaaaaaccactgtctgcaataataaaggaagtctgtgatgggtggtctcttgccaaccatgaatattttgcactccagcatgccgatagttcaaacttctatatcacagaaaagaaccgcaatgagataaaaaatggcactatccttcgattaaccacatctcca

SEQ ID NO: 6429 - DNA, 858 bp, Homo sapiens
  source 1..858: mol_type = unassigned DNA; mol_type = unassigned DNA
atagcagatctgaggcatgcatggtgtttgacatttctgtcttttaagtagggggacttcaaaaagtcgtgggcatccccctaggcaaagtgcagtgggcagggaccaggcagggtgcgggcgcaaggcgaacgcgcagaccacgagtgtcctggcgcaggtgccgggggcggcggctgcaactccgcagcgtccgctcgggaggagagttcgcggctgatctccggatgccttgcagatgcaaaatgtgtctctggccagcaggaggaaggaagaggaagtgagagcagcggcagccggcggtgcagcagccggccgacccagagtgtaagtgcgtgtgctggggcgagcgggagcgggcgaggatgggcacaggatagaggcagagccacccacgccgccgcggccccacgctgggcgacagagcctccagttccccttcaatggtggcgggtcgccggagctctgatcgccgggaacccttgccgctgctgtcctgcgaccccaagcagggggcagagcagggagcacttataccatacaaggcagagaagatacagatcaagatatgcccaaggcccttctagttcagcctctccttggagtaggtatagacacgtgtggccgtttacgctgtaggatcctcattcccactggctttgaacattttggggacttacaatgccgccacccgcggacatcgtcaaggtggccatagaatggccgggcgcctaccccaaactcatggaaattgatcagaaaaaaccactgtctgcaataataaaggaagtctgtgatgggtggtctcttgccaaccatgaatattttgcactccagcatgccgatagttcaaacttc

SEQ ID NO: 6430 - DNA, 591 bp, Homo sapiens
  source 1..591: mol_type = unassigned DNA; mol_type = unassigned DNA
agatgcaaaatgtgtctctggccagcaggaggaaggaagaggaagtgagagcagcggcagccggcggtgcagcagccggccgacccagagtaaaaccttcttggcctctaactgagcagccctccatagaggattattagttcatgcctctgtgcaagaaagaaaaacaaaaacaaaatgcatgagttcattcactctcccatctcccctgctggcctgagagcacctgaacatagtgatggtactgtagccagtcatctgtgcatcctctgtgctctgcccactgcctggcatgtagaatatgcccagcaggggattttcagagctgaccagatgggagagtggtgaaactgaagatcagcccttttccctgcctgtaagcacctctaggaaaagatttaagagatgttgcaaacaaatcactccaacgtatttgggattgctcattgtgatgcctgatctgtgccagcctcttcctaccacatctatgactgttacaggggtaactgttccatcccttagtctgcagcacccggaatggatgtggaatcactgaaggaggtgagtggggaagaagacaagttggatcct

SEQ ID NO: 6431 - DNA, 3669 bp, Homo sapiens
  source 1..3669: mol_type = unassigned DNA; mol_type = unassigned DNA
gcgggcggaggctggaggagccgccgagcggagacccgggagcaggagctgggcctaggtctgcgccctggagggaggtgtagaaagaggtacatggagaacaagtttgtcaatccgtctgaacttcagttgccttacctgtaaggcagccgtgtctgtgtttttgtctcgcagaattagagcccattgggaacgatgccaccaccgtcagacattgtcaaagtggccattgagtggccaggtgctaacgcccagctccttgaaatcgaccagaaacggcccctggcatccattatcaaggaagtttgtgatgggtggtcgttgccaaacccagagtattataccctccgttatgcagatggtcctcagctgtacatcaccgaacagactcgcagtgacattaagaatgggacaatcttacaactggctatctccccgtcccgggctgcacgccagctgatggagaggacccagtcatccaacatggagacccggctggatgccatgaaggagctggccaagctctctgccgacgtgactttcgctactgagttcatcaacatggatggcatcattgtgctgacaaggctcgtggaaagtggaaccaagctcttgtcccactacagtgagatgctggcattcaccctgactgccttcctagagctcatggaccatggcattgtctcctgggacatggtttcaatcacctttattaagcagattgcagggtatgtgagccagcccatggtggacgtgtcaatccttcagaggtccctggccatcctggagagcatggtcttgaacagccagagtctgtaccagaagatagccgaggaaatcaccgtgggacagctcatctcacacctccaggtctccaaccaggagattcagacctacgccattgcactgattaatgcactttttctgaaggctcctgaggacaaacgacaggatatggcaaatgcatttgcacagaagcatctccggtctataatcctgaatcatgtgatccgagggaaccgccccatcaaaactgagatggcccatcagctatatgtccttcaagtcctaacctttaaccttctggaagaaaggatgatgaccaagatggaccccaatgaccaggctcaaagggacatcatatttgaactgaggaggattgcatttgacgcagagtctgatcctagcaatgcccctgggagtgggaccgaaaaacgcaaagccatgtacacaaaggactacaaaatgctgggatttaccaaccacatcaatccagccatggactttacccagactcctcctggaatgctggccttggacaacatgctgtacttggctaaagtccaccaggacacctacatccggattgtcttggagaacagtagccgggaagacaaacatgaatgcccctttggccgcagtgccattgagctcaccaaaatgctctgtgaaatcctgcaggttggggaactaccaaatgaaggacgcaatgactaccacccgatgttctttacccatgaccgagcctttgaagagctctttggaatctgcatccagctgttgaacaagacctggaaggagatgagggcaacagcagaggacttcaacaaggttatgcaagtcgtccgagagcaaatcactcgagctttgccctccaaacccaactctttggatcagttcaagagcaaattgcgtagcctgagttactctgagattctacgactgcgccagtctgagaggatgagtcaggatgacttccagtccccgccaattgtggagctgagggagaagatccagcccgagatccttgagctgatcaagcagcagcgcctgaaccggctctgtgagggcagcagcttccgaaagattgggaaccgccgaaggcaagaacggttctggtactgccggttggcactgaaccacaaggtccttcactatggtgacttggatgacaacccacaaggggaggtgacatttgaatccctgcaggagaaaattcctgttgcagacattaaggccattgtcactgggaaagattgtccccacatgaaagagaaaagtgctctgaaacagaacaaggaggtgttggaattggccttctccatcctgtatgaccctgatgagaccttaaacttcatcgcacctaataaatatgagtactgcatctggattgatggcctcagtgcccttctggggaaggacatgtccagtgagctgaccaagagtgacctggacaccctgctgagcatggagatgaagctgcggctcctggacctggagaacatccagattcccgaagccccaccccccatccccaaggagcccagcagctatgactttgtctatcactatggctgagcctggagccagaaacgacggtacccaggagaagggattttgggcccaggagaaacacttacattctggtgccttgtcttttgcttgtacagaatctgtagtgattttggtggccagtaaatgccagccatttctcaaacccacctcggaccacccagagtttcctcttggtccctgtctactaagagtcatgaaggcagggtgctctgcccactccatcaccatgaagcctgggattgggccacgaggaacaaacagcagatgcccttgccttccagtccaagaaactgcttcttgaaatggatttaacaacagccactcaccttttcctcctgagcctgctctctgatcagctggatccccacgtgagcaacagctggcccaggaaaggctgcctgcagaggacaggtgtgttgggcgtgttgagagccttgaagtgactacctgtatcttagatctgagtacaagcctgaggcttttgcttttgtcttttttgatgagggctcactccagcttcatatggtgccaagacgttgctgcttctgaggttggctctaacatctctggtctttagagccaccagatctctctggcccatacagatatcagagcagacggaaatttctccctgcaagcgctcagtctcatcccagcaagtcaaagacctcctggccaagtcctgccctcttaagtctccaggaacgctgcagggaaaacccagctgaggcctgggcctagactgtggtgaggtcactagattctactgctcttcccccacattaataccttttccttcctcagagagaaatctcccctaacctgaattgcagccccctccagtttgctttcctttggccttccagaccccaggaagttggccttcccttcctagtgctatggtttctgccattggccatgatttcagggagctggctgaggccggctgaggccacacctgtgccagtggggcttccctggtgctgcagcacttgtaaaccacacacacagcctctctccctggacatacgttagcacattggcattcagtattggtggcctggcatggtaggtactacccaatgaagagtgtactatatattttcattactataggccatacttatacagacgtgtatatatatttatataagatctacctatcttaggatggaaccttggggaaaaataaaattgaggggaagtaaaaagtatgtaacacttccagttgtgagccaagattgtaaccagagagcagccaggagcttcctgtcagtaaccatgttttcaataaatactctttcatgtacaaac

SEQ ID NO: 6432 - DNA, 4121 bp, Homo sapiens
  source 1..4121: mol_type = unassigned DNA; mol_type = unassigned DNA
gccccatcaaaactgagatggcccatcagctatatgtccttcaagtcctaacctttaaccttctggaagaaaggatgatgaccaagatggaccccaatgaccaggctcaaagggacatcatatttgaactgaggaggattgcatttgacgcagagtctgatcctagcaatgcccctgggagtgggaccgaaaaacgcaaagccatgtacacaaaggactacaaaatgctgggatttaccaaccacatcaatccagccatggactttacccagactcctcctggaatgctggccttggacaacatgctgtacttggctaaagtccaccaggacacctacatccggattgtcttggagaacagtagccgggaagacaaacatgaatgcccctttggccgcagtgccattgagctcaccaaaatgctctgtgaaatcctgcaggttggggaactaccaaatgaaggacgcaatgactaccacccgatgttctttacccatgaccgagcctttgaagagctctttggaatctgcatccagctgttgaacaagacctggaaggagatgagggcaacagcagaggacttcaacaaggttatgcaagtcgtccgagagcaaatcactcgagctttgccctccaaacccaactctttggatcagttcaagagcaaattgcgtagcctgagttactctgagattctacgactgcgccagtctgagaggatgagtcaggatgacttccagtccccgccaattgtggagctgagggagaagatccagcccgagatccttgagctgatcaagcagcagcgcctgaaccggctctgtgagggcagcagcttccgaaagattgggaaccgccgaaggcaagaacggttctggtactgccggttggcactgaaccacaaggtccttcactatggtgacttggatgacaacccacaaggggaggtgacatttgaatccctgcaggagaaaattcctgttgcagacattaaggccattgtcactgggaaagattgtccccacatgaaagagaaaagtgctctgaaacagaacaaggtgagtagagaggccagtttgagtagctggcccagtgatacttggagagtgccattggtggtggttttttccaggtgcattcttggcatcttcccctctctattcctgaatgttttattaagaattttgaacatacacaaaaatagatggaacctctgtatacacatcacccagactcagcaaccatggccagttctgcccatccacttgtttctctcctttatcgctttgaagaaagtcccaagtatcacactgtttcatctgtaaatatttagtgtacatcgtatagtgtataacattgccaccagtccattagcacacataacaggaaatgaaagtagttatttcagatcaaatattccactgatggtgactttctaccaattgtcttataaatgtcataatttctctacagatatataaatgtttatatggatacacacacacacacacacacacacacacacacacacacacacacccccatacccatcttgtctaaaccagagtctaagactggtcttttaagtttcttaattcataagttcccccgcccccccatcccccaccatcttttcctttgcagtttattagctgaagaaccagattgcttgtttggtagtttcctagcatctgaattttgctgattgtttccccgtggtacagtttaacttgttcctctgtcccagatctgtacattggaagagggatctagaggtttgatccagttcaggtttaacttttttcctggccagtgtcatcagtggtattatgttctatcaagaggcacataacgtctggtggtctctccttttgtgataattagcagactgttgaagctcagtgcctcattccatcagtcaactaaggtttgcaaactcatgatattttgatgcagtcattgcttttcatttatgagctgaaccatgaaacttgcccttatctactattggtttcccagtggtacagtttatataggaaacgagaataaatgctgattcttcttttatgtacttactttcaaaataatgagttagttccttggtatcatgcaacagtgaccaattttgtgtgtgtgtgtgttttgttttgttttttaattgttaagacattcctatgccaaatacagcacgatagaagttgttagtcatcttggtaatataaaaacttttaggataacttacagtcatggatcgtgaccttccagggttctgagtgttgaaaatgacttttttccaatcttaaaaatatcacaacatctttgatgtgacttgggcagggagtgggtaagttaaggttgatttatgctgggcctcatctccagccacacttgtggccgcctaggagcattgatgacattcatctgaatcagcatgtttggtgatgatgccgagtcactaggactttggccaagatcttgatgtgcagaccccaggctgttccatcgctctaatttaaaccctttctccttcaggaggtgttggaattggccttctccatcctgtatgaccctgatgagaccttaaacttcatcgcacctaataaatatgagtactgcatctggattgatggcctcagtgcccttctggggaaggacatgtccagtgagctgaccaagagtgacctggacaccctgctgagcatggagatgaagctgcggctcctggacctggagaacatccagattcccgaagccccaccccccatccccaaggagcccagcagctatgactttgtctatcactatggctgagcctggagccagaaacgacggtacccaggagaagggattttgggcccaggagaaacacttacattctggtgccttgtcttttgcttgtacagaatctgtagtgattttggtggccagtaaatgccagccatttctcaaacccacctcggaccacccagagtttcctcttggtccctgtctactaagagtcatgaaggcagggtgctctgcccactccatcaccatgaagcctgggattgggccacgaggaacaaacagcagatgcccttgccttccagtccaagaaactgcttcttgaaatggatttaacaacagccactcaccttttcctcctgagcctgctctctgatcagctggatccccacgtgagcaacagctggcccaggaaaggctgcctgcagaggacaggtgtgttgggcgtgttgagagccttgaagtgactacctgtatcttagatctgagtacaagcctgaggcttttgcttttgtcttttttgatgagggctcactccagcttcatatggtgccaagacgttgctgcttctgaggttggctctaacatctctggtctttagagccaccagatctctctggcccatacagatatcagagcagacggaaatttctccctgcaagcgctcagtctcatcccagcaagtcaaagacctcctggccaagtcctgccctcttaagtctccaggaacgctgcagggaaaacccagctgaggcctgggcctagactgtggtgaggtcactagattctactgctcttcccccacattaataccttttccttcctcagagagaaatctcccctaacctgaattgcagccccctccagtttgctttcctttggccttccagaccccaggaagttggccttcccttcctagtgctatggtttctgccattggccatgatttcagggagctggctgaggccggctgaggccacacctgtgccagtggggcttccctggtgctgcagcacttgtaaaccacacacacagcctctctccctggacatacgttagcacattggcattcagtattggtggcctggcatggtaggtactacccaatgaagagtgtactatatattttcattactataggccatacttatacagacgtgtatatatatttatataagatctacctatcttaggatggaaccttggggaaaaataaaattgaggggaagtaaaaagtatgtaacacttccagttgtgagccaagattgtaaccagagagcagccaggagcttcctgtcagtaaccatgttttcaataaatactctttcatgtacaaa

SEQ ID NO: 6433 - DNA, 3678 bp, Homo sapiens
  source 1..3678: mol_type = unassigned DNA; mol_type = unassigned DNA
gtctgcgccctggagggaggtgtagaaagaggtacatggagaacaagtttgtcaatccgtctgaacttcagttgccttacctgtaaggcagccgtgtctgtgtttttgtctcgcagaattagagcccattgggaacgatgccaccaccgtcagacattgtcaaagtggccattgagtggccaggtgctaacgcccagctccttgaaatcgaccagaaacggcccctggcatccattatcaaggaagtttgtgatgggtaggttgaaatggacctcgttttcaacagtggcagctccgactgaaagagcactcctacaccttgaggtggtcgttgccaaacccagagtattataccctccgttatgcagatggtcctcagctgtacatcaccgaacagactcgcagtgacattaagaatgggacaatcttacaactggctatctccccgtcccgggctgcacgccagctgatggagaggacccagtcatccaacatggagacccggctggatgccatgaaggagctggccaagctctctgccgacgtgactttcgctactgagttcatcaacatggatggcatcattgtgctgacaaggctcgtggaaagtggaaccaagctcttgtcccactacagtgagatgctggcattcaccctgactgccttcctagagctcatggaccatggcattgtctcctgggacatggtttcaatcacctttattaagcagattgcagggtatgtgagccagcccatggtggacgtgtcaatccttcagaggtccctggccatcctggagagcatggtcttgaacagccagagtctgtaccagaagatagccgaggaaatcaccgtgggacagctcatctcacacctccaggtctccaaccaggagattcagacctacgccattgcactgattaatgcactttttctgaaggctcctgaggacaaacgacaggatatggcaaatgcatttgcacagaagcatctccggtctataatcctgaatcatgtgatccgagggaaccgccccatcaaaactgagatggcccatcagctatatgtccttcaagtcctaacctttaaccttctggaagaaaggatgatgaccaagatggaccccaatgaccaggctcaaagggacatcatatttgaactgaggaggattgcatttgacgcagagtctgatcctagcaatgcccctgggagtgggaccgaaaaacgcaaagccatgtacacaaaggactacaaaatgctgggatttaccaaccacatcaatccagccatggactttacccagactcctcctggaatgctggccttggacaacatgctgtacttggctaaagtccaccaggacacctacatccggattgtcttggagaacagtagccgggaagacaaacatgaatgcccctttggccgcagtgccattgagctcaccaaaatgctctgtgaaatcctgcaggttggggaactaccaaatgaaggacgcaatgactaccacccgatgttctttacccatgaccgagcctttgaagagctctttggaatctgcatccagctgttgaacaagacctggaaggagatgagggcaacagcagaggacttcaacaaggttatgcaagtcgtccgagagcaaatcactcgagctttgccctccaaacccaactctttggatcagttcaagagcaaattgcgtagcctgagttactctgagattctacgactgcgccagtctgagaggatgagtcaggatgacttccagtccccgccaattgtggagctgagggagaagatccagcccgagatccttgagctgatcaagcagcagcgcctgaaccggctctgtgagggcagcagcttccgaaagattgggaaccgccgaaggcaagaacggttctggtactgccggttggcactgaaccacaaggtccttcactatggtgacttggatgacaacccacaaggggaggtgacatttgaatccctgcaggagaaaattcctgttgcagacattaaggccattgtcactgggaaagattgtccccacatgaaagagaaaagtgctctgaaacagaacaaggaggtgttggaattggccttctccatcctgtatgaccctgatgagaccttaaacttcatcgcacctaataaatatgagtactgcatctggattgatggcctcagtgcccttctggggaaggacatgtccagtgagctgaccaagagtgacctggacaccctgctgagcatggagatgaagctgcggctcctggacctggagaacatccagattcccgaagccccaccccccatccccaaggagcccagcagctatgactttgtctatcactatggctgagcctggagccagaaacgacggtacccaggagaagggattttgggcccaggagaaacacttacattctggtgccttgtcttttgcttgtacagaatctgtagtgattttggtggccagtaaatgccagccatttctcaaacccacctcggaccacccagagtttcctcttggtccctgtctactaagagtcatgaaggcagggtgctctgcccactccatcaccatgaagcctgggattgggccacgaggaacaaacagcagatgcccttgccttccagtccaagaaactgcttcttgaaatggatttaacaacagccactcaccttttcctcctgagcctgctctctgatcagctggatccccacgtgagcaacagctggcccaggaaaggctgcctgcagaggacaggtgtgttgggcgtgttgagagccttgaagtgactacctgtatcttagatctgagtacaagcctgaggcttttgcttttgtcttttttgatgagggctcactccagcttcatatggtgccaagacgttgctgcttctgaggttggctctaacatctctggtctttagagccaccagatctctctggcccatacagatatcagagcagacggaaatttctccctgcaagcgctcagtctcatcccagcaagtcaaagacctcctggccaagtcctgccctcttaagtctccaggaacgctgcagggaaaacccagctgaggcctgggcctagactgtggtgaggtcactagattctactgctcttcccccacattaataccttttccttcctcagagagaaatctcccctaacctgaattgcagccccctccagtttgctttcctttggccttccagaccccaggaagttggccttcccttcctagtgctatggtttctgccattggccatgatttcagggagctggctgaggccggctgaggccacacctgtgccagtggggcttccctggtgctgcagcacttgtaaaccacacacacagcctctctccctggacatacgttagcacattggcattcagtattggtggcctggcatggtaggtactacccaatgaagagtgtactatatattttcattactataggccatacttatacagacgtgtatatatatttatataagatctacctatcttaggatggaaccttggggaaaaataaaattgaggggaagtaaaaagtatgtaacacttccagttgtgagccaagattgtaaccagagagcagccaggagcttcctgtcagtaaccatgttttcaataaatactctttcatgtacaaa

SEQ ID NO: 6434 - DNA, 2158 bp, Homo sapiens
  source 1..2158: mol_type = unassigned DNA; mol_type = unassigned DNA
taccacccgatgttctttacccatgaccgagcctttgaagagctctttggaatctgcatccagctgttgaacaagacctggaaggagatgagggcaacagcagaggacttcaacaaggttatgcaagtcgtccgagagcaaatcactcgagctttgccctccaaacccaactctttggatcagttcaagagcaaattgcgtagcctgagttactctgagattctacgactgcgccagtctgagaggatgagtcaggatgacttccagtccccgccaattgtggagctgagggagaagatccagcccgagatccttgagctgatcaagcagcagcgcctgaaccggctctgtgagggcagcagcttccgaaagattgggaaccgccgaaggcaagaacggttctggtactgccggttggcactgaaccacaaggtccttcactatggtgacttggatgacaacccacaaggggaggtgacatttgaatccctgcaggagaaaaacattaaggccattgtcactgggaaagattgtccccacatgaaagagaaaagtgctctgaaacagaacaaggaggtgttggaattggccttctccatcctgtatgaccctgatgagaccttaaacttcatcgcacctaataaatatgagtactgcatctggattgatggcctcagtgcccttctggggaaggacatgtccagtgagctgaccaagagtgacctggacaccctgctgagcatggagatgaagctgcggctcctggacctggagaacatccagattcccgaagccccaccccccatccccaaggagcccagcagctatgactttgtctatcactatggctgagcctggagccagaaacgacggtacccaggagaagggattttgggcccaggagaaacacttacattctggtgccttgtcttttgcttgtacagaatctgtagtgattttggtggccagtaaatgccagccatttctcaaacccacctcggaccacccagagtttcctcttggtccctgtctactaagagtcatgaaggcagggtgctctgcccactccatcaccatgaagcctgggattgggccacgaggaacaaacagcagatgcccttgccttccagtccaagaaactgcttcttgaaatggatttaacaacagccactcaccttttcctcctgagcctgctctctgatcagctggatccccacgtgagcaacagctggcccaggaaaggctgcctgcagaggacaggtgtgttgggcgtgttgagagccttgaagtgactacctgtatcttagatctgagtacaagcctgaggcttttgcttttgtcttttttgatgagggctcactccagcttcatatggtgccaagacgttgctgcttctgaggttggctctaacatctctggtctttagagccaccagatctctctggcccatacagatatcagagcagacggaaatttctccctgcaagcgctcagtctcatcccagcaagtcaaagacctcctggccaagtcctgccctcttaagtctccaggaacgctgcagggaaaacccagctgaggcctgggcctagactgtggtgaggtcactagattctactgctcttcccccacattaataccttttccttcctcagagagaaatctcccctaacctgaattgcagccccctccagtttgctttcctttggccttccagaccccaggaagttggccttcccttcctagtgctatggtttctgccattggccatgatttcagggagctggctgaggccggctgaggccacacctgtgccagtggggcttccctggtgctgcagcacttgtaaaccacacacacagcctctctccctggacatacgttagcacattggcattcagtattggtggcctggcatggtaggtactacccaatgaagagtgtactatatattttcattactataggccatacttatacagacgtgtatatatatttatataagatctacctatcttaggatggaaccttggggaaaaataaaattgaggggaagtaaaaagtatgtaacacttccagttgtgagccaagattgtaaccagagagcagccaggagcttcctgtcagtaaccatgttttcaataaatactctttcatgta

SEQ ID NO: 6435 - DNA, 2157 bp, Homo sapiens
  source 1..2157: mol_type = unassigned DNA; mol_type = unassigned DNA
atgccaccaccgtcagacattgtcaaagtggccattgagtggccaggtgctaacgcccagctccttgaaatcgaccagaaacggcccctggcatccattatcaaggaagtttgtgatgggtggtcgttgccaaacccagagtattataccctccgttatgcagatggtcctcagctgtacatcaccgaacagactcgcagtgacattaagaatgggacaatcttacaactggctatctccccgtcccgggctgcacgccagctgatggagaggacccagtcatccaacatggagacccggctggatgccatgaaggagctggccaagctctctgccgacgtgactttcgctactgagttcatcaacatggatggcatcattgtgctgacaaggctcgtggaaagtggaaccaagctcttgtcccatgagatgctggcattcaccctgactgccttcctagagctcatggaccatggcattgtctcctgggacatggtttcaatcacctttattaagcagattgcagggtatgtgagccagcccatggtggacgtgtcaatccttcagaggtccctggccatcctggagagcatggtcttgaacagccagagtctgtaccagaagatagccgaggaaatcaccgtgggacagctcatctcacacctccaggtctccaaccaggagattcagacctacgccattgcactgattaatgcactttttctgaaggctcctgaggacaaacgacaggatatggcaaatgcatttgcacagaagcatctccggtctataatcctgaatcatgtgatccgagggaaccgccccatcaaaactgagatggcccatcagctatatgtccttcaagtcctaacctttaaccttctggaagaaaggatgatgaccaagatggaccccaatgaccaggctcaaagggacatcatatttgaactgaggaggattgcatttgacgcagagtctgatcctagcaatgcccctgggagtgggaccgaaaaacgcaaagccatgtacacaaaggactacaaaatgctgggatttaccaaccacatcaatccagccatggactttacccagactcctcctggaatgctggccttggacaacatgctgtacttggctaaagtccaccaggacacctacatccggattgtcttggagaacagtagccgggaagacaaacatgaatgcccctttggccgcagtgccattgagctcaccaaaatgctctgtgaaatcctgcaggttggggaactaccaaatgaaggacgcaatgactaccacccgatgttctttacccatgaccgagcctttgaagagctctttggaatctgcatccagctgttgaacaagacctggaaggagatgagggcaacagcagaggacttcaacaaggttatgcaagtcgtccgagagcaaatcactcgagctttgccctccaaacccaactctttggatcagttcaagagcaaattgcgtagcctgagttactctgagattctacgactgcgccagtctgagaggatgagtcaggatgacttccagtccccgccaattgtggagctgagggagaagatccagcccgagatccttgagctgatcaagcagcagcgcctgaaccggctctgtgagggcagcagcttccgaaagattgggaaccgccgaaggcaagaacggttctggtactgccggttggcactgaaccacaaggtccttcactatggtgacttggatgacaacccacaaggggaggtgacatttgaatccctgcaggagaaaattcctgttgcagacattaaggccattgtcactgggaaagattgtccccacatgaaagagaaaagtgctctgaaacagaacaaggaggtgttggaattggccttctccatcctgtatgaccctgatgagaccttaaacttcatcgcacctaataaatatgagtactgcatctggattgatggcctcagtgcccttctggggaaggacatgtccagtgagctgaccaagagtgacctggacaccctgctgagcatggagatgaagctgcggctcctggacctggagaacatccagattcccgaagccccaccccccatccccaaggagcccagcagctatgactttgtctatcactatggctga

SEQ ID NO: 6436 - DNA, 553 bp, Homo sapiens
  source 1..553: mol_type = unassigned DNA; mol_type = unassigned DNA
ccatgaccgagcctttgaagagctctttggaatctgcatccagctgttgaacaagacctggaaggagatgagggcaacagcagaggacttcaacaaggttatgcaagtcgtccgagagcaaatcactcgagctttgccctccaaacccaactctttggatcagttcaagagcaaattgcgtagcctgagttactctgagattctacgactgcgccagtctgagaggatgagtcaggatgacttccagtccccgccaattgtggagctgagggagaagatccagcccgagatccttgagctgatcaagcagcagcgcctgaaccggctctgtgagggcagcagcttccgaaagattgggaaccgccgaaggcaagaacggttctggtactgccggttggcactgaaccacaaggtccttcactatggtgacttggatgacaacccacaaggggaggtgacatttgaatccctgcaggagaaaaacattaaggccattgtcactgggaaagattgtccccacatgaaagagaaaagtgctctgaaacagaacaag

SEQ ID NO: 6437 - DNA, 1344 bp, Homo sapiens
  source 1..1344: mol_type = unassigned DNA; mol_type = unassigned DNA
gaggaaatcaccgtgggacagctcatctcacacctccaggtctccaaccaggagattcagacctacgccattgcactgattaatgcactttttctgaaggctcctgaggacaaacgacaggatatggcaaatgcatttgcacagaagcatctccggtctataatcctgaatcatgtgatccgagggaaccgccccatcaaaactgagatggcccatcagctatatgtccttcaagtcctaacctttaaccttctggaagaaaggatgatgaccaagatggaccccaatgaccaggctcaaagggacatcatatttgaactgaggaggattgcatttgacgcagagtctgatcctagcaatgcccctgggagtgggaccgaaaaacgcaaagccatgtacacaaaggactacaaaatgctgggatttaccaaccacatcaatccagccatggactttacccagactcctcctggaatgctggccttggacaacatgctgtacttggctaaagtccaccaggacacctacatccggattgtcttggagaacagtagccgggaagacaaacatgaatgcccctttggccgcagtgccattgagctcaccaaaatgctctgtgaaatcctgcaggttggggaactaccaaatgaaggacgcaatgactaccacccgatgttctttacccatgaccgagcctttgaagagctctttggaatctgcatccagctgttgaacaagacctggaaggagatgagggcaacagcagaggacttcaacaaggtcagtgtctccgggctgctctgaggcccacgggaggagaccatcacacgacagcctttgacagctggctggcacctggagaatccctgagctggaaaagcagcttggtctgcagaactgagtcacaagactgaggcactggggagcctcagccccatctggttgttgctccctctgtgaccttgagcttgtcttccacttggtgccgtaggccctcatttgtccattgaagttagcacctgtccctcccgtcctccagagaggtcaggaggataagcattagaagactcactgtggtttattgagtgcttactgtgcaggtactgctgtagttttgtgaactgggaaggttaggagagaagagtggactggcatgatgtgcacaccctgggtacttaatcgatagttatccctcggtgctttcagtcctcactctatgcagagcactgttgtgccaggccctcaaaagctgatcatctaggggtcgagtgttttgaagttgatcatctcatcataaaaaatttggaaagtataaagaataaaaagttacctgtatttacacca

SEQ ID NO: 6438 - DNA, 938 bp, Homo sapiens
  source 1..938: mol_type = unassigned DNA; mol_type = unassigned DNA
gaggaaatcaccgtgggacagctcatctcacacctccaggtctccaaccaggagattcagacctacgccattgcactgattaatgcactttttctgaaggctcctgaggacaaacgacaggatatggcaaatgcatttgcacagaagcatctccggtctataatcctgaatcatgtgatccgagggaaccgccccatcaaaactgagatggcccatcagctatatgtccttcaagtcctaacctttaaccttctggaagaaaggatgatgaccaagatggaccccaatgaccaggctcaaagggacatcatatttgaactgaggaggattgcatttgacgcagagtctgatcctagcaatgcccctgggagtgggaccgaaaaacgcaaagccatgtacacaaaggactacaaaatgctgggatttaccaaccacatcaatccagccatggactttacccagactcctcctggaatgctggccttggacaacatgctgtacttggctaaagtccaccaggacacctacatccggattgtcttggagaacagtagccgggaagacaaacatgaatgcccctttggccgcagtgccattgagctcaccaaaatgctctgtgaaatcctgcaggttggggaactaccaaatgaaggacgcaatgactaccacccgatgttctttacccatgaccgagcctttgaagagctctttggaatctgcatccagctgttgaacaagacctggaaggagatgagggcaacagcagaggacttcaacaaggtcagtgtctccgggctgctctgaggcccacgggaggagaccatcacacgacagcctttgacagctggctggcacctggagaatccctgagctggaaaagcagcttggtctgcagaactgagtcacaagactgaggcactggggagcctcagccccat

SEQ ID NO: 6439 - DNA, 717 bp, Homo sapiens
  source 1..717: mol_type = unassigned DNA; mol_type = unassigned DNA
gctgtagccgctagccacggtgactactaagcacttaaaatgtggctggtgcaactaaggaaccaaattttcaacttaaatttgttttaactgatttaaatgcaaatagctgcatatggctagtggctgctatactggacagcacagccctagagacagagctactgagtagggaaattgaaggacatagtggtggtacatgtggaaaatggaggagagcctcatttgggcaagaaagaaccaagagggacaggattcataatgcatgtgatccgagggaaccgccccatcaaaactgagatggcccatcagctatatgtccttcaagtcctaacctttaaccttctggaagaaaggatgatgaccaagatggaccccaatgaccaggctcaaagggacatcatatttgaactgaggaggattgcatttgacgcagagtctgatcctagcaatgcccctgggagtgggaccgaaaaacgcaaagccatgtacacaaaggactacaaaatgctgggatttaccaaccacatcaatccagccatggactttacccagactcctcctggaatgctggccttggacaacatgctgtacttggctaaagtccaccaggacacctacatccggattgtcttggagaacagtagccgggaagacaaacatgaatgcccctttggccgcagtgccattgagctcaccaaaatgctctgtgaaatc

SEQ ID NO: 6440 - DNA, 1250 bp, Homo sapiens
  source 1..1250: mol_type = unassigned DNA; mol_type = unassigned DNA
agccgccgagcggagacccgggagcaggagctgggcctaggtctgcgccctggagggaggtgtagaaagaggtacatggagaacaagtttgtcaatccgtctgaacttcagttgccttacctgtaaggcagccgtgtctgtgtttttgtctcgcagaattagagcccattgggaacgatgccaccaccgtcagacattgtcaaagtggccattgagtggccaggtgctaacgcccagctccttgaaatcgaccagaaacggcccctggcatccattatcaaggaagtttgtgatgggtggtcgttgccaaacccagagtattataccctccgttatgcagatggtcctcagctgtacatcaccgaacagactcgcagtgacattaagaatgggacaatcttacaactggctatctccccgtcccgggctgcacgccagctgatggagaggacccagtcatccaacatggagacccggctggatgccatgaaggagctggccaagctctctgccgacgtgactttcgctactgagttcatcaacatggatggcatcattgtgctgacaaggctcgtggaaagtggaaccaagctcttgtcccaattgcagggtatgtgagccagcccatggtggacgtgtcaatccttcagaggtccctggccatcctggagagcatggtcttgaacagccagagtctgtaccagaagatagccgaggaaatcaccgtgggacagctcatctcacacctccaggtctccaaccaggagattcagacctacgccattgcactgattaatgcactttttctgaaggctcctgaggacaaacgacaggatatggcaaatgcatttgcacagaagcatctccggtctataatcctgaatcatgtgatccgagggaaccgccccatcaaaactgagatggcccatcagctatatgtccttcaagtcctaacctttaaccttctggaagaaaggatgatgaccaagatggaccccaatgaccaggctcaaagggacatcatatttgaactgaggaggattgcatttgacgcagagtctgatcctagcaatgcccctgggagtgggaccgaaaaacgcaaagccatgtacacaaaggactacaaaatgctgggatttaccaaccacatcaatccagccatggactttacccagactcctcctggaatgctggccttggacaacatgctgtacttggctaaagtccaccaggacacctacatccggatt

SEQ ID NO: 6441 - DNA, 1168 bp, Homo sapiens
  source 1..1168: mol_type = unassigned DNA; mol_type = unassigned DNA
ggaggagccgccgagcggagacccgggagcaggagctgggcctaggtctgcgccctggagggaggtgtagaaagaggtacatggagaacaagtttgtcaatccgtctgaacttcagttgccttacctgtaagaattagagcccattgggaacgatgccaccaccgtcagacattgtcaaagtggccattgagtggccaggtgctaacgcccagctccttgaaatcgaccagaaacggcccctggcatccattatcaaggaagtttgtgatgggtggtcgttgccaaacccagagtattataccctccgttatgcagatggtcctcagctgtacatcaccgaacagactcgcagtgacattaagaatgggacaatcttacaactggctatctccccgtcccgggctgcacgccagctgatggagaggacccagtcatccaacatggagacccggctggatgccatgaaggagctggccaagctctctgccgacgtgactttcgctactgagttcatcaacatggatggcatcattgtgctgacaaggctcgtggaaagtggaaccaagctcttgtcccactacagtgagatgctggcattcaccctgactgccttcctagagctcatggaccatggcattgtctcctgggacatggtttcaatcacctttattaagcagattgcagggtatgtgagccagcccatggtggacgtgtcaatccttcagaggtccctggccatcctggagagcatggtcttgaacagccagagtctgtaccagaagatagccgaggaaatcaccgtgggacagctcatctcacacctccaggtctccaaccaggagattcagacctacgccattgcactgattaatgcactttttctgaaggctcctgaggacaaacgacaggatatggcaaatgcatttgcacagaagcatctccggtctataatcctgaatcatgtgatccgagggaaccgccccatcaaaactgagatggcccatcagctatatgtccttcaagtcctaacctttaaccttctggaagaaaggatgatgaccaagatggaccccaatgaccaggctcaaagggacatcatatttgaactgaggaggattgcatttgacgcagagtctgatcctagcaatgcccctgggagtgggaccg

SEQ ID NO: 6442 - DNA, 506 bp, Homo sapiens
  source 1..506: mol_type = unassigned DNA; mol_type = unassigned DNA
cgaggaaatcaccgtgggacagctcatctcacacctccaggtctccaaccaggagattcagacctacgccattgcactgattaatgcactttttctgaaggctcctgaggacaaacgacaggatatggcaaatgcatttgcacagaagcatctccggtctataatcctgaatgtgagttcctggaacatgctgtattttattactattaacaacaattattactgttattgttaatatattattattgaaattattaatgagtgaggaggacacacagaggaaccttatcaataggtaaatacctcttgaactgaatagctttttcccgcgatcctctgtgagcagagttgcctctaggcagccatctcaccagcaattgcagtgcgtccagggagggaccaaggccagctctactgtttgttgccctgcaactccagaatttttatccagagggaatatgttaaaataggcacaaagggggaaaataactcatccaactgacact

SEQ ID NO: 6443 - DNA, 874 bp, Homo sapiens
  source 1..874: mol_type = unassigned DNA; mol_type = unassigned DNA
gggcggaggctggaggagccgccgagcggagacccgggagcaggagctgggcctaggtctgcgccctggcagccgtgtctgtgtttttgtctcgcagaattagagcccattgggaacgatgccaccaccgtcagacattgtcaaagtggccattgagtggccaggtgctaacgcccagctccttgaaatcgaccagaaacggcccctggcatccattatcaaggaagtttgtgatgggtggtcgttgccaaacccagagtattataccctccgttatgcagatggtcctcagctgtacatcaccgaacagactcgcagtgacattaagaatgggacaatcttacaactggctatctccccgtcccgggctgcacgccagctgatggagaggacccagtcatccaacatggagacccggctggatgccatgaaggagctggccaagctctctgccgacgtgactttcgctactgagttcatcaacatggatggcatcattgtgctgacaaggctcgtggaaagtggaaccaagctcttgtcccactacagtgagatgctggcattcaccctgactgccttcctagagctcatggaccatggcattgtctcctgggacatggtttcaatcacctttattaagcagattgcagggtatgtgagccagcccatggtggacgtgtcaatccttcagaggtccctggccatcctggagagcatggtcttgaacagccagagtctgtaccagaagatagccgaggaaatcaccgtgggacagctcatctcacacctccaggtctccaaccaggagattcagacctacgccattgcactgattaatgcactttttctgaaggctcctgaggacaaacgacag

SEQ ID NO: 6444 - DNA, 749 bp, Homo sapiens
  source 1..749: mol_type = unassigned DNA; mol_type = unassigned DNA
gggcggaggctggaggagccgccgagcggagacccgggagcaggagctgggcctaggtctgcgccctggcagccgtgtctgtgtttttgtctcgcagaattagagcccattgggaacgatgccaccaccgtcagacattgtcaaagtggccattgagtggccaggtgctaacgcccagctccttgaaatcgaccagaaacggcccctggcatccattatcaaggaagtttgtgatggactcgcagtgacattaagaatgggacaatcttacaactggctatctccccgtcccgggctgcacgccagctgatggagaggacccagtcatccaacatggagacccggctggatgccatgaaggagctggccaagctctctgccgacgtgactttcgctactgagttcatcaacatggatggcatcattgtgctgacaaggctcgtggaaagtggaaccaagctcttgtcccactacagtgagatgctggcattcaccctgactgccttcctagagctcatggaccatggcattgtctcctgggacatggtttcaatcacctttattaagcagattgcagggtatgtgagccagcccatggtggacgtgtcaatccttcagaggtccctggccatcctggagagcatggtcttgaacagccagagtctgtaccagaagatagccgaggaaatcaccgtgggacagctcatctcacacctccaggtctccaaccaggagattcagacctacgc

SEQ ID NO: 6445 - DNA, 777 bp, Homo sapiens
  source 1..777: mol_type = unassigned DNA; mol_type = unassigned DNA
aggcggggcgggcggaggctggaggagccgccgagcggagacccgggagcaggagctgggcctaggtctgcgccctggagggaggtgtagaaagaggtacatggagaacaagtttgtcaatccgtctgaacttcagttgccttacctgtaagaattagagcccattgggaacgatgccaccaccgtcagacattgtcaaagtggccattgagtggccaggtgctaacgcccagctccttgaaatcgaccagaaacggcccctggcatccattatcaaggaagtttgtgatggactcgcagtgacattaagaatgggacaatcttacaactggctatctccccgtcccgggctgcacgccagctgatggagaggacccagtcatccaacatggagacccggctggatgccatgaaggagctggccaagctctctgccgacgtgactttcgctactgagttcatcaacatggatggcatcattgtgctgacaaggctcgtggaaagtggaaccaagctcttgtcccactacagtgagatgctggcattcaccctgactgccttcctagagctcatggaccatggcattgtctcctgggacatggtttcaatcacctttattaagcagattgcagggtatgtgagccagcccatggtggacgtgtcaatccttcagaggtccctggccatcctggagagcatggtcttgaacagccagagtctgtaccagaagatagccgaggaaatcaccgtgggacagctcatctcacacctccaggt

SEQ ID NO: 6446 - DNA, 653 bp, Homo sapiens
  source 1..653: mol_type = unassigned DNA; mol_type = unassigned DNA
acgtacatccatcatggcctcatacatgagaggcatggtgaccaagaagggctcagatcgcttaggaatgaaggttggggtcacaccatcaggagggaggtgtagaaagaggtacatggagaacaagtttgtcaatccgtctgaacttcagttgccttacctgtaaggcagccgtgtctgtgtttttgtctcgcagaattagagcccattgggaacgatgccaccaccgtcagacattgtcaaagtggccattgagtggccaggtgctaacgcccagctccttgaaatcgaccagaaacggcccctggcatccattatcaaggaagtttgtgatgggtggtcgttgccaaacccagagtattataccctccgttatgcagatggtcctcagctgtacatcaccgaacagactcgcagtgacattaagaatgggacaatcttacaactggctatctccccgtcccgggctgcacgccagctgatggagaggacccagtcatccaacatggagacccggctggatgccatgaaggagctggccaagctctctgccgacgtgactttcgctactgagttcatcaacatggatggcatcattgtgctgacaaggctcgtggaaagtggaaccaagctcttgtcccactacagtgaga

SEQ ID NO: 6447 - DNA, 498 bp, Homo sapiens
  source 1..498: mol_type = unassigned DNA; mol_type = unassigned DNA
ggtgctaacgcccagctccttgaaatcgaccagaaacggcccctggcatccattatcaaggaagtttgtgatgggtggtcgttgccaaacccagagtattataccctccgttatgcagatggtcctcagctgtacatcaccgaacagactcgcagtgacattaagaatgggacaatcttacaactggctatctccccgtcccgggctgcacgccagctgatggagaggacccagtcatccaacatggagacccggctggatgccatgaaggagctggccaagctctctgccgacgtgactttcgctactgagttcatcaacatggatggcatcattgtgctgacaaggctcgtggaaagtggaaccaagctcttgtcccaatacctgggctgaatctgctctacactggctaggtgtgcacacaggcacttacagttacagttgcatcgactgatttcccatggggtgttcacattaaaattcatcttttttgtggct

SEQ ID NO: 6448 - DNA, 3574 bp, Homo sapiens
  source 1..3574: mol_type = unassigned DNA; mol_type = unassigned DNA
tcccaagaaggcggggcgggcggaggctggaggagccgccgagcggagacccgggagcaggagctgggcctaggtctgcgccctgaattagagcccattgggaacgatgccaccaccgtcagacattgtcaaagtggccattgagtggccaggtgctaacgcccagctccttgaaatcgaccagaaacggcccctggcatccattatcaaggaagtttgtgatgggtggtcgttgccaaacccagagtattataccctccgttatgcagatggtcctcagctgtacatcaccgaacagactcgcagtgacattaagaatgggacaatcttacaactggctatctccccgtcccgggctgcacgccagctgatggagaggacccagtcatccaacatggagacccggctggatgccatgaaggagctggccaagctctctgccgacgtgactttcgctactgagttcatcaacatggatggcatcattgtgctgacaaggctcgtggaaagtggaaccaagctcttgtcccactacagtgagatgctggcattcaccctgactgccttcctagagctcatggaccatggcattgtctcctgggacatggtttcaatcacctttattaagcagattgcagggtatgtgagccagcccatggtggacgtgtcaatccttcagaggtccctggccatcctggagagcatggtcttgaacagccagagtctgtaccagaagatagccgaggaaatcaccgtgggacagctcatctcacacctccaggtctccaaccaggagattcagacctacgccattgcactgattaatgcactttttctgaaggctcctgaggacaaacgacaggatatggcaaatgcatttgcacagaagcatctccggtctataatcctgaatcatgtgatccgagggaaccgccccatcaaaactgagatggcccatcagctatatgtccttcaagtcctaacctttaaccttctggaagaaaggatgatgaccaagatggaccccaatgaccaggctcaaagggacatcatatttgaactgaggaggattgcatttgacgcagagtctgatcctagcaatgcccctgggagtgggaccgaaaaacgcaaagccatgtacacaaaggactacaaaatgctgggatttaccaaccacatcaatccagccatggactttacccagactcctcctggaatgctggccttggacaacatgctgtacttggctaaagtccaccaggacacctacatccggattgtcttggagaacagtagccgggaagacaaacatgaatgcccctttggccgcagtgccattgagctcaccaaaatgctctgtgaaatcctgcaggttggggaactaccaaatgaaggacgcaatgactaccacccgatgttctttacccatgaccgagcctttgaagagctctttggaatctgcatccagctgttgaacaagacctggaaggagatgagggcaacagcagaggacttcaacaaggttatgcaagtcgtccgagagcaaatcactcgagctttgccctccaaacccaactctttggatcagttcaagagcaaattgcgtagcctgagttactctgagattctacgactgcgccagtctgagaggatgagtcaggatgacttccagtccccgccaattgtggagctgagggagaagatccagcccgagatccttgagctgatcaagcagcagcgcctgaaccggctctgtgagggcagcagcttccgaaagattgggaaccgccgaaggcaagaacggttctggtactgccggttggcactgaaccacaaggtccttcactatggtgacttggatgacaacccacaaggggaggtgacatttgaatccctgcaggagaaaattcctgttgcagacattaaggccattgtcactgggaaagattgtccccacatgaaagagaaaagtgctctgaaacagaacaaggaggtgttggaattggccttctccatcctgtatgaccctgatgagaccttaaacttcatcgcacctaataaatatgagtactgcatctggattgatggcctcagtgcccttctggggaaggacatgtccagtgagctgaccaagagtgacctggacaccctgctgagcatggagatgaagctgcggctcctggacctggagaacatccagattcccgaagccccaccccccatccccaaggagcccagcagctatgactttgtctatcactatggctgagcctggagccagaaacgacggtacccaggagaagggattttgggcccaggagaaacacttacattctggtgccttgtcttttgcttgtacagaatctgtagtgattttggtggccagtaaatgccagccatttctcaaacccacctcggaccacccagagtttcctcttggtccctgtctactaagagtcatgaaggcagggtgctctgcccactccatcaccatgaagcctgggattgggccacgaggaacaaacagcagatgcccttgccttccagtccaagaaactgcttcttgaaatggatttaacaacagccactcaccttttcctcctgagcctgctctctgatcagctggatccccacgtgagcaacagctggcccaggaaaggctgcctgcagaggacaggtgtgttgggcgtgttgagagccttgaagtgactacctgtatcttagatctgagtacaagcctgaggcttttgcttttgtcttttttgatgagggctcactccagcttcatatggtgccaagacgttgctgcttctgaggttggctctaacatctctggtctttagagccaccagatctctctggcccatacagatatcagagcagacggaaatttctccctgcaagcgctcagtctcatcccagcaagtcaaagacctcctggccaagtcctgccctcttaagtctccaggaacgctgcagggaaaacccagctgaggcctgggcctagactgtggtgaggtcactagattctactgctcttcccccacattaataccttttccttcctcagagagaaatctcccctaacctgaattgcagccccctccagtttgctttcctttggccttccagaccccaggaagttggccttcccttcctagtgctatggtttctgccattggccatgatttcagggagctggctgaggccggctgaggccacacctgtgccagtggggcttccctggtgctgcagcacttgtaaaccacacacacagcctctctccctggacatacgttagcacattggcattcagtattggtggcctggcatggtaggtactacccaatgaagagtgtactatatattttcattactataggccatacttatacagacgtgtatatatatttatataagatctacctatcttaggatggaaccttggggaaaaataaaattgaggggaagtaaaaagtatgtaacacttccagttgtgagccaagattgtaaccagagagcagccaggagcttcctgtcagtaaccatgttttcaataaatactctttcatgt

SEQ ID NO: 6449 - DNA, 1832 bp, Homo sapiens
  source 1..1832: mol_type = unassigned DNA; mol_type = unassigned DNA
agccgcccgcttcgtgctcccagggaagcctctgcacgccctcccccgctgctctcggtcgcctcctcgccgccagccgccccgggtgcatcccggcttgctccgctccacgcgacccagattcctgccccgcccccgccccttccgcgcccgcagccagtgcggcagccgcggccgcccctgtccagcctcggcgcccgggaccgagcgcgtcgctcgccgccgcggagcgcgtagccggagcgcctggggaaggcggagatgaagaccacgccgccgcgcgccgggagctgctgagcctaccgccgccagagtccagttgacacttactttgacaaaggcaaatttggaagcaattacttgaggacagttcatatagcatctggacagtcaacacgggcaccatgaagcacttcctgaggatttcttcaagcaagaattaactttcattagcacattcattgaaactgttcaaaataagccacttttctcttactgttccaaaagaagacgtcagagtcacaaatttaggatgatggcatagtgttgcattacagaatgttgatccaggtatgcctgtatttttactgtaaatttctgtggcgctgcctgaaatttgtaatgaggaagctaactggaagatgtgaactacaacggatctgttataataccaagccgggagcttctagaaccatgaaaatcgaaacatcactgagggattctaaaagtaagctgttgcagacttctgtgagtgttcaccccgacgctattgaaaaaactatagaagatatcatggaactgaaaaaaattaatcctgacgtaaatccacagctgggaatctctcttcaggcttgccttctgcaaatcgttgggtacaggaaccttattgcagatgtggaaaaactgcgtagagaggcctatgattctgataatccccaacatgaagaaatgcttttgaagttatggaaattcttgaagcccaatactccactggaatctcggatttctaagcagtggtgtgaaattggtttccaaggtgatgatcctaaaacagactttcgaggaatgggacttctgggactgtacaatttgcagtatttcgcggaaagggatgccacagcagctcagcaggtcctgtctgactctcttcatccgaaatgcagggatatcactaaagaagaaataagcaaattcagcaaagcagaatgggagaagaaaaggatggataaggcaattgggtactcatttgcaattgtgggcatcaatataactgacctggcatataatctactggtcagcggagctctaaaaacccatttctacaatatcgccccagaagctccaacattgtctcactttcagcaaacattctgctatttgatgcatgaatttcataagttttggatcgaagaggaccccatggacataatggaatttaatcgtgtgagggagaaattccgcaagaggatcatcaaacagctgcagaacccagacatggcgctgtgcccacattttgctgcctcggaaggtttaatcaacatgtagttgcccacgccggttttaatggataccctggaacactgcctcattgtcttgttagatctctgcttaggtcgcagctcacgcattgaatgcacacagtgattgtatgcatgccttttggtacagtgttttcatctcttggtcataattccgagatccccagagaccactgtttctggagtatctgtcatccagtgactgctcatattgtggcattatgcagtgttacatcttgccttgatacccaggtatggagagagttttctatttttttagactttttttcctct

SEQ ID NO: 6450 - DNA, 2852 bp, Homo sapiens
  source 1..2852: mol_type = unassigned DNA; mol_type = unassigned DNA
cccttccgcgcccgcagccagtgcggcagccgcggccgcccctgtccagcctcggcgcccgggaccgagcgcgtcgctcgccgccgcggagcgcgtagccggagcgcctggggaaggcggagatgaagaccacgccgccgcgcgccgggagctgctgagcctaccgccgccagagtccagttgacacttactttgacaaaggcaaatttggaagcaattacttgaggacagttcatatagcatctggacagtcaacacgggcaccatgaagcacttcctgagaatgttgatccaggtatgcctgtatttttactgtaaatttctgtggcgctgcctgaaatttgtaatgaggaagctaactggaagatgtgaactacaacggatctgttataataccaagccgggagcttctagaaccatgaaaatcgaaacatcactgagggattctaaaagtaagctgttgcagacttctgtgagtgttcaccccgacgctattgaaaaaactatagaagatatcatggaactgaaaaaaattaatcctgacgtaaatccacagctgggaatctctcttcaggcttgccttctgcaaatcgttgggtacaggaaccttattgcagatgtggaaaaactgcgtagagaggcctatgattctgataatccccaacatgaagaaatgcttttgaagttatggaaattcttgaagcccaatactccactggaatctcggatttctaagcagtggtgtgaaattggtttccaaggtgatgatcctaaaacagactttcgaggaatgggacttctgggactgtacaatttgcagtatttcgcggaaagggatgccacagcagctcagcaggtcctgtctgactctcttcatccgaaatgcagggatatcactaaagaagaaataagcaaattcagcaaagcagaatgggagaagaaaaggatggataaggcaattgggtactcatttgcaattgtgggcatcaatataactgacctggcatataatctactggtcagcggagctctaaaaacccatttctacaatatcgccccagaagctccaacattgtctcactttcagcaaacattctgctatttgatgcatgaatttcataagttttggatcgaagaggaccccatggacataatggaatttaatcgtgtgagggagaaattccgcaagaggatcatcaaacagctgcagaacccagacatggcgctgtgcccacattttgctgcctcggaaggtttaatcaacatgtagttgcccacgccggttttaatggataccctggaacactgcctcattgtcttgttagatctctgcttaggtcgcagctcacgcattgaatgcacacagtgattgtatgcatgccttttggtacagtgttttcatctcttggtcataattccgagatccccagagaccactgtttctggagtatctgtcatccagtgactgctcatattgtggcattatgcagtgttacatcttgccttgatacccaggtatggagagagttttctatttttttagactttttttcctctccctcataattcagcattaaagaattgtatttctctagctgtattttgtatgtaagaggtttagctgaatctcattctgtgaaagccttttaatttattgaaatgtttcatgactactgctgctagctcttcaagccaggttcatgcttggacctcattctgataaagtataagactttaaaataatacaaaacagggccgggcgcagtggctcacacctgtaatcccagcactttggggagctgaggcgggcggatcacgaggtcaagagatcgagaccatcctggccaacatggtgaaaccccgtctctactaaaaataacaaaaattagctgggcgtggtggtgggtgcctgtaatcccagctactcgggaggctgaggcaggagaatcgcttgaacccgggaggtggaggttacagtgagccgagatcataccactgcactccagcctggcgacagagcaagactccatctcaaaaataaataaataaataaataaataaataaataaataaataaataaataaataaaatagtacagacagacacatgataagccaaactgttcctgcaaacatagctatgcttcatgaggcttacaagaagtaactttaggtaggagctgtttttgtttgaagtactgcaaaattatattgtaacttcccctcaccccagttgcaattgtgtcatagtcatctgtatatcaaactattttattcccataacttcattggcttggatgcctaagtgtatgatgcttgaagcctcagaaaagaaataagcatatttcaaaagctgcaaaaggtttttcactgcctgcctcttgcggaactgggttacaccctggcactgttctgatccaagcatatttgcttggggaactaagtgctgactagtttgttttctatgtcaaggggcaatattaaaaaacaatttgcaagaaaatgtgtttcaagagagcaacctaagctaagtcactctgcgatatttcttgaaaataacgaccttgtcttgtatcagtggaagaagtaagttgcttagaaagggaaaagtcaaattgttccagaactgctaaaaatcattttaaaaaccatgatttagtttggaattatgattgtagtctgttgaatagtatttaccatggcatttcatacccatggtattttataccttctgactatcaattttagtattattagatgtttgtgtaaccacttgcttatttaaatgaattttgagtactgcctaattgtcagttatatgaataaattacatgtcattctactgtaacgta

SEQ ID NO: 6451 - DNA, 1990 bp, Homo sapiens
  source 1..1990: mol_type = unassigned DNA; mol_type = unassigned DNA
agtgcggcagccgcggccgcccctgtccagcctcggcgcccgggaccgagcgcgtcgctcgccgccgcggagcgcgtagccggagcgcctggggaaggcggagatgaagaccacgccgccgcgcgccgggagctgctgagcctaccgccgccagagtccagttgacacttactttgacaaaggcaaatttggaagcaattacttgaggacagttcatatagcatctggacagtcaacacgggcaccatgaagcacttcctgagaatgttgatccaggtatgcctgtatttttactgtaaatttctgtggcgctgcctgaaatttgtaatgaggaagctaactggaagatgtgaactacaacggatctgttataataccaagccgggagcttctagaaccatgaaaatcgaaacatcactgagggattctaaaagtaagctgttgcagacttctgtgagtgttcaccccgacgctattgaaaaaactatagaagatatcatggaactgaaaaaaattaatcctgacgtaaatccacagctgggaatctctcttcaggcttgccttctgcaaatcgttgggtacaggaaccttattgcagatgtggaaaaactgcgtagagaggcctatgattctgataatccccaacatgaagaaatgcttttgaagttatggaaattcttgaagcccaatactccactggaatctcggatttctaagcagtggtgtgaaattggtttccaaggtgatgatcctaaaacagactttcgaggaatgggacttctgggactgtacaatttgcagtatttcgcggaaagggatgccacagcagctcagcaggtcctgtctgactctcttcatccgaaatgcagcaaattcagcaaagcagaatgggagaagaaaaggatggataaggcaattgggtactcatttgcaattgtgggcatcaatataactgacctggcatataatctactggtcagcggagctctaaaaacccatttctacaatatcgccccagaagctccaacattgtctcactttcagcaaacattctgctatttgatgcatgaatttcataagttttggatcgaagaggaccccatggacataatggaatttaatcgtgtgagggagaaattccgcaagaggatcatcaaacagctgcagaacccagacatggcgctgtgcccacattttgctgcctcggaaggtttaatcaacatgtagttgcccacgccggttttaatggataccctggaacactgcctcattgtcttgttagatctctgcttaggtcgcagctcacgcattgaatgcacacagtgattgtatgcatgccttttggtacagtgttttcatctcttggtcataattccgagatccccagagaccactgtttctggagtatctgtcatccagtgactgctcatattgtggcattatgcagtgttacatcttgccttgatacccaggtatggagagagttttctatttttttagactttttttcctctccctcataattcagcattaaagaattgtatttctctagctgtattttgtatgtaagaggtttagctgaatctcattctgtgaaagccttttaatttattgaaatgtttcatgactactgctgctagctcttcaagccaggttcatgcttggacctcattctgataaagtataagactttaaaataatacaaaacagggccgggcgcagtggctcacacctgtaatcccagcactttggggagctgaggcgggcggatcacgaggtcaagagatcgagaccatcctggccaacatggtgaaaccccgtctctactaaaaataacaaaaattagctgggcgtggtggtgggtgcctgtaatcccagctactcgggaggctgaggcaggagaatcgcttgaacccgggaggtggaggttacagtgagccgagatcataccactgcactccagcctggcgacagagcaagactccatctc

SEQ ID NO: 6452 - DNA, 692 bp, Homo sapiens
  source 1..692: mol_type = unassigned DNA; mol_type = unassigned DNA
ccagttgacacttactttgacaaaggcaaatttggaagcaattacttgaggacagttcatatagcatctggacagtcaacacgggcaccatgaagcacttcctgaggcaatctcctgtaggtgaccttcccagagcctgcccattgccctcaagctgttgtccgagatcctctgggagctggatcacgtacatcccagctctcccgccccttggctttccctcagcttttcagggccaactctttggccacttcactgtttgttaagctcttcccgcagagcatgagcaatatacccgaaagccacgggcactcaataaatgttagtttgaatttcattcatttactcattggaattttcacttttgtactgaagtgaggaaagcacgctgattttccaggctgttctgtctgtctctgtgggatggtggagctggctttcctgtccaacctgagaggaacgtactgtctctctctcctctgcctctccaacaccctgggtgttttgcttttatagaattgtcacactgtttttcaactttctgtttttactgtccttttccttgctagactacaagctccttgtggacagggaggtcatatggcttgctgtgaaaataagttcttgactcatgttcactttttccactgccatatctcccactctcatttcttctgtactgcacggtcagt

SEQ ID NO: 6453 - DNA, 972 bp, Homo sapiens
  source 1..972: mol_type = unassigned DNA; mol_type = unassigned DNA
agacagagccaaaatggaaggcgggacaagggcggcctggctggggcgaggggctggtctgggtccctgggaaccccttgccttgtgggcttcggtctccagggaggagctaggcagccgggctgcggggccgccggactgtggggtcctccgcgcagcgagctgggaggagcggtcggctgggctgttgagctgcgcctcctccaactgctgggaaactccgcacttcaatattggagcatctctttcccgggcaggaaaatacgctgctaacccccagtgggccgtagattggtactatcaattgagtctgtcatttggagagaccaattttgggcaggcatccaggcattgttctgcatctctgcaatgtatacgttttgtgccggtggcttgacaaccgtccttaactggtgctgccaatatggtggaaagcaggaagaagaaataaatgtcttctctgtaagacatcactgtcaagaacactgaaagaagaacccattaacgtagggaacgttgaggactggaacaggttgtagggcgtcttcctacactttgggttataacttccattgcatcaccaccatttaccagtaaaccagcacacacagcaatcagtactcgaaatggttctcttttgcagaaaaagcctgcttttctcccagctttggtgagatagatacgtaatcttcgtaaagacctataaggaattcctctgtggaacaaaattttaagcctccagtacaggatgctgaaagaagcaactctttaatcttgccagcccatgcacagtgaagctgaagtgcttcaatttacagatgttttacatttagggaaggcttttccaacaaagacctaccgcagttacatcacaggctccacctccgcctgccaggctgcttctgcaaggctgttagtaaggatactatgtattgctgtgcttgattaatgaagaaaataaatctccaaatc

SEQ ID NO: 6454 - DNA, 641 bp, Homo sapiens
  source 1..641: mol_type = unassigned DNA; mol_type = unassigned DNA
cgcagcgagctgggaggagcggtcggctgggctgttgagctgcgcctcctccaactgctgggaaactccgcacttcaatattggagcatctctttcccgggcagttgacacttactttgacaaaggcaaatttggaagcaattacttgaggacagttcatatagcatctggacagtcaacacgggcaccatgaagcacttcctgagtccatttccacagatgttggacgattttggcaatcttttcatttgaaccaaagagaaggttatgtaagcaaagcctgaatgaatcagatgttaattcctgagctcagcaaatgtattatggagaatgaggagctgacttttcactgggaagaattcagcattatttaaaagcccatgcagtgattaatctgtcaacttctgagatgttctagaatgaaatgctccatgcacagtcccagaagaaattaggttaaccttagagaaaccaggttgtgggaaaaaatggattttgatctacatttaggatacatgatacccaattgctaccatcagatatattaatggtataaatattcagagcaaaaaggaatagagaaaatattcaatgtatgtcaaaaattacatgaaatataaggaataaatgctatttgatta

SEQ ID NO: 6455 - DNA, 848 bp, Homo sapiens
  source 1..848: mol_type = unassigned DNA; mol_type = unassigned DNA
aagatgaaaatggagctgctgtggcttactgacttagcttagcccaaagaaataccatagcacttattgggacagagtttttaaaacctgtaaatgctccctccctccctcccttcctctcttcctccctagcttcctttttttcttcattccttgcttccccccctccccgcctctcctccctctcctcctttccttaccttccttacttccctccctccttcctttcttcttttctttcttttactaactcaatcatttacttatcgatgaacatttatttggcatctacaatgtaccaggcatcacaaataatataataatattatttattatattattatagtatggtgaataggataaacaccactaggtaaaaccaaacaaaatgcagtagggaatcaggagagagtgaggcgacatctagttacctcactaaatgtttcaggaaggaggggtttgatcattaatgatagtgcaaaagaatagcttaatgtttggcctttagggctgtctcccatggctatactaaagtggataggaggtaaatagcatggccttaaataattccatttctgacctccatataaattgtactgtggcttaacatttgttggataattgagctacagacatctctgcatatagttaacagttttaacataagcattaaaagagaacaagtaccaattagaggttaaatctgacttacttacttattcattcatccattcagcaaattcagcaaagcagaatgggagaagaaaaggatggataaggcaattgggtactcatttgcaattgtgggcatcaatataactgacctggcatataatctactggtcagc

SEQ ID NO: 6456 - DNA, 2583 bp, Homo sapiens
  source 1..2583: mol_type = unassigned DNA; mol_type = unassigned DNA
cctcccttctgcttcctctcccgagggctgtcctggcagaggcccccctcgctctttctggcgggaacagggccagcagcgaaagaacagtcgcagagggaaagcgggaaagagatgggggaaagtgtgtgtgtgtgagtgtgtgcttgtgtgcatgtgtgtgcgtgtgtgtgtcaaggaaaaaagctcgcagtccagcagcccgggcctgggaggcttgtgagccgggcctttcgtaattgtcccctccccgcggccccctcccccaggcctcccccctctcccgccctcccgcccgccctctctccctccctctttccctcacagccgacgaggcaacaattaggctttggggataaaacgaggtgcggagagcgggctggggcatttctccccgagatggcgggtctgacggcggcggccccgcggcccggagtcctcctgctcctgctgtccatcctccacccctctcggcctggaggggtccctggggccattcctggtggagttcctggaggagtcttttatccaggggctggtctcggagcccttggaggaggagcgctggggcctggaggcaaacctcttaagccagttcccggagggcttgcgggtgctggccttggggcagggctcggcgccttccccgcagttacctttccgggggctctggtgcctggtggagtggctgacgctgctgcagcctataaagctgctaaggctggcgctgggcttggtggtgtcccaggagttggtggcttaggagtgtctgcaggtgcggtggttcctcagcctggagccggagtgaagcctgggaaagtgccgggtgtggggctgccaggtgtatacccaggtggcgtgctcccaggagctcggttccccggtgtgggggtgctccctggagttcccactggagcaggagttaagcccaaggctccaggtgtaggtggagcttttgctggaatcccaggagttggaccctttgggggaccgcaacctggagtcccactggggtatcccatcaaggcccccaagctgcctggtggctatggactgccctacaccacagggaaactgccctatggctatgggcccggaggagtggctggtgcagcgggcaaggctggttacccaacagggacaggggttggcccccaggcagcagcagcagcggcagctaaagcagcagcaaagttcggtgctggagcagccggagtcctccctggtgttggaggggctggtgttcctggcgtgcctggggcaattcctggaattggaggcatcgcaggcgttgggactccagctgcagctgcagctgcagcagcagccgctaaggcagccaagtatggagctgctgcaggcttagtgcctggtgggccaggctttggcccgggagtagttggtgtcccaggagctggcgttccaggtgttggtgtcccaggagctgggattccagttgtcccaggtgctgggatcccaggtgctgcggttccaggggttgtgtcaccagaagcagctgctaaggcagctgcaaaggcagccaaatacggggccaggcccggagtcggagttggaggcattcctacttacggggttggagctgggggctttcccggctttggtgtcggagtcggaggtatccctggagtcgcaggtgtccctggtgtcggaggtgttcccggagtcggaggtgtcccgggagttggcatttcccccgaagctcaggcagcagctgccgccaaggctgccaagtacggagtggggaccccagcagctgcagctgctaaagcagccgccaaagccgcccagtttgggttagttcctggtgtcggcgtggctcctggagttggcgtggctcctggtgtcggtgtggctcctggagttggcttggctcctggagttggcgtggctcctggagttggtgtggctcctggcgttggcgtggctcccggcattggccctggtggagttgcagctgcagcaaaatccgctgccaaggtggctgccaaagcccagctccgagctgcagctgggcttggtgctggcatccctggacttggagttggtgtcggcgtccctggacttggagttggtgctggtgttcctggacttggagttggtgctggtgttcctggcttcggggcagtacctggagccctggctgccgctaaagcagccaaatatggagcagcagtgcctggggtccttggagggctcggggctctcggtggagtaggcatcccaggcggtgtggtgggagccggacccgccgccgccgctgccgcagccaaagctgctgccaaagccgcccagtttggcctagtgggagccgctgggctcggaggactcggagtcggagggcttggagttccaggtgttgggggccttggaggtatacctccagctgcagccgctaaagcagctaaatacggagtggcagcaagacctggcttcggattgtctcccattttcccaggtggggcctgcctggggaaagcttgtggccggaagagaaaatgagcttcctaggacccctgactcacgacctcatcaacgttggtgctactgcttggtggagaatgt

SEQ ID NO: 6457 - DNA, 3781 bp, Homo sapiens
  source 1..3781: mol_type = unassigned DNA; mol_type = unassigned DNA
cctcccttctgcttcctctcccgagggctgtcctggcagaggcccccctcgctctttctggcgggaacagggccagcagcgaaagaacagtcgcagagggaaagcgggaaagagatgggggaaagtgtgtgtgtgtgagtgtgtgcttgtgtgcatgtgtgtgcgtgtgtgtgtcaaggaaaaaagctcgcagtccagcagcccgggcctgggaggcttgtgagccgggcctttcgtaattgtcccctccccgcggccccctcccccaggcctcccccctctcccgccctcccgcccgccctctctccctccctctttccctcacagccgacgaggcaacaattaggctttggggataaaacgaggtgcggagagcgggctggggcatttctccccgagatggcgggtctgacggcggcggccccgcggcccggagtcctcctgctcctgctgtccatcctccacccctctcggcctggaggggtccctggggccattcctggtggagttcctggaggagtcttttatccaggggctggtctcggagcccttggaggaggagcgctggggcctggaggcaaacctcttaagccagttcccggagggcttgcgggtgctggccttggggcagggctcggcgccttccccgcagttacctttccgggggctctggtgcctggtggagtggctgacgctgctgcagcctataaagctgctaaggctggcgctgggcttggtggtgtcccaggagttggtggcttaggagtgtctgcaggtgcggtggttcctcagcctggagccggagtgaagcctgggaaagtgccgggtgtggggctgccaggtgtatacccaggtggcgtgctcccaggagctcggttccccggtgtgggggtgctccctggagttcccactggagcaggagttaagcccaaggctccaggtgtaggtggagcttttgctggaatcccaggagttggaccctttgggggaccgcaacctggagtcccactggggtatcccatcaaggcccccaagctgcctggtggctatggactgccctacaccacagggaaactgccctatggctatgggcccggaggagtggctggtgcagcgggcaaggctggttacccaacagggacaggggttggcccccaggcagcagcagcagcggcagctaaagcagcagcaaagttcggtgctggagcagccggagtcctccctggtgttggaggggctggtgttcctggcgtgcctggggcaattcctggaattggaggcatcgcaggcgttgggactccagctgcagctgcagctgcagcagcagccgctaaggcagccaagtatggagctgctgcaggcttagtgcctggtgggccaggctttggcccgggagtagttggtgtcccaggagctggcgttccaggtgttggtgtcccaggagctgggattccagttgtcccaggtgctgggatcccaggtgctgcggttccaggggttgtgtcaccagaagcagctgctaaggcagctgcaaaggcagccaaatacggggccaggcccggagtcggagttggaggcattcctacttacggggttggagctgggggctttcccggctttggtgtcggagtcggaggtatccctggagtcgcaggtgtccctggtgtcggaggtgttcccggagtcggaggtgtcccgggagttggcatttcccccgaagctcaggcagcagctgccgccaaggctgccaagtacggagtggggaccccagcagctgcagctgctaaagcagccgccaaagccgcccagtttgggttagttcctggtgtcggcgtggctcctggagttggcgtggctcctggtgtcggtgtggctcctggagttggcttggctcctggagttggcgtggctcctggagttggtgtggctcctggcgttggcgtggctcccggcattggccctggtggagttgcagctgcagcaaaatccgctgccaaggtggctgccaaagcccagctccgagctgcagctgggcttggtgctggcatccctggacttggagttggtgtcggcgtccctggacttggagttggtgctggtgttcctggacttggagttggtgctggtgttcctggcttcggggcagtacctggagccctggctgccgctaaagcagccaaatatggagcagcagtgcctggggtccttggagggctcggggctctcggtggagtaggcatcccaggcggtgtggtgggagccggacccgccgccgccgctgccgcagccaaagctgctgccaaagccgcccagtttggcctagtgggagccgctgggctcggaggactcggagtcggagggcttggagttccaggtgttgggggccttggaggtatacctccagctgcagccgctaaagcagctaaatacggtgctgctggccttggaggtgtcctagggggtgccgggcagttcccacttggaggagtggcagcaagacctggcttcggattgtctcccattttcccaggtggggcctgcctggggaaagcttgtggccggaagagaaaatgagcttcctaggacccctgactcacgacctcatcaacgttggtgctactgcttggtggagaatgtaaaccctttgtaaccccatcccatgcccctccgactccccaccccaggagggaacgggcaggccgggcggccttgcagatccacagggcaaggaaacaagaggggagcggccaagtgccccgaccaggaggccccctacttcagaggcaagggccatgtggtcctggccccccaccccatcccttcccacctaggagctccccctccacacagcctccatctccaggggaacttggtgctacacgctggtgctcttatcttcctggggggagggaggagggaagggtggcccctcggggaaccccctacctggggctcctctaaagatggtgcagacacttcctgggcagtcccagctccccctgcccaccaggacccaccgttggctgccatccagttggtacccaagcacctgaagcctcaaagctggattcgctctagcatccctcctctcctgggtccacttggccgtctcctccccaccgatcgctgttccccacatctggggcgcttttgggttggaaaaccaccccacactgggaatagccaccttgcccttgtagaatccatccgcccatccgtccattcatccatcggtccgtccatccatgtccccagttgaccgcccggcaccactagctggctgggtgcacccaccatcaacctggttgacctgtcatggccgcctgtgccctgcctccacccccatcctacactcccccagggcgtgcggggctgtgcagactggggtgccaggcatctcctccccacccggggtgtccccacatgcagtactgtataccccccatccctccctcggtccactgaacttcagagcagttcccattcctgccccgcccatctttttgtgtctcgctgtgatagatcaataaatattttattttttgtcctggatatttggggattatttttgattgttgatattctcttttggttttattgttgtggttcattgaaaaaaaaagataatttttttttctgatccggggagctgtatccccagtagaaaaaacattttaatcactctaatataactctggatgaaacacacctttttttttaataagaaaagagaattaactgcttcagaaatgactaataaatgaaaaacctttaaaggaaa

SEQ ID NO: 6458 - DNA, 542 bp, Homo sapiens
  source 1..542: mol_type = unassigned DNA; mol_type = unassigned DNA
ctctttccctcacagccgacgaggcaacaattaggctttggggataaaacgaggtgcggagagcgggctggggcatttctccccgagatggcgggtctgacggcggcggccccgcggcccggagtcctcctgctcctgctgtccatcctccacccctctcggcctggaggggtccctggggccattcctggtggagttcctggaggagtcttttatccagcgctggggcctggaggcaaacctcttaagccagggctcggcgccttccccgcagttacctttccgggggctctggtgcctggtggagtggctgacgctgctgcagcctataaagctgctaaggctggcgctgggcttggtggtgtcccaggagttggtggcttaggagtgtctgcaggtgcggtggttcctcagcctggagccggagtgaagcctgggaaagtgccgggtgtggggctgccaggtgtatacccaggtggcgtgctcccaggagctcggttccccggtgtgggggtgctccctggagttcccactggagcagg

SEQ ID NO: 6459 - DNA, 2991 bp, Homo sapiens
  source 1..2991: mol_type = unassigned DNA; mol_type = unassigned DNA
tccctcacagccgacgaggcaacaattaggctttggggataaaacgaggtgcggagagcgggctggggcatttctccccgagatggcgggtctgacggcggcggccccgcggcccggagtcctcctgctcctgctgtccatcctccacccctctcggcctggaggggtccctggggccattcctggtggagttcctggaggagtcttttatccaggggctggtctcggagcccttggaggaggagcgctggggcctggaggcaaacctcttaagccagggctcggcgccttccccgcagttacctttccgggggctctggtgcctggtggagtggctgacgctgctgcagcctataaagctgctaaggctggcgctgggcttggtggtgtcccaggagttggtggcttaggagtgtctgcaggtgcggtggttcctcagcctggagccggagtgaagcctgggaaagtgccgggtgtggggctgccaggtgtatacccaggtggcgtgctcccaggagctcggttccccggtgtgggggtgctccctggagttcccactggagcaggagttaagcccaaggctccaggagttggaccctttgggggaccgcaacctggagtcccactggggtatcccatcaaggcccccaagctgcctggctatgggcccggaggagtggctggtgcagcgggcaaggctggttacccaacagggacaggggttggcccccaggcagcagcagcagcggcagctaaagcagcagcaaagttcggtgctggagcagccggagtcctccctggtgttggaggggctggtgttcctggcgtgcctggggcaattcctggaattggaggcatcgcaggcgttgggactccagctgcagctgcagctgcagcagcagccgctaaggcagccaagtatggagctgctgcaggcttagtgcctggtgggccaggctttggcccgggagtagttggtgtcccaggagctggcgttccaggtgttggtgtcccaggagctgggattccagttgtcccaggtgctgggatcccaggtgctgcggttccaggggttgtgtcaccagaagcagctgctaaggcagctgcaaaggcagccaaatacggggccaggcccggagtcggagttggaggcattcctacttacggggttggagctgggggctttcccggctttggtgtcggagtcggagccgaagctcaggcagcagctgccgccaaggctgccaagtacgggttagttcctggtgtcggcgtggctcctggagttggcgtggctcctggtgtcggtgtggctcctggagttggcttggctcctggagttggcgtggctcctggagttggtgtggctcctggcgttggcgtggctcccggcattggccctggtggagttgcagctgcagcaaaatccgctgccaaggtggctgccaaagcccagctccgagctgcagctgggcttggtgctggcatccctggacttggagttggtgtcggcgtccctggacttggagttggtgctggtgttcctggacttggagttggtgctggtgttcctggcttcggggcagtacctggagccctggctgccgctaaagcagccaaatatggagcagcagtgcctggggtccttggagggctcggggctctcggtggagtaggcatcccaggcggtgtggtgggagccggacccgccgccgccgctgccgcagccaaagctgctgccaaagccgcccagtttggcctagtgggagccgctgggctcggaggactcggagtcggagggcttggagttccaggtgttgggggccttggaggtatacctccagctgcagccgctaaagcagctaaatacggtgctgctggccttggaggtgtcctagggggtgccgggcagttcccacttggaggagtggcagcaagacctggcttcggattgtctcccattttcccaggtggggcctgcctggggaaagcttgtggccggaagagaaaatgagcttcctaggacccctgactcacgacctcatcaacgttggtgctactgcttggtggagaatgtaaaccctttgtaaccccatcccatgcccctccgactccccaccccaggagggaacgggcaggccgggcggccttgcagatccacagggcaaggaaacaagaggggagcggccaagtgccccgaccaggaggccccctacttcagaggcaagggccatgtggtcctggccccccaccccatcccttcccacctaggagctccccctccacacagcctccatctccaggggaacttggtgctacacgctggtgctcttatcttcctggggggagggaggagggaagggtggcccctcggggaaccccctacctggggctcctctaaagatggtgcagacacttcctgggcagtcccagctccccctgcccaccaggacccaccgttggctgccatccagttggtacccaagcacctgaagcctcaaagctggattcgctctagcatccctcctctcctgggtccacttggccgtctcctccccaccgatcgctgttccccacatctggggcgcttttgggttggaaaaccaccccacactgggaatagccaccttgcccttgtagaatccatccgcccatccgtccattcatccatcggtccgtccatccatgtccccagttgaccgcccggcaccactagctggctgggtgcacccaccatcaacctggttgacctgtcatggccgcctgtgccctgcctccacccccatcctacactcccccagggcgtgcggggctgtgcagactggggtgccaggcatctcctccccacccggggtgtccccacatgcagtactgtataccccccatccctccctcggtccactgaacttcagagcagttcccattcctgccccgcccatctttttgtgtctcgctgtgatagatcaataaatattttattttttgtcctgg

SEQ ID NO: 6460 - DNA, 962 bp, Homo sapiens
  source 1..962: mol_type = unassigned DNA; mol_type = unassigned DNA
ctcacagccgacgaggcaacaattaggctttggggataaaacgaggtgcggagagcgggctggggcatttctccccgagatggcgggtctgacggcggcggccccgcggcccggagtcctcctgctcctgctgtccatcctccacccctctcggcctggaggggtccctggggccattcctggtggagttcctggaggagtcttttatccaggggctggtctcggagcccttggaggaggagcgctggggcctggaggcaaacctcttaagccagggctcggcgccttccccgcagttacctttccgggggctctggtgcctggtggagtggctgacgctgctgcagcctataaagctgctaaggctggcgctgggcttggtggtgtcccaggagttggtggcttaggagtgtctgcaggtgcggtggttcctcagcctggagccggagtgaagcctgggaaagtgccgggtgtggggctgccaggtgtatacccaggtggcgtgctcccaggagctcggttccccggtgtgggggtgctccctggagttcccactggagcaggagttaagcccaaggctccaggagttggaccctttgggggaccgcaacctggagtcccactggggtatcccatcaaggcccccaagctgcctggtggctatggactgccctacaccacagggaaactgccctatggctatgggcccggaggagtggctggtgcagcgggcaaggctggttacccaacagggacaggggttggcccccaggcagcagcagcagcggcagctaaagcagcagcaaagttcggtgctggagcagccggagtcctccctggtgttggaggggctggtgttcctggcgtgcctggggcaattcctggaattggaggcatcgcaggcgttgggactccagctgcagctgcagctgcagcagcagccgctaaggcagccaagtatg

SEQ ID NO: 6461 - DNA, 582 bp, Homo sapiens
  source 1..582: mol_type = unassigned DNA; mol_type = unassigned DNA
agccgacgaggcaacaattaggctttggggataaaacgaggtgcggagagcgggctggggcatttctccccgagatggcgggtctgacggcggcggccccgcggcccggagtcctcctgctcctgctgtccatcctccacccctctcggcctggaggggtccctggggccattcctggtggagttcctggaggagtcttttatccaggggctggtctcggagcccttggaggaggagcgctggggcctggaggcaaacctcttaagccaggtaagacccaaggcctcggagcattgagagacagcgagggagctggggagggaggagcctacccagctgggaatgggacaaggaaactaggaacaggacaaggaagccaacgggcaggaggaaggagggaggtgtggacaccgattagcctcccaaggatgagtaggccggggccaggtcccagggcttccaggaacaagaggctggaagcagctccatgtcctccctgtgtgagggcgtctagcatctaccctacatgtgcatgtgtgttcacccagctgtccagagactcctctctgcaaaggagaggct

SEQ ID NO: 6462 - DNA, 524 bp, Homo sapiens
  source 1..524: mol_type = unassigned DNA; mol_type = unassigned DNA
gcaacaattaggctttggggataaaacgaggtgcggagagcgggctggggcatttctccccgagatggcgggtctgacggcggcggccccgcggcccggagtcctcctgctcctgctgtccatcctccacccctctcggcctggaggggtccctggggccattcctggtggagttcctggaggagtcttttatccaggggctggtctcggagcccttggaggaggagcgctggggcctggaggcaaacctcttaagccagttcccggagggcttgcgggtgctggccttggggcagggctcggcgccttccccgcagttacctttccgggggctctggtgcctggtggagtggctgacgctgctgcagcctataaagctgctaaggctggtgagtggtgctctttgggacatgccacaagccctctggcttccgtggggccctccgctttgcaaagaaccttccctcaactcaggcttgggagccgggtgggtgggattgtcagttgcaatctactggggctca

SEQ ID NO: 6463 - DNA, 627 bp, Homo sapiens
  source 1..627: mol_type = unassigned DNA; mol_type = unassigned DNA
aacaattaggctttggggataaaacgaggtgcggagagcgggctggggcatttctccccgagatggcgggtctgacggcggcggccccgcggcccggagtcctcctgctcctgctgtccatcctccacccctctcggcctggaggggtccctggggccattcctggtggagttcctggaggagtcttttatccaggggctggtctcggagcccttggaggaggagcgctggggcctggaggcaaacctcttaagccagttcccggagggcttgcgggtgctggccttggggcagggctcggcgccttccccgcagttacctttccgggggctctggtgcctggtggagtggctgacgctgctgcagcctataaagctgctaaggctggcgctgggcttggtggtgtcccaggagttggtggcttaggagtgtctgcaggtacgatggctatccccgaactccctgggtcaaagttgcaggcctgggtggagccaactctgatgcagccccttctgtgccaggtgcggtggttcctcagcctggagccggagtgaagcctgggaaagtgccgggtcagtgcggaatccctggggctggaggacagagggcagggaggggcagagggca

SEQ ID NO: 6464 - DNA, 563 bp, Homo sapiens
  source 1..563: mol_type = unassigned DNA; mol_type = unassigned DNA
aattaggctttggggataaaacgaggtgcggagagcgggctggggcatttctccccgagatggcgggtctgacggcggcggccccgcggcccggagtcctcctgctcctgctgtccatcctccacccctctcggcctggaggggtccctggggccattcctggtggagttcctggaggagtcttttatccaggggctggtctcggagcccttggaggaggagcgctggggcctggaggcaaacctcttaagccaggagttggaccctttgggggaccgcaacctggagtcccactggggtatcccatcaaggcccccaagctgcctggctatgggcccggaggagtggctggtgcagcgggcaaggctggttacccaacagggacaggggttggcccccaggcagcagcagcagcggcagctaaagcagcagcaaagttcggtgctggagcagccggagtcctccctggtgttggaggggctggtgttcctggcgtgcctggggcaattcctggaattggaggcatcgcaggcgttgggactccagctgcagctgcagctgca

SEQ ID NO: 6465 - DNA, 3139 bp, Homo sapiens
  source 1..3139: mol_type = unassigned DNA; mol_type = unassigned DNA
aattaggctttggggataaaacgaggtgcggagagcgggctggggcatttctccccgagatggcgggtctgacggcggcggccccgcggcccggagtcctcctgctcctgctgtccatcctccacccctctcggcctggaggggtccctggggccattcctggtggagttcctggaggagtcttttatccagcgctggggcctggaggcaaacctcttaagccagttcccggagggcttgcgggtgctggccttggggcagggctcggcgccttccccgcagttacctttccgggggctctggtgcctggtggagtggctgacgctgctgcagcctataaagctgctaaggctggcgctgggcttggtggtgtcccaggagttggtggcttaggagtgtctgcagccccttctgtgccaggtgcggtggttcctcagcctggagccggagtgaagcctgggaaagtgccgggtgtggggctgccaggtgtatacccaggtggcgtgctcccaggagctcggttccccggtgtgggggtgctccctggagttcccactggagcaggagttaagcccaaggctccaggtgtaggtggagcttttgctggaatcccaggagttggaccctttgggggaccgcaacctggagtcccactggggtatcccatcaaggcccccaagctgcctggtggctatggactgccctacaccacagggaaactgccctatggctatgggcccggaggagtggctggtgcagcgggcaaggctggttacccaacagggacaggggttggcccccaggcagcagcagcagcggcagctaaagcagcagcaaagttcggtgctggagcagccggagtcctccctggtgttggaggggctggtgttcctggcgtgcctggggcaattcctggaattggaggcatcgcaggcgttgggactccagctgcagctgcagctgcagcagcagccgctaaggcagccaagtatggagctgctgcaggcttagtgcctggtgggccaggctttggcccgggagtagttggtgtcccaggagctggcgttccaggtgttggtgtcccaggagctgggattccagttgtcccaggtgctgggatcccaggtgctgcggttccaggggttgtgtcaccagaagcagctgctaaggcagctgcaaaggcagccaaatacggggccaggcccggagtcggagttggaggcattcctacttacggggttggagctgggggctttcccggctttggtgtcggagtcggaggtatccctggagtcgcaggtgtccctggtgtcggaggtgttcccggagtcggaggtgtcccgggagttggcatttcccccgaagctcaggcagcagctgccgccaaggctgccaagtacgggttagttcctggtgtcggcgtggctcctggagttggcgtggctcctggtgtcggtgtggctcctggagttggcttggctcctggagttggcgtggctcctggagttggtgtggctcctggcgttggcgtggctcccggcattggccctggtggagttgcagctgcagcaaaatccgctgccaaggtggctgccaaagcccagctccgagctgcagctgggcttggtgctggcatccctggacttggagttggtgtcggcgtccctggacttggagttggtgctggtgttcctggacttggagttggtgctggtgttcctggcttcggggcagtacctggagccctggctgccgctaaagcagccaaatatggagcagcagtgcctggggtccttggagggctcggggctctcggtggagtaggcatcccaggcggtgtggtgggagccggacccgccgccgccgctgccgcagccaaagctgctgccaaagccgcccagtttggcctagtgggagccgctgggctcggaggactcggagtcggagggcttggagttccaggtgttgggggccttggaggtatacctccagctgcagccgctaaagcagctaaatacggtgctgctggccttggaggtgtcctagggggtgccgggcagttcccacttggaggagtggcagcaagacctggcttcggattgtctcccattttcccaggtggggcctgcctggggaaagcttgtggccggaagagaaaatgagcttcctaggacccctgactcacgacctcatcaacgttggtgctactgcttggtggagaatgtaaaccctttgtaaccccatcccatgcccctccgactccccaccccaggagggaacgggcaggccgggcggccttgcagatccacagggcaaggaaacaagaggggagcggccaagtgccccgaccaggaggccccctacttcagaggcaagggccatgtggtcctggccccccaccccatcccttcccacctaggagctccccctccacacagcctccatctccaggggaacttggtgctacacgctggtgctcttatcttcctggggggagggaggagggaagggtggcccctcggggaaccccctacctggggctcctctaaagatggtgcagacacttcctgggcagtcccagctccccctgcccaccaggacccaccgttggctgccatccagttggtacccaagcacctgaagcctcaaagctggattcgctctagcatccctcctctcctgggtccacttggccgtctcctccccaccgatcgctgttccccacatctggggcgcttttgggttggaaaaccaccccacactgggaatagccaccttgcccttgtagaatccatccgcccatccgtccattcatccatcggtccgtccatccatgtccccagttgaccgcccggcaccactagctggctgggtgcacccaccatcaacctggttgacctgtcatggccgcctgtgccctgcctccacccccatcctacactcccccagggcgtgcggggctgtgcagactggggtgccaggcatctcctccccacccggggtgtccccacatgcagtactgtataccccccatccctccctcggtccactgaacttcagagcagttcccattcctgccccgcccatctttttgtgtctcgctgtgatagatcaataaatattttattttttgtcctgg

SEQ ID NO: 6466 - DNA, 2240 bp, Homo sapiens
  source 1..2240: mol_type = unassigned DNA; mol_type = unassigned DNA
gggataaaacgaggtgcggagagcgggctggggcatttctccccgagatggcgggtctgacggcggcggccccgcggcccggagtcctcctgctcctgctgtccatcctccacccctctcggcctggaggggtccctggggccattcctggtggagttcctggaggagtcttttatccaggggctggtctcggagcccttggaggaggagcgctggggcctggaggcaaacctcttaagccagttcccggagggcttgcgggtgctggccttggggcagggctcggcgccttccccgcagttacctttccgggggctctggtgcctggtggagtggctgacgctgctgcagcctataaagctgctaaggctggcgctgggcttggtggtgtcccaggagttggtggcttaggagtgtctgcaggtgcggtggttcctcagcctggagccggagtgaagcctgggaaagtgccgggtgtggggctgccaggtgtatacccaggtggcgtgctcccaggagctcggttccccggtgtgggggtgctccctggagttcccactggagcaggagttaagcccaaggctccaggtgtaggtggagcttttgctggaatcccaggagttggaccctttgggggaccgcaacctggagtcccactggggtatcccatcaaggcccccaagctgcctggtggctatggactgccctacaccacagggaaactgccctatggctatgggcccggaggagtggctggtgcagcgggcaaggctggttacccaacagggacaggggttggcccccaggcagcagcagcagcggcagctaaagcagcagcaaagttcggtgctggagcagccggagtcctccctggtgttggaggggctggtgttcctggcgtgcctggggcaattcctggaattggaggcatcgcaggcgttgggactccagctgcagctgcagctgcagcagcagccgctaaggcagccaagtatggagctgctgcaggcttagtgcctggtgggccaggctttggcccgggagtagttggtgtcccaggagctggcgttccaggtgttggtgtcccaggagctgggattccagttgtcccaggtgctgggatcccaggtgctgcggttccaggggttgtgtcaccagaagcagctgctaaggcagctgcaaaggcagccaaatacggggccaggcccggagtcggagttggaggcattcctacttacggggttggagctgggggctttcccggctttggtgtcggagtcggaggtatccctggagtcgcaggtgtccctggtgtcggaggtgttcccggagtcggaggtgtcccgggagttggcatttcccccgaagctcaggcagcagctgccgccaaggctgccaagtacggagtggggaccccagcagctgcagctgctaaagcagccgccaaagccgcccagtttgctcttctcaatcttgcagggttagttcctggtgtcggcgtggctcctggagttggcgtggctcctggtgtcggtgtggctcctggagttggcttggctcctggagttggcgtggctcctggagttggtgtggctcctggcgttggcgtggctcccggcattggccctggtggagttgcagctgcagcaaaatccgctgccaaggtggctgccaaagcccagctccgagctgcagctgggcttggtgctggcatccctggacttggagttggtgtcggcgtccctggacttggagttggtgctggtgttcctggacttggagttggtgctggtgttcctggcttcggggcagtacctggagccctggctgccgctaaagcagccaaatatggagcagcagtgcctggggtccttggagggctcggggctctcggtggagtaggcatcccaggcggtgtggtgggagccggacccgccgccgccgctgccgcagccaaagctgctgccaaagccgcccagtttggcctagtgggagccgctgggctcggaggactcggagtcggagggcttggagttccaggtgttgggggccttggaggtatacctccagctgcagccgctaaagcagctaaatacggtgctgctggccttggaggtgtcctagggggtgccgggcagttcccacttggaggagtggcagcaagacctggcttcggattgtctcccattttcccaggtggggcctgcctggggaaagcttgtggccggaagagaaaatga

SEQ ID NO: 6467 - DNA, 545 bp, Homo sapiens
  source 1..545: mol_type = unassigned DNA; mol_type = unassigned DNA
ataaaacgaggtgcggagagcgggctggggcatttctccccgagatggcgggtctgacggcggcggccccgcggcccggagtcctcctgctcctgctgtccatcctccacccctctcggcctggaggggtccctggggccattcctggtggagttcctggaggagtcttttatccagcgctggggcctggaggcaaacctcttaagccagttcccggagggcttgcgggtgctggccttggggcagggctcggcgccttccccgcagttacctttccgggggctctggtgcctggtggagtggctgacgctgctgcagcctataaagctgctaaggctggcgctgggcttggtggtgtcccaggagttggtggcttaggagtgtctgcaggtacgatggctatccccgaactccctgggtcaaagttgcaggcctgggtggagccaactctgatgcagccccttctgtgccaggtgcggtggttcctcagcctggagccggagtgaagcctgggaaagtgccgggtcagtgcggaatccctgggg

SEQ ID NO: 6468 - DNA, 3043 bp, Homo sapiens
  source 1..3043: mol_type = unassigned DNA; mol_type = unassigned DNA
cggagagcgggctggggcatttctccccgagatggcgggtctgacggcggcggccccgcggcccggagtcctcctgctcctgctgtccatcctccacccctctcggcctggaggggtccctggggccattcctggtggagttcctggaggagtcttttatccagcgctggggcctggaggcaaacctcttaagccagttcccggagggcttgcgggtgctggccttggggcagggctcggcgccttccccgcagttacctttccgggggctctggtgcctggtggagtggctgacgctgctgcagcctataaagctgctaaggctggcgctgggcttggtggtgtcccaggagttggtggcttaggagtgtctgcaggtgcggtggttcctcagcctggagccggagtgaagcctgggaaagtgccgggtgtggggctgccaggtgtatacccaggtggcgtgctcccaggagctcggttccccggtgtgggggtgctccctggagttcccactggagcaggagttaagcccaaggctccaggtgtaggtggagcttttgctggaatcccaggagttggaccctttgggggaccgcaacctggagtcccactggggtatcccatcaaggcccccaagctgcctggtggctatggactgccctacaccacagggaaactgccctatggctatgggcccggaggagtggctggtgcagcgggcaaggctggttacccaacagggacaggggttggcccccaggcagcagcagcagcggcagctaaagcagcagcaaagttcggtgctggagcagccggagtcctccctggtgttggaggggctggtgttcctggcgtgcctggggcaattcctggaattggaggcatcgcaggcgttgggactccagctgcagctgcagctgcagcagcagccgctaaggcagccaagtatggagctgctgcaggcttagtgcctggtgggccaggctttggcccgggagtagttggtgtcccaggagctggcgttccaggtgttggtgtcccaggagctgggattccagttgtcccaggtgctgggatcccaggtgctgcggttccaggggttgtgtcaccagaagcagctgctaaggcagctgcaaaggcagccaaatacggggccaggcccggagtcggagttggaggcattcctacttacggggttggagctgggggctttcccggctttggtgtcggagtcggaggtatccctggagtcgcaggtgtccctggtgtcggaggtgttcccggagtcggaggtgtcccgggagttggcatttcccccgaagctcaggcagcagctgccgccaaggctgccaagtacgggttagttcctggtgtcggcgtggctcctggagttggcgtggctcctggtgtcggtgtggctcctggagttggcttggctcctggagttggcgtggctcctggagttggtgtggctcctggcgttggcgtggctcccggcattggccctggtggagttgcagctgcagcaaaatccgctgccaaggtggctgccaaagcccagctccgagctgcagctgggcttggtgctggcatccctggacttggagttggtgtcggcgtccctggacttggagttggtgctggtgttcctggacttggagttggtgctggtgttcctggcttcggggcagtacctggagccctggctgccgctaaagcagccaaatatggagcagcagtgcctggggtccttggagggctcggggctctcggtggagtaggcatcccaggcggtgtggtgggagccggacccgccgccgccgctgccgcagccaaagctgctgccaaagccgcccagtttggcctagtgggagccgctgggctcggaggactcggagtcggagggcttggagttccaggtgttgggggccttggaggtatacctccagctgcagccgctaaagcagctaaatacggagtggcagcaagacctggcttcggattgtctcccattttcccaggtggggcctgcctggggaaagcttgtggccggaagagaaaatgagcttcctaggacccctgactcacgacctcatcaacgttggtgctactgcttggtggagaatgtaaaccctttgtaaccccatcccatgcccctccgactccccaccccaggagggaacgggcaggccgggcggccttgcagatccacagggcaaggaaacaagaggggagcggccaagtgccccgaccaggaggccccctacttcagaggcaagggccatgtggtcctggccccccaccccatcccttcccacctaggagctccccctccacacagcctccatctccaggggaacttggtgctacacgctggtgctcttatcttcctggggggagggaggagggaagggtggcccctcggggaaccccctacctggggctcctctaaagatggtgcagacacttcctgggcagtcccagctccccctgcccaccaggacccaccgttggctgccatccagttggtacccaagcacctgaagcctcaaagctggattcgctctagcatccctcctctcctgggtccacttggccgtctcctccccaccgatcgctgttccccacatctggggcgcttttgggttggaaaaccaccccacactgggaatagccaccttgcccttgtagaatccatccgcccatccgtccattcatccatcggtccgtccatccatgtccccagttgaccgcccggcaccactagctggctgggtgcacccaccatcaacctggttgacctgtcatggccgcctgtgccctgcctccacccccatcctacactcccccagggcgtgcggggctgtgcagactggggtgccaggcatctcctccccacccggggtgtccccacatgcagtactgtataccccccatccctccctcggtccactgaacttcagagcagttcccattcctgccccgcccatctttttgtgtctcgctgtgatagatcaataaatattttattttttgtcctgga

SEQ ID NO: 6469 - DNA, 3214 bp, Homo sapiens
  source 1..3214: mol_type = unassigned DNA; mol_type = unassigned DNA
ggagagcgggctggggcatttctccccgagatggcgggtctgacggcggcggccccgcggcccggagtcctcctgctcctgctgtccatcctccacccctctcggcctggaggggtccctggggccattcctggtggagttcctggaggagtcttttatccaggggctggtctcggagcccttggaggaggagcgctggggcctggaggcaaacctcttaagccagttcccggagggcttgcgggtgctggccttggggcagggctcggcgccttccccgcagttacctttccgggggctctggtgcctggtggagtggctgacgctgctgcagcctataaagctgctaaggctggcgctgggcttggtggtgtcccaggagttggtggcttaggagtgtctgcaggtgcggtggttcctcagcctggagccggagtgaagcctgggaaagtgccgggtgtggggctgccaggtgtatacccaggtggcgtgctcccaggagctcggttccccggtgtgggggtgctccctggagttcccactggagcaggagttaagcccaaggctccaggtgtaggtggagcttttgctggaatcccaggagttggaccctttgggggaccgcaacctggagtcccactggggtatcccatcaaggcccccaagctgcctggctatgggcccggaggagtggctggtgcagcgggcaaggctggttacccaacagggacaggggttggcccccaggcagcagcagcagcggcagctaaagcagcagcaaagttcggtgctggagcagccggagtcctccctggtgttggaggggctggtgttcctggcgtgcctggggcaattcctggaattggaggcatcgcaggcgttgggactccagctgcagctgcagctgcagcagcagccgctaaggcagccaagtatggagctgctgcaggcttagtgcctggtgggccaggctttggcccgggagtagttggtgtcccaggagctggcgttccaggtgttggtgtcccaggagctgggattccagttgtcccaggtgctgggatcccaggtgctgcggttccaggggttgtgtcaccagaagcagctgctaaggcagctgcaaaggcagccaaatacggggccaggcccggagtcggagttggaggcattcctacttacggggttggagctgggggctttcccggctttggtgtcggagtcggaggtatccctggagtcgcaggtgtccctggtgtcggaggtgttcccggagtcggaggtgtcccgggagttggcatttcccccgaagctcaggcagcagctgccgccaaggctgccaagtacgggttagttcctggtgtcggcgtggctcctggagttggcgtggctcctggtgtcggtgtggctcctggagttggcttggctcctggagttggcgtggctcctggagttggtgtggctcctggcgttggcgtggctcccggcattggccctggtggagttgcaggagctgcagctgggcttggtgctggcatccctggacttggagttggtgtcggcgtccctggacttggagttggtgctggtgttcctggacttggagttggtgctggtgttcctggcttcggggcagtacctggagccctggctgccgctaaagcagccaaatatggagcagcagtgcctggggtccttggagggctcggggctctcggtggagtaggcatcccaggcggtgtggtgggagccggacccgccgccgccgctgccgcagccaaagctgctgccaaagccgcccagtttggcctagtgggagccgctgggctcggaggactcggagtcggagggcttggagttccaggtgttgggggccttggaggtatacctccagctgcagccgctaaagcagctaaatacggagtggcagcaagacctggcttcggattgtctcccattttcccaggtggggcctgcctggggaaagcttgtggccggaagagaaaatgagcttcctaggacccctgactcacgacctcatcaacgttggtgctactgcttggtggagaatgtaaaccctttgtaaccccatcccatgcccctccgactccccaccccaggagggaacgggcaggccgggcggccttgcagatccacagggcaaggaaacaagaggggagcggccaagtgccccgaccaggaggccccctacttcagaggcaagggccatgtggtcctggccccccaccccatcccttcccacctaggagctccccctccacacagcctccatctccaggggaacttggtgctacacgctggtgctcttatcttcctggggggagggaggagggaagggtggcccctcggggaaccccctacctggggctcctctaaagatggtgcagacacttcctgggcagtcccagctccccctgcccaccaggacccaccgttggctgccatccagttggtacccaagcacctgaagcctcaaagctggattcgctctagcatccctcctctcctgggtccacttggccgtctcctccccaccgatcgctgttccccacatctggggcgcttttgggttggaaaaccaccccacactgggaatagccaccttgcccttgtagaatccatccgcccatccgtccattcatccatcggtccgtccatccatgtccccagttgaccgcccggcaccactagctggctgggtgcacccaccatcaacctggttgacctgtcatggccgcctgtgccctgcctccacccccatcctacactcccccagggcgtgcggggctgtgcagactggggtgccaggcatctcctccccacccggggtgtccccacatgcagtactgtataccccccatccctccctcggtccactgaacttcagagcagttcccattcctgccccgcccatctttttgtgtctcgctgtgatagatcaataaatattttattttttgtcctggatatttggggattatttttgattgttgatattctcttttggttttattgttgtggttcattgaaaaaaaaagataatttttttttctgatccggggagctgtatccccagtagaaaaaacattttaatcactctaatataactctggatgaaacacacctttttttttaataagaaaagagaattaactgcttcagaaatgactaataaatgaaaaacctttaaaggaaa

SEQ ID NO: 6470 - DNA, 3147 bp, Homo sapiens
  source 1..3147: mol_type = unassigned DNA; mol_type = unassigned DNA
gcgggctggggcatttctccccgagatggcgggtctgacggcggcggccccgcggcccggagtcctcctgctcctgctgtccatcctccacccctctcggcctggaggggtccctggggccattcctggtggagttcctggaggagtcttttatccagcgctggggcctggaggcaaacctcttaagccagttcccggagggcttgcgggtgctggccttggggcagggctcggcgccttccccgcagttacctttccgggggctctggtgcctggtggagtggctgacgctgctgcagcctataaagctgctaaggctggcgctgggcttggtggtgtcccaggagttggtggcttaggagtgtctgcaggtgcggtggttcctcagcctggagccggagtgaagcctgggaaagtgccgggtgtggggctgccaggtgtatacccaggtggcgtgctcccaggagctcggttccccggtgtgggggtgctccctggagttcccactggagcaggagttaagcccaaggctccaggtgtaggtggagcttttgctggaatcccaggagttggaccctttgggggaccgcaacctggagtcccactggggtatcccatcaaggcccccaagctgcctggtggctatggactgccctacaccacagggaaactgccctatggctatgggcccggaggagtggctggtgcagcgggcaaggctggttacccaacagggacaggggttggcccccaggcagcagcagcagcggcagctaaagcagcagcaaagttcggtgctggagcagccggagtcctccctggtgttggaggggctggtgttcctggcgtgcctggggcaattcctggaattggaggcatcgcaggcgttgggactccagctgcagctgcagctgcagcagcagccgctaaggcagccaagtatggagctgctgcaggcttagtgcctggtgggccaggctttggcccgggagtagttggtgtcccaggagctggcgttccaggtgttggtgtcccaggagctgggattccagttgtcccaggtgctgggatcccaggtgctgcggttccaggggttgtgtcaccagaagcagctgctaaggcagctgcaaaggcagccaaatacggggccaggcccggagtcggagttggaggcattcctacttacggggttggagctgggggctttcccggctttggtgtcggagtcggaggtatccctggagtcgcaggtgtccctggtgtcggaggtgttcccggagtcggaggtgtcccgggagttggcatttcccccgaagctcaggcagcagctgccgccaaggctgccaagtacggagtggggaccccagcagctgcagctgctaaagcagccgccaaagccgcccagtttgggttagttcctggtgtcggcgtggctcctggagttggcgtggctcctggtgtcggtgtggctcctggagttggcttggctcctggagttggcgtggctcctggagttggtgtggctcctggcgttggcgtggctcccggcattggccctggtggagttgcagctgcagcaaaatccgctgccaaggtggctgccaaagcccagctccgagctgcagctgggcttggtgctggcatccctggacttggagttggtgtcggcgtccctggacttggagttggtgctggtgttcctggacttggagttggtgctggtgttcctggcttcggggcagtacctggagccctggctgccgctaaagcagccaaatatggagcagcagtgcctggggtccttggagggctcggggctctcggtggagtaggcatcccaggcggtgtggtgggagccggacccgccgccgccgctgccgcagccaaagctgctgccaaagccgcccagtttggcctagtgggagccgctgggctcggaggactcggagtcggagggcttggagttccaggtgttgggggccttggaggtatacctccagctgcagccgctaaagcagctaaatacggtgctgctggccttggaggtgtcctagggggtgccgggcagttcccacttggaggagtggcagcaagacctggcttcggattgtctcccattttcccaggtggggcctgcctggggaaagcttgtggccggaagagaaaatgagcttcctaggacccctgactcacgacctcatcaacgttggtgctactgcttggtggagaatgtaaaccctttgtaaccccatcccatgcccctccgactccccaccccaggagggaacgggcaggccgggcggccttgcagatccacagggcaaggaaacaagaggggagcggccaagtgccccgaccaggaggccccctacttcagaggcaagggccatgtggtcctggccccccaccccatcccttcccacctaggagctccccctccacacagcctccatctccaggggaacttggtgctacacgctggtgctcttatcttcctggggggagggaggagggaagggtggcccctcggggaaccccctacctggggctcctctaaagatggtgcagacacttcctgggcagtcccagctccccctgcccaccaggacccaccgttggctgccatccagttggtacccaagcacctgaagcctcaaagctggattcgctctagcatccctcctctcctgggtccacttggccgtctcctccccaccgatcgctgttccccacatctggggcgcttttgggttggaaaaccaccccacactgggaatagccaccttgcccttgtagaatccatccgcccatccgtccattcatccatcggtccgtccatccatgtccccagttgaccgcccggcaccactagctggctgggtgcacccaccatcaacctggttgacctgtcatggccgcctgtgccctgcctccacccccatcctacactcccccagggcgtgcggggctgtgcagactggggtgccaggcatctcctccccacccggggtgtccccacatgcagtactgtataccccccatccctccctcggtccactgaacttcagagcagttcccattcctgccccgcccatctttttgtgtctcgctgtgatagatcaataaatattttattttttgtcctgg

SEQ ID NO: 6471 - DNA, 3361 bp, Homo sapiens
  source 1..3361: mol_type = unassigned DNA; mol_type = unassigned DNA
ggggcatttctccccgagatggcgggtctgacggcggcggccccgcggcccggagtcctcctgctcctgctgtccatcctccacccctctcggcctggaggggtccctggggccattcctggtggagttcctggaggagtcttttatccaggggctggtctcggagcccttggaggaggagcgctggggcctggaggcaaacctcttaagccagttcccggagggcttgcgggtgctggccttggggcagggctcggcgccttccccgcagttacctttccgggggctctggtgcctggtggagtggctgacgctgctgcagcctataaagctgctaaggctggcgctgggcttggtggtgtcccaggagttggtggcttaggagtgtctgcagccccttctgtgccaggtgcggtggttcctcagcctggagccggagtgaagcctgggaaagtgccgggtgtggggctgccaggtgtatacccaggtggcgtgctcccaggagctcggttccccggtgtgggggtgctccctggagttcccactggagcaggagttaagcccaaggctccaggtgtaggtggagcttttgctggaatcccaggagttggaccctttgggggaccgcaacctggagtcccactggggtatcccatcaaggcccccaagctgcctggtggctatggactgccctacaccacagggaaactgccctatggctatgggcccggaggagtggctggtgcagcgggcaaggctggttacccaacagggacaggggttggcccccaggcagcagcagcagcggcagctaaagcagcagcaaagttcggtgctggagcagccggagtcctccctggtgttggaggggctggtgttcctggcgtgcctggggcaattcctggaattggaggcatcgcaggcgttgggactccagctgcagctgcagctgcagcagcagccgctaaggcagccaagtatggagctgctgcaggcttagtgcctggtgggccaggctttggcccgggagtagttggtgtcccaggagctggcgttccaggtgttggtgtcccaggagctgggattccagttgtcccaggtgctgggatcccaggtgctgcggttccaggggttgtgtcaccagaagcagctgctaaggcagctgcaaaggcagccaaatacggggccaggcccggagtcggagttggaggcattcctacttacggggttggagctgggggctttcccggctttggtgtcggagtcggaggtatccctggagtcgcaggtgtccctggtgtcggaggtgttcccggagtcggaggtgtcccgggagttggcatttcccccgaagctcaggcagcagctgccgccaaggctgccaagtacggagtggggaccccagcagctgcagctgctaaagcagccgccaaagccgcccagtttgggttagttcctggtgtcggcgtggctcctggagttggcgtggctcctggtgtcggtgtggctcctggagttggcttggctcctggagttggcgtggctcctggagttggtgtggctcctggcgttggcgtggctcccggcattggccctggtggagttgcagctgcagcaaaatccgctgccaaggtggctgccaaagcccagctccgagctgcagctgggcttggtgctggcatccctggacttggagttggtgtcggcgtccctggacttggagttggtgctggtgttcctggacttggagttggtgctggtgttcctggcttcggggcagtacctggagccctggctgccgctaaagcagccaaatatggagcagcagtgcctggggtccttggagggctcggggctctcggtggagtaggcatcccaggcggtgtggtgggagccggacccgccgccgccgctgccgcagccaaagctgctgccaaagccgcccagtttggcctagtgggagccgctgggctcggaggactcggagtcggagggcttggagttccaggtgttgggggccttggaggtatacctccagctgcagccgctaaagcagctaaatacggagtggcagcaagacctggcttcggattgtctcccattttcccaggtggggcctgcctggggaaagcttgtggccggaagagaaaatgagcttcctaggacccctgactcacgacctcatcaacgttggtgctactgcttggtggagaatgtaaaccctttgtaaccccatcccatgcccctccgactccccaccccaggagggaacgggcaggccgggcggccttgcagatccacagggcaaggaaacaagaggggagcggccaagtgccccgaccaggaggccccctacttcagaggcaagggccatgtggtcctggccccccaccccatcccttcccacctaggagctccccctccacacagcctccatctccaggggaacttggtgctacacgctggtgctcttatcttcctggggggagggaggagggaagggtggcccctcggggaaccccctacctggggctcctctaaagatggtgcagacacttcctgggcagtcccagctccccctgcccaccaggacccaccgttggctgccatccagttggtacccaagcacctgaagcctcaaagctggattcgctctagcatccctcctctcctgggtccacttggccgtctcctccccaccgatcgctgttccccacatctggggcgcttttgggttggaaaaccaccccacactgggaatagccaccttgcccttgtagaatccatccgcccatccgtccattcatccatcggtccgtccatccatgtccccagttgaccgcccggcaccactagctggctgggtgcacccaccatcaacctggttgacctgtcatggccgcctgtgccctgcctccacccccatcctacactcccccagggcgtgcggggctgtgcagactggggtgccaggcatctcctccccacccggggtgtccccacatgcagtactgtataccccccatccctccctcggtccactgaacttcagagcagttcccattcctgccccgcccatctttttgtgtctcgctgtgatagatcaataaatattttattttttgtcctggatatttggggattatttttgattgttgatattctcttttggttttattgttgtggttcattgaaaaaaaaagataatttttttttctgatccggggagctgtatccccagtagaaaaaacattttaatcactctaatataactctggatgaaacacacctttttttttaataagaaaagagaattaactgcttcagaaatgactaataaatgaaaaacctttaaaggaaa

SEQ ID NO: 6472 - DNA, 558 bp, Homo sapiens
  source 1..558: mol_type = unassigned DNA; mol_type = unassigned DNA
gcatttctccccgagatggcgggtctgacggcggcggccccgcggcccggagtcctcctgctcctgctgtccatcctccacccctctcggcctggaggggtccctggggccattcctggtggagttcctggaggagtcttttatccaggggctggtctcggagcccttggaggaggagcgctggggcctggaggcaaacctcttaagccagttcccggagggcttgcgggtgctggccttggggcagggctcggcgccttccccgcagttacctttccgggggctctggtgcctggtggagtggctgacgctgctgcagcctataaagctgctaaggctggcgctgggcttggtggtgtcccaggagttggtggcttaggagtgtctgcaggtgcggtggttcctcagcctggagccggagtgaagcctgggaaagtgccgggtcagtgcggaatccctggggctggaggacagagggcagggaggggcagagggcagggaggaacagagccctctccatgccactgcacttggggaggaagggcagggcctggcttc

SEQ ID NO: 6473 - DNA, 542 bp, Homo sapiens
  source 1..542: mol_type = unassigned DNA; mol_type = unassigned DNA
gcatttctccccgagatggcgggtctgacggcggcggccccgcggcccggagtcctcctgctcctgctgtccatcctccacccctctcggcctggaggggtccctggggccattcctggtggagttcctggaggagtcttttatccaggggctggtctcggagcccttggaggaggagcgctggggcctggaggcaaacctcttaagccagggctcggcgccttccccgcagttacctttccgggggctctggtgcctggtggagtggctgacgctgctgcagcctataaagctgctaaggctggcgctgggcttggtggtgtcccaggagttggtggcttaggagtgtctgcaggtgcggtggttcctcagcctggagccggagtgaagcctgggaaagtgccgggtgtggggctgccaggtgtatacccaggtggcgtgctcccaggagctcggttccccggtgtgggggtgctccctggagttcccactggagcaggagttaagcccaaggctccaggtatgcagctgtctggacagag

SEQ ID NO: 6474 - DNA, 658 bp, Homo sapiens
  source 1..658: mol_type = unassigned DNA; mol_type = unassigned DNA
gcatttctccccgagatggcgggtctgacggcggcggccccgcggcccggagtcctcctgctcctgctgtccatcctccacccctctcggcctggaggggtccctggggccattcctggtggagttcctggaggagtcttttatccaggggctggtctcggagcccttggaggaggagcgctggggcctggaggcaaacctcttaagccagttcccggagggcttgcgggtgctggccttggggcagggctcggcgccttccccgcagttacctttccgggggctctggtgcctggtggagtggctgacgctgctgcagcctataaagctgctaaggctggcgctgggcttggtggtgtcccaggagttggtggcttaggagtgtctgcaggtgcggtggttcctcagcctggagccggagtgaagcctgggaaagtgccgggtgtggggctgccaggtgtatacccaggtggcgtgctcccaggagttggaccctttgggggaccgcaacctggagtcccactggggtatcccatcaaggcccccaagctgcctggtggctatggactgccctacaccacagggaaactgccctatggctatgggcccggaggagtggctggtgcagcgggcaaggctggttacccaacagggacag

SEQ ID NO: 6475 - DNA, 3298 bp, Homo sapiens
  source 1..3298: mol_type = unassigned DNA; mol_type = unassigned DNA
gcatttctccccgagatggcgggtctgacggcggcggccccgcggcccggagtcctcctgctcctgctgtccatcctccacccctctcggcctggaggggtccctggggccattcctggtggagttcctggaggagtcttttatccaggggctggtctcggagcccttggaggaggagcgctggggcctggaggcaaacctcttaagccagttcccggagggcttgcgggtgctggccttggggcagggctcggcgccttccccgcagttacctttccgggggctctggtgcctggtggagtggctgacgctgctgcagcctataaagctgctaaggctggcgctgggcttggtggtgtcccaggagttggtggcttaggagtgtctgcagccccttctgtgccaggtgcggtggttcctcagcctggagccggagtgaagcctgggaaagtgccgggtgtggggctgccaggtgtatacccaggtggcgtgctcccaggagctcggttccccggtgtgggggtgctccctggagttcccactggagcaggagttaagcccaaggctccaggtgtaggtggagcttttgctggaatcccaggagttggaccctttgggggaccgcaacctggagtcccactggggtatcccatcaaggcccccaagctgcctggtggctatggactgccctacaccacagggaaactgccctatggctatgggcccggaggagtggctggtgcagcgggcaaggctggttacccaacagggacaggggttggcccccaggcagcagcagcagcggcagctaaagcagcagcaaagttcggtgctggagcagccggagtcctccctggtgttggaggggctggtgttcctggcgtgcctggggcaattcctggaattggaggcatcgcaggcgttgggactccagctgcagctgcagctgcagcagcagccgctaaggcagccaagtatggagctgctgcaggcttagtgcctggtgggccaggctttggcccgggagtagttggtgtcccaggagctggcgttccaggtgttggtgtcccaggagctgggattccagttgtcccaggtgctgggatcccaggtgctgcggttccaggggttgtgtcaccagaagcagctgctaaggcagctgcaaaggcagccaaatacggggccaggcccggagtcggagttggaggcattcctacttacggggttggagctgggggctttcccggctttggtgtcggagtcggaggtatccctggagtcgcaggtgtccctggtgtcggaggtgttcccggagtcggaggtgtcccgggagttggcatttcccccgaagctcaggcagcagctgccgccaaggctgccaagtacgggttagttcctggtgtcggcgtggctcctggagttggcgtggctcctggtgtcggtgtggctcctggagttggcttggctcctggagttggcgtggctcctggagttggtgtggctcctggcgttggcgtggctcccggcattggccctggtggagttgcagctgcagcaaaatccgctgccaaggtggctgccaaagcccagctccgagctgcagctgggcttggtgctggcatccctggacttggagttggtgtcggcgtccctggacttggagttggtgctggtgttcctggacttggagttggtgctggtgttcctggcttcggggcagtacctggagccctggctgccgctaaagcagccaaatatggagcagcagtgcctggggtccttggagggctcggggctctcggtggagtaggcatcccaggcggtgtggtgggagccggacccgccgccgccgctgccgcagccaaagctgctgccaaagccgcccagtttggcctagtgggagccgctgggctcggaggactcggagtcggagggcttggagttccaggtgttgggggccttggaggtatacctccagctgcagccgctaaagcagctaaatacggagtggcagcaagacctggcttcggattgtctcccattttcccaggtggggcctgcctggggaaagcttgtggccggaagagaaaatgagcttcctaggacccctgactcacgacctcatcaacgttggtgctactgcttggtggagaatgtaaaccctttgtaaccccatcccatgcccctccgactccccaccccaggagggaacgggcaggccgggcggccttgcagatccacagggcaaggaaacaagaggggagcggccaagtgccccgaccaggaggccccctacttcagaggcaagggccatgtggtcctggccccccaccccatcccttcccacctaggagctccccctccacacagcctccatctccaggggaacttggtgctacacgctggtgctcttatcttcctggggggagggaggagggaagggtggcccctcggggaaccccctacctggggctcctctaaagatggtgcagacacttcctgggcagtcccagctccccctgcccaccaggacccaccgttggctgccatccagttggtacccaagcacctgaagcctcaaagctggattcgctctagcatccctcctctcctgggtccacttggccgtctcctccccaccgatcgctgttccccacatctggggcgcttttgggttggaaaaccaccccacactgggaatagccaccttgcccttgtagaatccatccgcccatccgtccattcatccatcggtccgtccatccatgtccccagttgaccgcccggcaccactagctggctgggtgcacccaccatcaacctggttgacctgtcatggccgcctgtgccctgcctccacccccatcctacactcccccagggcgtgcggggctgtgcagactggggtgccaggcatctcctccccacccggggtgtccccacatgcagtactgtataccccccatccctccctcggtccactgaacttcagagcagttcccattcctgccccgcccatctttttgtgtctcgctgtgatagatcaataaatattttattttttgtcctggatatttggggattatttttgattgttgatattctcttttggttttattgttgtggttcattgaaaaaaaaagataatttttttttctgatccggggagctgtatccccagtagaaaaaacattttaatcactctaatataactctggatgaaacacacctttttttttaataagaaaagagaattaactgcttcagaaatgactaataaatgaaaaacctttaaagg

SEQ ID NO: 6476 - DNA, 714 bp, Homo sapiens
  source 1..714: mol_type = unassigned DNA; mol_type = unassigned DNA
atttctccccgagatggcgggtctgacggcggcggccccgcggcccggagtcctcctgctcctgctgtccatcctccacccctctcggcctggaggggtccctggggccattcctggtggagttcctggaggagtcttttatccaggtaacgtacatgaaacttccacacacccaggtcatgcggatgatgctgatgtccataatagatgcacattttgacactacagaaggtaggaacattgacacgcctaccagaagtcacacccacttaaaaatgcaattaacaagacattgatttacagctattaagagcatacaggctggacatggtggcttatgcctgtaatctcaacactctgggaggcagagaaacaaggattgcttgaggccaggagtttcagaccagcctggacaacatagggctggtctcggagcccttggaggaggagcgctggggcctggaggcaaacctcttaagccagttcccggagggcttgcgggtgctggccttggggcagggctcggcgccttccccgcagttacctttccgggggctctggtgcctggtggagtggctgacgctgctgcagcctataaagctgctaaggctggcgctgggcttggtggtgtcccaggagttggtggcttaggagtgtctgcaggtgcggtggttcctcagcctggagccggagtgaagcctgggaaagtgccgg

SEQ ID NO: 6477 - DNA, 542 bp, Homo sapiens
  source 1..542: mol_type = unassigned DNA; mol_type = unassigned DNA
atttctccccgagatggcgggtctgacggcggcggccccgcggcccggagtcctcctgctcctgctgtccatcctccacccctctcggcctggaggggtccctggggccattcctggtggagttcctggaggagtcttttatccaggggctggtctcggagcccttggaggaggagcgctggggcctggaggcaaacctcttaagccagttcccggagggcttgcgggtgctggccttggggcagggctcggcgccttccccgcagttacctttccgggggctctggtgcctggtggagtggctgacgctgctgcagcctataaagctgctaaggctggcgctgggcttggtggtgtcccaggagttggtggcttaggagtgtctgcaggtgcggtggttcctcagcctggagccggagtgaagcctgggaaagtgccgggtgtaggtggagcttttgctggaatcccaggagttggaccctttgggggaccgcaacctggagtcccactggggtatcccatcaaggcccccaagctgcctg

SEQ ID NO: 6478 - DNA, 2703 bp, Homo sapiens
  source 1..2703: mol_type = unassigned DNA; mol_type = unassigned DNA
atttctccccgagatggcgggtctgacggcggcggccccgcggcccggagtcctcctgctcctgctgtccatcctccacccctctcggcctggaggggtccctggggccattcctggtggagttcctggaggagtcttttatccaggggctggtctcggagcccttggaggaggagcgctggggcctggaggcaaacctcttaagccagttcccggagggcttgcgggtgctggccttggggcaggtgtaggtggagcttttgctggaatcccaggagttggaccctttgggggaccgcaacctggagtcccactggggtatcccatcaaggcccccaagctgcctggctatgggcccggaggagtggctggtgcagcgggcaaggctggttacccaacagggacaggggttggcccccaggcagcagcagcagcggcagctaaagcagcagcaaagttcggtgctggagcagccggagtcctccctggtgttggaggggctggtgttcctggcgtgcctggggcaattcctggaattggaggcatcgcaggcgttgggactccagctgcagctgcagctgcagcagcagccgctaaggcagccaagtatggagctgctgcaggcttagtgcctggtgggccaggctttggcccgggagtagttggtgtcccaggagctggcgttccaggtgttggtgtcccaggagctgggattccagttgtcccaggtgctgggatcccaggtgctgcggttccaggggttgtgtcaccagaagcagctgctaaggcagctgcaaaggcagccaaatacggggccaggcccggagtcggagttggaggcattcctacttacggggttggagctgggggctttcccggctttggtgtcggagtcggaggtatccctggagtcgcaggtgtccctggtgtcggaggtgttcccggagtcggaggtgtcccgggagttggcatttcccccgaagctcaggcagcagctgccgccaaggctgccaagtacgggttagttcctggtgtcggcgtggctcctggagttggcgtggctcctggtgtcggtgtggctcctggagttggcttggctcctggagttggcgtggctcctggagttggtgtggctcctggcgttggcgtggctcccggcattggccctggtggagttgcagctgcagcaaaatccgctgccaaggtggctgccaaagcccagctccgagctgcagctgggcttggtgctggcatccctggacttggagttggtgtcggcgtccctggacttggagttggtgctggtgttcctggacttggagttggtgctggtgttcctggcttcggggcagtacctggagccctggctgccgctaaagcagccaaatatggagcagcagtgcctggggtccttggagggctcggggctctcggtggagtaggcatcccaggcggtgtggtgggagccggacccgccgccgccgctgccgcagccaaagctgctgccaaagccgcccagtttggcctagtgggagccgctgggctcggaggactcggagtcggagggcttggagttccaggtgttgggggccttggaggtatacctccagctgcagccgctaaagcagctaaatacggagtggcagcaagacctggcttcggattgtctcccattttcccaggtggggcctgcctggggaaagcttgtggccggaagagaaaatgagcttcctaggacccctgactcacgacctcatcaacgttggtgctactgcttggtggagaatgtaaaccctttgtaaccccatcccatgcccctccgactccccaccccaggagggaacgggcaggccgggcggccttgcagatccacagggcaaggaaacaagaggggagcggccaagtgccccgaccaggaggccccctacttcagaggcaagggccatgtggtcctggccccccaccccatcccttcccacctaggagctccccctccacacagcctccatctccaggggaacttggtgctacacgctggtgctcttatcttcctggggggagggaggagggaagggtggcccctcggggaaccccctacctggggctcctctaaagatggtgcagacacttcctgggcagtcccagctccccctgcccaccaggacccaccgttggctgccatccagttggtacccaagcacctgaagcctcaaagctggattcgctctagcatccctcctctcctgggtccacttggccgtctcctccccaccgatcgctgttccccacatctggggcgcttttgggttggaaaaccaccccacactgggaatagccaccttgcccttgtagaatccatccgcccatccgtccattcatccatcggtccgtccatccatgtccccagttgaccgcccggcaccactagctggctgggtgcacccaccatcaacctggttgacctgtcatggccgcctgtgccctgcctccacccccatcctacactcccccagggcgtgcggggctgtgcagactggggtgccaggcatctcctccccacccggggtgtccccacatgcagtactgtataccccccatccctccctcggtccactgaacttcagagcagttcccattcctgccccgcccatctttttgtgtctcgctgtgatagatcaataaatattttattttttgtcctgg

SEQ ID NO: 6479 - DNA, 3109 bp, Homo sapiens
  source 1..3109: mol_type = unassigned DNA; mol_type = unassigned DNA
atttctccccgagatggcgggtctgacggcggcggccccgcggcccggagtcctcctgctcctgctgtccatcctccacccctctcggcctggaggggtccctggggccattcctggtggagttcctggaggagtcttttatccaggggctggtctcggagcccttggaggaggagcgctggggcctggaggcaaacctcttaagccagttcccggagggcttgcgggtgctggccttggggcagggctcggcgccttccccgcagttacctttccgggggctctggtgcctggtggagtggctgacgctgctgcagcctataaagctgctaaggctggcgctgggcttggtggtgtcccaggagttggtggcttaggagtgtctgcaggtgcggtggttcctcagcctggagccggagtgaagcctgggaaagtgccgggtgtggggctgccaggtgtatacccaggtggcgtgctcccaggagctcggttccccggtgtgggggtgctccctggagttcccactggagcaggagttaagcccaaggctccaggtgtaggtggagcttttgctggaatcccaggagttggaccctttgggggaccgcaacctggagtcccactggggtatcccatcaaggcccccaagctgcctggtggctatggactgccctacaccacagggaaactgccctatggctatgggcccggaggagtggctggtgcagcgggcaaggctggttacccaacagggacaggggttggcccccaggcagcagcagcagcggcagctaaagcagcagcaaagttcggtgctggagcagccggagtcctccctggtgttggaggggctggtgttcctggcgtgcctggggcaattcctggaattggaggcatcgcaggcgttgggactccagctgcagctgcagctgcagcagcagccgctaaggcagccaagtatggagctgctgcaggcttagtgcctggtgggccaggctttggcccgggagtagttggtgtcccaggagctggcgttccaggtgttggtgtcccaggagctgggattccagttgtcccaggtgctgggatcccaggtgctgcggttccaggggttgtgtcaccagaagcagctgctaaggcagctgcaaaggcagccaaatacggggccaggcccggagtcggagttggaggcattcctacttacggggttggagctgggggctttcccggctttggtgtcggagtcggaggtatccctggagtcgcaggtgtccctggtgtcggaggtgttcccggagtcggaggtgtcccgggagttggcatttcccccgaagctcaggcagcagctgccgccaaggctgccaagtacgggttagttcctggtgtcggcgtggctcctggagttggcgtggctcctggtgtcggtgtggctcctggagttggcttggctcctggagttggcgtggctcctggagttggtgtggctcctggcgttggcgtggctcccggcattggccctggtggagttgcagctgcagcaaaatccgctgccaaggtggctgccaaagcccagctccgagctgcagctgggcttggtgctggcatccctggacttggagttggtgtcggcgtccctggacttggagttggtgctggtgttcctggacttggagttggtgctggtgttcctggcttcggggcagtacctggagccctggctgccgctaaagcagccaaatatggagcagcagtgcctggggtccttggagggctcggggctctcggtggagtaggcatcccaggcggtgtggtgggagccggacccgccgccgccgctgccgcagccaaagctgctgccaaagccgcccagtttggcctagtgggagccgctgggctcggaggactcggagtcggagggcttggagttccaggtgttgggggccttggaggtatacctccagctgcagccgctaaagcagctaaatacggtgctgctggccttggaggtgtcctagggggtgccgggcagttcccacttggaggagtggcagcaagacctggcttcggattgtctcccattttcccaggtggggcctgcctggggaaagcttgtggccggaagagaaaatgagcttcctaggacccctgactcacgacctcatcaacgttggtgctactgcttggtggagaatgtaaaccctttgtaaccccatcccatgcccctccgactccccaccccaggagggaacgggcaggccgggcggccttgcagatccacagggcaaggaaacaagaggggagcggccaagtgccccgaccaggaggccccctacttcagaggcaagggccatgtggtcctggccccccaccccatcccttcccacctaggagctccccctccacacagcctccatctccaggggaacttggtgctacacgctggtgctcttatcttcctggggggagggaggagggaagggtggcccctcggggaaccccctacctggggctcctctaaagatggtgcagacacttcctgggcagtcccagctccccctgcccaccaggacccaccgttggctgccatccagttggtacccaagcacctgaagcctcaaagctggattcgctctagcatccctcctctcctgggtccacttggccgtctcctccccaccgatcgctgttccccacatctggggcgcttttgggttggaaaaccaccccacactgggaatagccaccttgcccttgtagaatccatccgcccatccgtccattcatccatcggtccgtccatccatgtccccagttgaccgcccggcaccactagctggctgggtgcacccaccatcaacctggttgacctgtcatggccgcctgtgccctgcctccacccccatcctacactcccccagggcgtgcggggctgtgcagactggggtgccaggcatctcctccccacccggggtgtccccacatgcagtactgtataccccccatccctccctcggtccactgaacttcagagcagttcccattcctgccccgcccatctttttgtgtctcgctgtgatagatcaataaatattttattttttgtcctgga

SEQ ID NO: 6480 - DNA, 474 bp, Homo sapiens
  source 1..474: mol_type = unassigned DNA; mol_type = unassigned DNA
tttctccccgagatggcgggtctgacggcggcggccccgcggcccggagtcctcctgctcctgctgtccatcctccacccctctcggcctggaggggtccctggggccattcctggtggagttcctggaggagtcttttatccaggggctggtctcggagcccttggaggaggagcgctggggcctggaggcaaacctcttaagccagggctcggcgccttccccgcagttacctttccgggggctctggtgcctggtggagtggctgacgctgctgcagcctataaagctgctaaggctggcgctgggcttggtggtgtcccaggagttggtggcttaggagtgtctgcaggtgcggtggttcctcagcctggagccggagtgaagcctgggaaagtgccgggtcagtgcggaatccctggggctggaggacagagggcagggaggggcagagggcagggaggaacagagccc

SEQ ID NO: 6481 - DNA, 512 bp, Homo sapiens
  source 1..512: mol_type = unassigned DNA; mol_type = unassigned DNA
tttctccccgagatggcgggtctgacggcggcggccccgcggcccggagtcctcctgctcctgctgtccatcctccacccctctcggcctggaggggtccctggggccattcctggtggagttcctggaggagtcttttatccaggggctggtctcggagcccttggaggaggagcgctggggcctggaggcaaacctcttaagccagttcccggagggcttgcgggtgctggccttggggcagggctcggcgccttccccgcagttacctttccgggggctctggtgcctggtggagtggctgacgctgctgcagcctataaagctgctaaggctggagttggaccctttgggggaccgcaacctggagtcccactggggtatcccatcaaggcccccaagctgcctggtggctatggactgccctacaccacagggaaactgccctatggctatgggcccggaggagtggctggtgcagcgggcaaggctggttacccaacagggacagg

SEQ ID NO: 6482 - DNA, 2274 bp, Homo sapiens
  source 1..2274: mol_type = unassigned DNA; mol_type = unassigned DNA
atggcgggtctgacggcggcggccccgcggcccggagtcctcctgctcctgctgtccatcctccacccctctcggcctggaggggtccctggggccattcctggtggagttcctggaggagtcttttatccaggggctggtctcggagcccttggaggaggagcgctggggcctggaggcaaacctcttaagccagttcccggagggcttgcgggtgctggccttggggcagggctcggcgccttccccgcagttacctttccgggggctctggtgcctggtggagtggctgacgctgctgcagcctataaagctgctaaggctggcgctgggcttggtggtgtcccaggagttggtggcttaggagtgtctgcaggtgcggtggttcctcagcctggagccggagtgaagcctgggaaagtgccgggtgtggggctgccaggtgtatacccaggtggcgtgctcccaggagctcggttccccggtgtgggggtgctccctggagttcccactggagcaggagttaagcccaaggctccaggtgtaggtggagcttttgctggaatcccaggagttggaccctttgggggaccgcaacctggagtcccactggggtatcccatcaaggcccccaagctgcctggtggctatggactgccctacaccacagggaaactgccctatggctatgggcccggaggagtggctggtgcagcgggcaaggctggttacccaacagggacaggggttggcccccaggcagcagcagcagcggcagctaaagcagcagcaaagttcggtgctggagcagccggagtcctccctggtgttggaggggctggtgttcctggcgtgcctggggcaattcctggaattggaggcatcgcaggcgttgggactccagctgcagctgcagctgcagcagcagccgctaaggcagccaagtatggagctgctgcaggcttagtgcctggtgggccaggctttggcccgggagtagttggtgtcccaggagctggcgttccaggtgttggtgtcccaggagctgggattccagttgtcccaggtgctgggatcccaggtgctgcggttccaggggttgtgtcaccagaagcagctgctaaggcagctgcaaaggcagccaaatacggggccaggcccggagtcggagttggaggcattcctacttacggggttggagctgggggctttcccggctttggtgtcggagtcggaggtatccctggagtcgcaggtgtccctggtgtcggaggtgttcccggagtcggaggtgtcccgggagttggcatttcccccgaagctcaggcagcagctgccgccaaggctgccaagtacggagtggggaccccagcagctgcagctgctaaagcagccgccaaagccgcccagtttgggttagttcctggtgtcggcgtggctcctggagttggcgtggctcctggtgtcggtgtggctcctggagttggcttggctcctggagttggcgtggctcctggagttggtgtggctcctggcgttggcgtggctcccggcattggccctggtggagttgcagctgcagcaaaatccgctgccaaggtggctgccaaagcccagctccgagctgcagctgggcttggtgctggcatccctggacttggagttggtgtcggcgtccctggacttggagttggtgctggtgttcctggacttggagttggtgctggtgttcctggcttcggggcaggtgcagatgagggagttaggcggagcctgtcccctgagctcagggaaggagatccctcctcctctcagcacctccccagcaccccctcatcacccagggtacctggagccctggctgccgctaaagcagccaaatatggagcagcagtgcctggggtccttggagggctcggggctctcggtggagtaggcatcccaggcggtgtggtgggagccggacccgccgccgccgctgccgcagccaaagctgctgccaaagccgcccagtttggcctagtgggagccgctgggctcggaggactcggagtcggagggcttggagttccaggtgttgggggccttggaggtatacctccagctgcagccgctaaagcagctaaatacggtgctgctggccttggaggtgtcctagggggtgccgggcagttcccacttggaggagtggcagcaagacctggcttcggattgtctcccattttcccaggtggggcctgcctggggaaagcttgtggccggaagagaaaatga

SEQ ID NO: 6483 - DNA, 489 bp, Homo sapiens
  source 1..489: mol_type = unassigned DNA; mol_type = unassigned DNA
gttacctttccgggggctctggtgcctggtggagtggctgacgctgctgcagcctataaagctgctaaggctggcgctgggcttggtggtgtcccaggagttggtggcttaggagtgtctgcaggtgcggtggttcctcagcctggagccggagtgaagcctgggaaagtgccggccctttaggaagtgacttcaggttaaacaaaagactgcctgagtctacgcagcagggagggacatctggaagctgttagccagaggtgggctggcccagccatgtaaacaggctccaggagacggagataaatccacacaccgaagagtttgcagatgacttccgaaactcgtgggaggagggttgtggccaccccacgtctgtccctggctgcccctgtcgggcacagaggctgtgtggggctgccaggtgtatacccaggtggcgtgctcccaggagctcggttccccggtgtgggggtgctccctggagtt

SEQ ID NO: 6484 - DNA, 570 bp, Homo sapiens
  source 1..570: mol_type = unassigned DNA; mol_type = unassigned DNA
agagggccagatgcagtggctcatgcctgtaatcccagcactttgggaggccgaggtgggcggatcacctgaggtcagcctgaccaacacggtgaagccctgtctctactaataatacaaaaattagctgggcgtggtggcctgcacctgtaatcccagctacttgggaggctgaggcgggagaatcgccagaacctgggaggcagaggttgcggtgagttgagatcaccccattccaccccagcctgggcgacaagagcgaaactccatctccgaaaaaagaaaccccagagttcatgtgagcgcagcatgcgatgactggtctgggaagaactggccattccttgggcctcctggccccttggtgctgtctggcccagtgtccacagttccagggctgtagtgacagctttttatcattacaggtgtaggtggagcttttgctggaatcccaggagttggaccctttgggggaccgcaacctggagtcccactggggtatcccatcaaggcccccaagctgcctggtggctatggactgccctacaccacagggaaactgccctatgg

SEQ ID NO: 6485 - DNA, 752 bp, Homo sapiens
  source 1..752: mol_type = unassigned DNA; mol_type = unassigned DNA
gtgctgggacctgaacttgctctctttattcccacaggagttggaccctttgggggaccgcaacctggagtcccactggggtatcccatcaaggcccccaagctgcctggtggctatggactgccctacaccacagggaaactgccctatggctatgggcccggaggagtggctggtgcagcgggcaaggctggttacccaacagggacaggggttggcccccaggcagcagcagcagcggcagctaaagcagcagcaaagttcggtgctggagcagccggagtcctccctggtgttggaggggctggtgttcctggcgtgcctggggcaattcctggaattggaggcatcgcaggtaacatctgtcccagcagggggcgggtgtgtccttgagatggccacagggcaaggacctcaccctctgtggctgtgttttcaggcgttgggactccagctgcagctgcagctgcagcagcagccgctaaggcagccaagtatggtgagtgcctcccggggtggcaagtccacggctcgggcccctgcatagacctcggagaccctagccgcaaagccagatggacttggcctttgttccttcccaaatatgcattgttcatgcctccttacctttgccccttctgatcactctacctgagatgccatctctattgttttgccctgattaactcagcagagggaggggaccctgcagaggggacatggctcctcccactccatcccctccagggcca

SEQ ID NO: 6486 - DNA, 564 bp, Homo sapiens
  source 1..564: mol_type = unassigned DNA; mol_type = unassigned DNA
gtgctttaggaatagatcacattctagctatgcacagtggctcacgcctgtaatcccaacaatttgggaggctaaaaccaggagtttgagaccagcctgagcaacatactgagaccccatctttccaaaaagtatttaaaaattatctaggcatggtggcacatgcctgtggtcccagccacctgcaaggctgaggtgagaggattgcttgagcctagtagttcaaggctgcagtgagctatgatcatgccactgcactccagcctgggagctgctgcaggcttagtgcctggtgggccaggctttggcccgggagtagttggtgtcccaggagctggcgttccaggtgttggtgtcccaggagctgggattccagttgtcccaggtgctgggatcccaggtgctgcggttccaggggttgtgtcaccagaagcagctgctaaggcagctgcaaaggcagccaaatacggggccaggcccggagtcggagttggaggcattcctacttacggggttggagctgggggctttcccggctttggtgtcggagtcggaggtatccct

SEQ ID NO: 6487 - DNA, 590 bp, Homo sapiens
  source 1..590: mol_type = unassigned DNA; mol_type = unassigned DNA
gagggagagagaaagaaagaaagagagagagagagagagaaagaaagaaagaaagagaaaggaaggaaagaaaagaaaagaaaaagaaagagatcacattcctccagctcactgattcaaatcctagagctctttagggaccctcttagtctctccacatctctctgatgagtaggatccatgcagaggaaatgtcaacccacctgcaatcctgcattcaggaccaactgtcacttccatactctactaaccacccttctagcccctctgaggttcccataggttaggggaacaatgctttttcttccacaggagctgctgcaggcttagtgcctggtgggccaggctttggcccgggagtagttggtgtcccaggagctggcgttccaggtgttggtgtcccaggagctgggattccagttgtcccaggtgctgggatcccaggtgctgcggttccaggggttgtgtcaccagaagcagctgctaaggcagctgcaaaggcagccaaatacggggccaggcccggagtcggagttggaggcattcctacttacggggttggagctgggggctttcccggctttggtgtc

SEQ ID NO: 6488 - DNA, 3452 bp, Homo sapiens
  source 1..3452: mol_type = unassigned DNA; mol_type = unassigned DNA
cctcccttctgcttcctctcccgagggctgtcctggcagaggcccccctcgctctttctggcgggaacagggccagcagcgaaagaacagtcgcagagggaaagcgggaaagagatgggggaaagtgtgtgtgtgtgagtgtgtgcttgtgtgcatgtgtgtgcgtgtgtgtgtcaaggaaaaaagctcgcagtccagcagcccgggcctgggaggcttgtgagccgggcctttcgtaattgtcccctccccgcggccccctcccccaggcctcccccctctcccgccctcccgcccgccctctctccctccctctttccctcacagccgacgaggcaacaattaggctttggggataaaacgaggtgcggagagcgggctggggcatttctccccgagatggcgggtctgacggcggcggccccgcggcccggagtcctcctgctcctgctgtccatcctccacccctctcggcctggaggggtccctggggccattcctggtggagttcctggaggagtcttttatccagcgctggggcctggaggcaaacctcttaagccagttcccggagggcttgcgggtgctggccttggggcagggctcggcgccttccccgcagttacctttccgggggctctggtgcctggtggagtggctgacgctgctgcagcctataaagctgctaaggctggcgctgggcttggtggtgtcccaggagttggtggcttaggagtgtctgcaggtgcggtggttcctcagcctggagccggagtgaagcctgggaaagtgccgggtgtggggctgccaggtgtatacccaggtggcgtgctcccaggagttggaccctttgggggaccgcaacctggagtcccactggggtatcccatcaaggcccccaagctgcctggtggctatggactgccctacaccacagggaaactgccctatggctatgggcccggaggagtggctggtgcagcgggcaaggctggttacccaacagggacaggggttggcccccaggcagcagcagcagcggcagctaaagcagcagcaaagttcggtgctggagcagccggagtcctccctggtgttggaggggctggtgttcctggcgtgcctggggcaattcctggaattggaggcatcgcaggcgttgggactccagctgcagctgcagctgcagcagcagccgctaaggcagccaagtatggagctgctgcaggcttagtgcctggtgggccaggctttggcccgggagtagttggtgtcccaggagctggcgttccaggtgttggtgtcccaggagctgggattccagttgtcccaggtgctgggatcccaggtgctgcggttccaggggttgtgtcaccagaagcagctgctaaggcagctgcaaaggcagccaaatacggggccaggcccggagtcggagttggaggcattcctacttacggggttggagctgggggctttcccggctttggtgtcggagtcggagccgaagctcaggcagcagctgccgccaaggctgccaagtacgggttagttcctggtgtcggcgtggctcctggagttggcgtggctcctggtgtcggtgtggctcctggagttggcttggctcctggagttggcgtggctcctggagttggtgtggctcctggcgttggcgtggctcccggcattggccctggtggagttgcagctgcagcaaaatccgctgccaaggtggctgccaaagcccagctccgagctgcagctgggcttggtgctggcatccctggacttggagttggtgtcggcgtccctggacttggagttggtgctggtgttcctggacttggagttggtgctggtgttcctggcttcggggcagtacctggagccctggctgccgctaaagcagccaaatatggagcagcagtgcctggggtccttggagggctcggggctctcggtggagtaggcatcccaggcggtgtggtgggagccggacccgccgccgccgctgccgcagccaaagctgctgccaaagccgcccagtttggcctagtgggagccgctgggctcggaggactcggagtcggagggcttggagttccaggtgttgggggccttggaggtatacctccagctgcagccgctaaagcagctaaatacggagtggcagcaagacctggcttcggattgtctcccattttcccaggtggggcctgcctggggaaagcttgtggccggaagagaaaatgagcttcctaggacccctgactcacgacctcatcaacgttggtgctactgcttggtggagaatgtaaaccctttgtaaccccatcccatgcccctccgactccccaccccaggagggaacgggcaggccgggcggccttgcagatccacagggcaaggaaacaagaggggagcggccaagtgccccgaccaggaggccccctacttcagaggcaagggccatgtggtcctggccccccaccccatcccttcccacctaggagctccccctccacacagcctccatctccaggggaacttggtgctacacgctggtgctcttatcttcctggggggagggaggagggaagggtggcccctcggggaaccccctacctggggctcctctaaagatggtgcagacacttcctgggcagtcccagctccccctgcccaccaggacccaccgttggctgccatccagttggtacccaagcacctgaagcctcaaagctggattcgctctagcatccctcctctcctgggtccacttggccgtctcctccccaccgatcgctgttccccacatctggggcgcttttgggttggaaaaccaccccacactgggaatagccaccttgcccttgtagaatccatccgcccatccgtccattcatccatcggtccgtccatccatgtccccagttgaccgcccggcaccactagctggctgggtgcacccaccatcaacctggttgacctgtcatggccgcctgtgccctgcctccacccccatcctacactcccccagggcgtgcggggctgtgcagactggggtgccaggcatctcctccccacccggggtgtccccacatgcagtactgtataccccccatccctccctcggtccactgaacttcagagcagttcccattcctgccccgcccatctttttgtgtctcgctgtgatagatcaataaatattttattttttgtcctggatatttggggattatttttgattgttgatattctcttttggttttattgttgtggttcattgaaaaaaaaagataatttttttttctgatccggggagctgtatccccagtagaaaaaacattttaatcactctaatataactctggatgaaacacacctttttttttaataagaaaagagaattaactgcttcagaaatgactaataaatgaaaaaccttt

SEQ ID NO: 6489 - DNA, 3967 bp, Homo sapiens
  source 1..3967: mol_type = unassigned DNA; mol_type = unassigned DNA
cctcccttctgcttcctctcccgagggctgtcctggcagaggcccccctcgctctttctggcgggaacagggccagcagcgaaagaacagtcgcagagggaaagcgggaaagagatgggggaaagtgtgtgtgtgtgagtgtgtgcttgtgtgcatgtgtgtgcgtgtgtgtgtcaaggaaaaaagctcgcagtccagcagcccgggcctgggaggcttgtgagccgggcctttcgtaattgtcccctccccgcggccccctcccccaggcctcccccctctcccgccctcccgcccgccctctctccctccctctttccctcacagccgacgaggcaacaattaggctttggggataaaacgaggtgcggagagcgggctggggcatttctccccgagatggcgggtctgacggcggcggccccgcggcccggagtcctcctgctcctgctgtccatcctccacccctctcggcctggaggggtccctggggccattcctggtggagttcctggaggagtcttttatccaggggctggtctcggagcccttggaggaggagcgctggggcctggaggcaaacctcttaagccagttcccggagggcttgcgggtgctggccttggggcagggctcggcgccttccccgcagttacctttccgggggctctggtgcctggtggagtggctgacgctgctgcagcctataaagctgctaaggctggcgctgggcttggtggtgtcccaggagttggtggcttaggagtgtctgcaggtgcggtggttcctcagcctggagccggagtgaagcctgggaaagtgccgggtgtggggctgccaggtgtatacccaggtggcgtgctcccaggagctcggttccccggtgtgggggtgctccctggagttcccactggagcaggagttaagcccaaggctccaggtgtaggtggagcttttgctggaatcccaggagttggaccctttgggggaccgcaacctggagtcccactggggtatcccatcaaggcccccaagctgcctggtggctatggactgccctacaccacagggaaactgccctatggctatgggcccggaggagtggctggtgcagcgggcaaggctggttacccaacagggacaggggttggcccccaggcagcagcagcagcggcagctaaagcagcagcaaagttcggtgctggagcagccggagtcctccctggtgttggaggggctggtgttcctggcgtgcctggggcaattcctggaattggaggcatcgcaggcgttgggactccagctgcagctgcagctgcagcagcagccgctaaggcagccaagtatggagctgctgcaggcttagtgcctggtgggccaggctttggcccgggagtagttggtgtcccaggagctggcgttccaggtgttggtgtcccaggagctgggattccagttgtcccaggtgctgggatcccaggtgctgcggttccaggggttgtgtcaccagaagcagctgctaaggcagctgcaaaggcagccaaatacggggccaggcccggagtcggagttggaggcattcctacttacggggttggagctgggggctttcccggctttggtgtcggagtcggaggtatccctggagtcgcaggtgtccctggtgtcggaggtgttcccggagtcggaggtgtcccgggagttggcatttcccccgaagctcaggcagcagctgccgccaaggctgccaagtacggtgctgcaggagcaggagtgctgggtgggctagtgccaggtgccccaggcgcagtcccaggtgtgccgggcacgggaggagtgccaggagtggggaccccagcagctgcagctgctaaagcagccgccaaagccgcccagtttgggttagttcctggtgtcggcgtggctcctggagttggcgtggctcctggtgtcggtgtggctcctggagttggcttggctcctggagttggcgtggctcctggagttggtgtggctcctggcgttggcgtggctcccggcattggccctggtggagttgcagctgcagcaaaatccgctgccaaggtggctgccaaagcccagctccgagctgcagctgggcttggtgctggcatccctggacttggagttggtgtcggcgtccctggacttggagttggtgctggtgttcctggacttggagttggtgctggtgttcctggcttcggggcaggtgcagatgagggagttaggcggagcctgtcccctgagctcagggaaggagatccctcctcctctcagcacctccccagcaccccctcatcacccagggtacctggagccctggctgccgctaaagcagccaaatatggagcagcagtgcctggggtccttggagggctcggggctctcggtggagtaggcatcccaggcggtgtggtgggagccggacccgccgccgccgctgccgcagccaaagctgctgccaaagccgcccagtttggcctagtgggagccgctgggctcggaggactcggagtcggagggcttggagttccaggtgttgggggccttggaggtatacctccagctgcagccgctaaagcagctaaatacggtgctgctggccttggaggtgtcctagggggtgccgggcagttcccacttggaggagtggcagcaagacctggcttcggattgtctcccattttcccaggtggggcctgcctggggaaagcttgtggccggaagagaaaatgagcttcctaggacccctgactcacgacctcatcaacgttggtgctactgcttggtggagaatgtaaaccctttgtaaccccatcccatgcccctccgactccccaccccaggagggaacgggcaggccgggcggccttgcagatccacagggcaaggaaacaagaggggagcggccaagtgccccgaccaggaggccccctacttcagaggcaagggccatgtggtcctggccccccaccccatcccttcccacctaggagctccccctccacacagcctccatctccaggggaacttggtgctacacgctggtgctcttatcttcctggggggagggaggagggaagggtggcccctcggggaaccccctacctggggctcctctaaagatggtgcagacacttcctgggcagtcccagctccccctgcccaccaggacccaccgttggctgccatccagttggtacccaagcacctgaagcctcaaagctggattcgctctagcatccctcctctcctgggtccacttggccgtctcctccccaccgatcgctgttccccacatctggggcgcttttgggttggaaaaccaccccacactgggaatagccaccttgcccttgtagaatccatccgcccatccgtccattcatccatcggtccgtccatccatgtccccagttgaccgcccggcaccactagctggctgggtgcacccaccatcaacctggttgacctgtcatggccgcctgtgccctgcctccacccccatcctacactcccccagggcgtgcggggctgtgcagactggggtgccaggcatctcctccccacccggggtgtccccacatgcagtactgtataccccccatccctccctcggtccactgaacttcagagcagttcccattcctgccccgcccatctttttgtgtctcgctgtgatagatcaataaatattttattttttgtcctggatatttggggattatttttgattgttgatattctcttttggttttattgttgtggttcattgaaaaaaaaagataatttttttttctgatccggggagctgtatccccagtagaaaaaacattttaatcactctaatataactctggatgaaacacacctttttttttaataagaaaagagaattaactgcttcagaaatgactaataaatgaaaaacctttaaaggaaa

SEQ ID NO: 6490 - DNA, 1477 bp, Homo sapiens
  source 1..1477: mol_type = unassigned DNA; mol_type = unassigned DNA
gcccagcagatgaggaagtggcaggcaggcaggctggccccggggacttctctctggccctgctccctccgagcgctccgccgttgcccgcctggcccctacggagtccttagccaggatggaggctgttgtgaacttgtaccaagaggtgatgaagcacgcagatccccggatccagggctaccctctgatggggtcccccttgctaatgacctccattctcctgacctacgtgtacttcgttctctcacttgggcctcgcatcatggctaatcggaagcccttccagctccgtggcttcatgattgtctacaacttctcactggtggcactctccctctacattgtctatgagttcctgatgtcgggctggctgagcacctatacctggcgctgtgaccctgtggactattccaacagccctgaggcacttaggatggttcgggtggcctggctcttcctcttctccaagttcattgagctgatggacacagtgatctttattctccgaaagaaagacgggcaggtgaccttcctacatgtcttccatcactctgtgcttccctggagctggtggtggggggtaaagattgccccgggaggaatgggctctttccatgccatgataaactcttccgtgcatgtcataatgtacctgtactacggattatctgcctttggccctgtggcacaaccctacctttggtggaaaaagcacatgacagccattcagctgatccagtttgtcctggtctcactgcacatctcccagtactactttatgtccagctgtaactaccagtacccagtcattattcacctcatctggatgtatggcaccatcttcttcatgctgttctccaacttctggtatcactcttataccaagggcaagcggctgccccgtgcacttcagcaaaatggagctccaggtattgccaaggtcaaggccaactgagaagcatggcctagataggcgcccacctaagtgcctcaggactgcaccttagggcagtgtccgtcagtgccctctccacctacacctgtgaccaaggcttatgtggtcaggactgagcaggggactggccctcccctccccacagctgctctacagggaccacggctttggttcctcacccacttcccccgggcagctccagggatgtggcctcattgctgtctgccactccagagctgggggctaaaagggctgtacagttatttccccctccctgccttaaaacttgggagaggagcactcagggctggccccacaaagggtctcgtggcctttttcctcacacagaagaggtcagcaataatgtcactgtggacccagtctcactcctccaccccacacactgaagcagtagcttctgggccaaaggtcagggtgggcgggggcctgggaatacagcctgtggaggctgcttactcaacttgtgtcttaattaaaagtgacagaggaaaccacgga

SEQ ID NO: 6491 - DNA, 797 bp, Homo sapiens
  source 1..797: mol_type = unassigned DNA; mol_type = unassigned DNA
atcggaagcccttccagctccgtggcttcatgattgtctacaacttctcactggtggcactctccctctacattgtctatgagttcctgatgtcgggctggctgagcacctatacctggcgctgtgaccctgtggactattccaacagccctgaggcacttaggatggttcgggtggcctggctcttcctcttctccaagttcattgagctgatggacacagtgatctttattctccgaaagaaagacgggaggaatgggctctttccatgccatgataaactcttccgtgcatgtcataatgtacctgtactacggattatctgcctttggccctgtggcacaaccctacctttggtggaaaaagcacatgacagccattcagctgatccagtttgtcctggtctcactgcacatctcccagtactactttatgtccagctgtaactaccagtacccagtcattattcacctcatctggatgtatggcaccatcttcttcatgctgttctccaacttctggtatcactcttataccaagggcaagcggctgccccgtgcacttcagcaaaatggagctccaggtattgccaaggtcaaggccaactgagaagcatggcctagataggcgcccacctaagtgcctcaggactgcaccttagggcagtgtccgtcagtgccctctccacctacacctgtgaccaaggcttatgtggtcaggactgagcaggggactggccctcccctccccacagctgctctacagggaccacggctttggttcctcacccacttccc

SEQ ID NO: 6492 - DNA, 1034 bp, Homo sapiens
  source 1..1034: mol_type = unassigned DNA; mol_type = unassigned DNA
gaggaagtggcaggcaggcaggctggccccggggacttctctctggccctgctccctccgagcgctccgccgttgcccgcctggcccctacggagtccttagccaggatggaggctgttgtgaacttgtaccaagaggtgatgaagcacgcagatccccggatccagggctaccctctgatggggtcccccttgctaatgacctccattctcctgacctacgtgtacttcgttctctcacttgggcctcgcatcatggctaatcggaagcccttccagctccgtggcttcatgattgtctacaacttctcactggtggcactctccctctacattgtctatgagttcctgatgtcgggctggctgagcacctatacctggcgctgtgaccctgtggactattccaacagccctgaggcacttaggatggttcgggtggcctggctcttcctcttctccaagttcattgagctgatggacacagtgatctttattctccgaaagaaagacgggcaggaggaatgggctctttccatgccatgataaactcttccgtgcatgtcataatgtacctgtactacggattatctgcctttggccctgtggcacaaccctacctttggtggaaaaagcacatgacagccattcagctgatccagtttgtcctggtctcactgcacatctcccagtactactttatgtccagctgtaactaccagtacccagtcattattcacctcatctggatgtatggcaccatcttcttcatgctgttctccaacttctggtatcactcttataccaagggcaagcggctgccccgtgcacttcagcaaaatggagctccaggtattgccaaggtcaaggccaactgagaagcatggcctagataggcgcccacctaagtgcctcaggactgcaccttagggcagtgtccgtcagtgccctctccacctacacctgtgaccaaggcttatgtggtcaggactgagcaggggactggccctcccctccccacagctgctctacagggac

SEQ ID NO: 6493 - DNA, 867 bp, Homo sapiens
  source 1..867: mol_type = unassigned DNA; mol_type = unassigned DNA
aaagtcggcccagcagatgaggaagtggcaggcaggcaggctggccccggggacttctctctggccctgctccctccgagcgctccgccgttgcccgcctggcccctacggagtccttagccaggatggaggctgttgtgaacttgtaccaagaggtgatgaagcacgcagatccccggatccagggctaccctctgatggggtcccccttgctaatgacctccattctcctgacctacgtgtacttcgttctctcacttgggcctcgcatcatggctaatcggaagcccttccagctccgtggcttcatgattgtctacaacttctcactggtggcactctccctctacattgtctatgagttcctgatgtcgggctggctgagcacctatacctggcgctgtgaccctgtggactattccaacagccctgaggcacttaggatggttcgggtggcctggctcttcctcttctccaagttcattgagctgatggacacaatccagtttgtcctggtctcactgcacatctcccagtactactttatgtccagctgtaactaccagtacccagtcattattcacctcatctggatgtatggcaccatcttcttcatgctgttctccaacttctggtatcactcttataccaagggcaagcggctgccccgtgcacttcagcaaaatggagctccaggtattgccaaggtcaaggccaactgagaagcatggcctagataggcgcccacctaagtgcctcaggactgcaccttagggcagtgtccgtcagtgccctctccacctacacctgtgaccaaggcttatgtggtcaggactgagcaggggactggccctcccctccccacag

SEQ ID NO: 6494 - DNA, 828 bp, Homo sapiens
  source 1..828: mol_type = unassigned DNA; mol_type = unassigned DNA
ggcaggcaggcaggctggccccggggacttctctctggccctgctccctccgagcgctccgccgttgcccgcctggcccctacggagtccttagccaggatggaggctgttgtgaacttgtaccaagaggtgatgaagcacgcagttcctgatgtcgggctggctgagcacctatacctggcgctgtgaccctgtggactattccaacagccctgaggcacttaggatggttcgggtggcctggctcttcctcttctccaagttcattgagctgatggacacagtgatctttattctccgaaagaaagacgggcaggtgaccttcctacatgtcttccatcactctgtgcttccctggagctggtggtggggggtaaagattgccccgggaggaatgggctctttccatgccatgataaactcttccgtgcatgtcataatgtacctgtactacggattatctgcctttggccctgtggcacaaccctacctttggtggaaaaagcacatgacagccattcagctgatccagtttgtcctggtctcactgcacatctcccagtactactttatgtccagctgtaactaccagtacccagtcattattcacctcatctggatgtatggcaccatcttcttcatgctgttctccaacttctggtatcactcttataccaagggcaagcggctgccccgtgcacttcagcaaaatggagctccaggtattgccaaggtcaaggccaactgagaagcatggcctagataggcgcccacctaagtgcctcaggactgcaccttagggcagtgtccgtcagtgccctctccacc

SEQ ID NO: 6495 - DNA, 1215 bp, Homo sapiens
  source 1..1215: mol_type = unassigned DNA; mol_type = unassigned DNA
ggtcagaggaggtttctggctcagaatctaggaccttagctcatcaggctggtcccacgtgggtgggtgggtggcgagtctggggctttacttggctttcccaatcctggtgggtcctgctcccccaggcactgacctgtggcccggacccaccctccaccccctgcacagtacagcaggggcgggcagagggcggggctgctgccagatctagtcagacaggtggagccgccggggcaggagtctcaaagagccaggctccaggagaggaagggctctgcgagaggagagaggagagcgctggagaggagaggctggagagtccttagccaggatggaggctgttgtgaacttgtaccaagaggtgatgaagcacgcagatccccggatccagggctaccctctgatggggtcccccttgctaatgacctccattctcctgacctacgtgtacttcgttctctcacttgggcctcgcatcatggctaatcggaagcccttccagctccgtggcttcatgattgtctacaacttctcactggtggcactctccctctacattgtctatgagttcctgatgtcgggctggctgagcacctatacctggcgctgtgaccctgtggactattccaacagccctgaggcacttaggatggttcgggtggcctggctcttcctcttctccaagttcattgagctgatggacacagtgatctttattctccgaaagaaagacgggcaggtgaccttcctacatgtcttccatcactctgtgcttccctggagctggtggtggggggtaaagattgccccgggaggaatgggctctttccatgccatgataaactcttccgtgcatgtcataatgtacctgtactacggattatctgcctttggccctgtggcacaaccctacctttggtggaaaaagcacatgacagccattcagctgatccagtttgtcctggtctcactgcacatctcccagtactactttatgtccagctgtaactaccagtacccagtcattattcacctcatctggatgtatggcaccatcttcttcatgctgttctccaacttctggtatcactcttataccaagggcaagcggctgccccgtgcacttcagcaaaatggagctccaggtattgccaaggtcaaggccaactgagaagcatggcctagataggcgcccacctaagtgcctcagga

SEQ ID NO: 6496 - DNA, 830 bp, Homo sapiens
  source 1..830: mol_type = unassigned DNA; mol_type = unassigned DNA
ccgcaggcttggggcctgaccacggtgggcctaaagaagccgggcctcctggagagtccttagccaggatggaggctgttgtgaacttgtaccaagaggtgatgaagcacgcagatccccggatccagggctaccctctgatggggtcccccttgctaatgacctccattctcctgacctacgtgtacttcgttctctcacttgggcctcgcatcatggctaatcggaagcccttccagctccgtggcttcatgattgtctacaacttctcactggtggcactctccctctacattgtctatgagttcctgatgtcgggctggctgagcacctatacctggcgctgtgaccctgtggactattccaacagccctgaggcacttaggatggttcgggtggcctggctcttcctcttctccaagttcattgagctgatggacacagtgatctttattctccgaaagaaagacgggcaggtgaccttcctacatgtcttccatcactctgtgcttccctggagctggtggtggggggtaaagattgccccgggaggaatgggctctttccatgccatgataaactcttccgtgcatgtcataatgtacctgtactacggattatctgcctttggccctgtggcacaaccctacctttggtggaaaaagcacatgacagccattcagctgatccagtttgtcctggtctcactgcacatctcccagtactactttatgtccagctgtaactaccagtacccagtcattattcacctcatctggatgtatggcaccatcttcttcatgctgttctccaacttctggtatcactct

SEQ ID NO: 6497 - DNA, 984 bp, Homo sapiens
  source 1..984: mol_type = unassigned DNA; mol_type = unassigned DNA
ggaacctgtgttggcgccctcgccccggcctgggccctgccggcgatgggcggccagcaagcccgatggtgggggagcaatacagcaggggcgggcagagggcggggctgctgccagatctagtcagacaggtggagccgccggggcaggagtctcaaagagccaggctccaggagaggaagggctctgcgagaggagagaggagagcgctggagaggagaggctggagagtccttagccaggatggaggctgttgtgaacttgtaccaagaggtgatgaagcacgcagatccccggatccagggctaccctctgatggggtcccccttgctaatgacctccattctcctgacctacgtgtacttcgttctctcacttgggcctcgcatcatggctaatcggaagcccttccagctccgtggcttcatgattgtctacaacttctcactggtggcactctccctctacattgtctatgagttcctgatgtcgggctggctgagcacctatacctggcgctgtgaccctgtggactattccaacagccctgaggcacttaggatggttcgggtggcctggctcttcctcttctccaagttcattgagctgatggacacagtgatctttattctccgaaagaaagacgggcaggtgaccttcctacatgtcttccatcactctgtgcttccctggagctggtggtggggggtaaagattgccccgggaggaatgggctctttccatgccatgataaactcttccgtgcatgtcataatgtacctgtactacggattatctgcctttggccctgtggcacaaccctacctttggtggaaaaagcacatgacagccattcagctgatccagtttgtcctggtctcactgcacatctcccagtactactttatgtccagctgtaactaccagtacccagtcattattcacctcatctggatgtatggcaccatcttcttcatgctgttc

SEQ ID NO: 6498 - DNA, 973 bp, Homo sapiens
  source 1..973: mol_type = unassigned DNA; mol_type = unassigned DNA
ccccacacccccgtctctggcccccatttgcctacacccgggccttcctccaccacccctgcatttacctctctccctcctcctctcccctccctccccccgctaccctaactttgccaggcaccttttcccttccatccatcttaaaggaaggaagggacgggctgagttccccgacgagagacacacccagattttcctgcagcttggggagaggtcctcccaggagccttggtccctcctggcctgccggagtccttagccaggatggaggctgttgtgaacttgtaccaagaggtgatgaagcacgcagatccccggatccagggctaccctctgatggggtcccccttgctaatgacctccattctcctgacctacgtgtacttcgttctctcacttgggcctcgcatcatggctaatcggaagcccttccagctccgtggcttcatgattgtctacaacttctcactggtggcactctccctctacattgtctatgagttcctgatgtcgggctggctgagcacctatacctggcgctgtgaccctgtggactattccaacagccctgaggcacttaggatggttcgggtggcctggctcttcctcttctccaagttcattgagctgatggacacagtgatctttattctccgaaagaaagacgggcaggtgaccttcctacatgtcttccatcactctgtgcttccctggagctggtggtggggggtaaagattgccccgggaggaatgggctctttccatgccatgataaactcttccgtgcatgtcataatgtacctgtactacggattatctgcctttggccctgtggcacaaccctacctttggtggaaaaagcacatgacagccattcagctgatccagtttgtcctggtctcactgcacatctcccagtactactttatgtccagctgtaactaccagtacccagtcattattcacctca

SEQ ID NO: 6499 - DNA, 564 bp, Homo sapiens
  source 1..564: mol_type = unassigned DNA; mol_type = unassigned DNA
tggcactctccctctacattgtctatgaggtgggcccctgggatgccgggctttaatttctgtcagcaggataaggagcaggccatagagccagagcatggcatttctcctttccagagaggttcagatccatgtcctcagctagcgaaggggagggatggctgggaagggagaactctggtggtctaatccacatcccttcccagttcctgatgtcgggctggctgagcacctatacctggcgctgtgaccctgtggactattccaacagccctgaggcacttaggatggttcgggtggcctggctcttcctcttctccaagttcattgagctgatggacacagtgatctttattctccgaaagaaagacgggcaggtgaccttcctacatgtcttccatcactctgtgcttccctggagctggtggtggggggtaaagattgccccgggaggaatgggctctttccatgccatgataaactcttccgtgcatgtcataatgtacctgtactacggattatctgcctttggccctgtggcacaaccctacctttggtggaaaa

SEQ ID NO: 6500 - DNA, 646 bp, Homo sapiens
  source 1..646: mol_type = unassigned DNA; mol_type = unassigned DNA
ctccaggagaggaagggctctgcgagaggagagaggagagcgctggagaggagaggctggagagtccttagccaggatggaggctgttgtgaacttgtaccaagaggtgatgaagcacgcagatccccggatccagggctaccctctgatggggtcccccttgctaatgacctccattctcctgacctacgtgtacttcgttctctcacttgggcctcgcatcatggctaatcggaagcccttccagctccgtggcttcatgattgtctacaacttctcactggtggcactctccctctacattgtctatgagagaggttcagatccatgtcctcagctagcgaaggggagggatggctgggaagggagaactctggtggtctaatccacatcccttcccagttcctgatgtcgggctggctgagcacctatacctggcgctgtgaccctgtggactattccaacagccctgaggcacttaggatggttcgggtggcctggctcttcctcttctccaagttcattgagctgatggacacagtgatctttattctccgaaagaaagacgggcaggtgaccttcctacatgtcttccatcactctgtgcttccctggagctggtggtggggggtaaagattgccccgg

SEQ ID NO: 6501 - DNA, 726 bp, Homo sapiens
  source 1..726: mol_type = unassigned DNA; mol_type = unassigned DNA
aagtggcaggcaggcaggctggccccggggacttctctctggccctgctccctccgagcgctccgccgttgcccgcctggcccctacggcaggggcgggcagagggcggggctgctgccagatctagtcagacaggtggagccgccggggcaggagtctcaaagagccaggctccaggagaggaagggctctgcgagaggagagaggagagcgctggagaggagaggctggagagtccttagccaggatggaggctgttgtgaacttgtaccaagaggtgatgaagcacgcagatccccggatccagggctaccctctgatggggtcccccttgctaatgacctccattctcctgacctacgtgtacttcgttctctcacttgggcctcgcatcatggctaatcggaagcccttccagctccgtggcttcatgattgtctacaacttctcactggtggcactctccctctacattgtctatgagttcctgatgtcgggctggctgagcacctatacctggcgctgtgaccctgtggactattccaacagccctgaggcacttaggatggttcgggtggcctggctcttcctcttctccaagttcattgagctgatggacacagtgatctttattctccgaaagaaagacgggcaggtgaccttcctacatgtcttccatcactctgtgcttccctggagctggtggtggggggtaaagattgcccc

SEQ ID NO: 6502 - DNA, 417 bp, Homo sapiens
  source 1..417: mol_type = unassigned DNA; mol_type = unassigned DNA
accttttcccttccatccatcttaaaggaaggaagggacgggctgagttccccgacgagagacacacccagattttcctgcagcttggggagaggtcctcccaggagccttggtccctcctggcctgccggagtccttagccaggatggaggctgttgtgaacttgtaccaagaggtgatgaagcacgcagttcctgatgtcgggctggctgagcacctatacctggcgctgtgaccctgtggactattccaacagccctgaggcacttaggatggttcgggtggcctggctcttcctcttctccaagttcattgagctgatggacacagtgatctttattctccgaaagaaagacgggcaggtgaccttcctacatgtcttccatcactctgtgcttccctggagctggtggtggg

SEQ ID NO: 6503 - DNA, 779 bp, Homo sapiens
  source 1..779: mol_type = unassigned DNA; mol_type = unassigned DNA
ctggccctgctccctccgagcgctccgccgttgcccgcctggcccctacggagtccttagccaggatggaggctgttgtgaacttgtaccaagaggtgatgaagcacgcagatccccggatccagggctaccctctgatggggtcccccttgctaatgacctccattctcctgacctacgtgtacttcgttctctcacttgggcctcgcatcatggctaatcggaagcccttccagctccgtggcttcatgattgtctacaacttctcactggtggcactctccctctacattgtctatgaggtgggcccctgggatgccgggctttaatttctgtcagcaggataaggagcaggccatagagccagagcatggcatttctcctttccagagaggttcagatccatgtcctcagctagcgaaggggagggatggctgggaagggagaactctggtggtctaatccacatcccttcccagttcctgatgtcgggctggctgagcacctatacctggcgctgtgaccctgtggactattccaacagccctgaggcacttaggatggttcgggtggcctggctcttcctcttctccaagttcattgagctgatggacacagtgagtagttatatgagatgtgagaacttgaggggagaatgaggtggagaagcccaggttctgaatccccttccctcactcttctctcaggtgatctttattctccgaaagaaagacgggcaggtgaccttcctacatgtcttccatcactctgtgcttccc

SEQ ID NO: 6504 - DNA, 1625 bp, Homo sapiens
  source 1..1625: mol_type = unassigned DNA; mol_type = unassigned DNA
ccccacacccccgtctctggcccccatttgcctacacccgggccttcctccaccacccctgcatttacctctctccctcctcctctcccctccctccccccgctaccctaactttgccaggcaccttttcccttccatccatcttaaaggaaggaagggacgggctgagttccccgacgagagacacacccagattttcctgcagcttggggagaggtcctcccaggagccttggtccctcctggcctgccggagtccttagccaggatggaggctgttgtgaacttgtaccaagaggtgatgaagcacgcagatccccggatccagggctaccctctgatggggtcccccttgctaatgacctccattctcctgacctacgtgtacttcgttctctcacttgggcctcgcatcatggctaatcggaagcccttccagctccgtggcttcatgattgtctacaacttctcactggtggcactctccctctacattgtctatgagttcctgatgtcgggctggctgagcacctatacctggcgctgtgaccctgtggactattccaacagccctgaggcacttaggatggttcgggtggcctggctcttcctcttctccaagttcattgagctgatggacacagtgatctttattctccgaaagaaagacgggcaggtgaccttcctacatgtcttccatcactctgtgcttccctggagctggtggtggggggtaaagattgccccgggaggaatgggctctttccatgccatgataaactcttccgtgcatgtcataatgtacctgtactacggattatctgcctttggccctgtggcacaaccctacctttggtggaaaaagcacatgacagccattcagctgatccagtttgtcctggtctcactgcacatctcccagtactactttatgtccagctgtaactaccagtacccagtcattattcacctcatctggatgtatggcaccatcttcttcatgctgttctccaacttctggtatcactcttataccaagggcaagcggctgccccgtgcacttcagcaaaatggagctccaggtattgccaaggtcaaggccaactgagaagcatggcctagataggcgcccacctaagtgcctcaggactgcaccttagggcagtgtccgtcagtgccctctccacctacacctgtgaccaaggcttatgtggtcaggactgagcaggggactggccctcccctccccacagctgctctacagggaccacggctttggttcctcacccacttcccccgggcagctccagggatgtggcctcattgctgtctgccactccagagctgggggctaaaagggctgtacagttatttccccctccctgccttaaaacttgggagaggagcactcagggctggccccacaaagggtctcgtggcctttttcctcacacagaagaggtcagcaataatgtcactgtggacccagtctcactcctccaccccacacactgaagcagtagcttctgggccaaaggtcagggtgggcgggggcctgggaatacagcctgtggaggctgcttactcaacttgtgtcttaattaaaagtgacagaggaaaccacgg

SEQ ID NO: 6505 - DNA, 1451 bp, Homo sapiens
  source 1..1451: mol_type = unassigned DNA; mol_type = unassigned DNA
aatcagcgggcgccccccgcgcggcccgcccctccccctctggtgacagaaagtcggcccagcagatgaggaagtggcaggcaggcaggctggccccggggacttctctctggccctgctccctccgagcgctccgccgttgcccgcctggcccctacggagtccttagccaggatggaggctgttgtgaacttgtaccaagaggtgatgaagcacgcagatccccggatccagggctaccctctgatggggtcccccttgctaatgacctccattctcctgacctacgtgtacttcgttctctcacttgggcctcgcatcatggctaatcggaagcccttccagctccgtggcttcatgattgtctacaacttctcactggtggcactctccctctacattgtctatgagatggttcgggtggcctggctcttcctcttctccaagttcattgagctgatggacacagtgatctttattctccgaaagaaagacgggcaggtgaccttcctacatgtcttccatcactctgtgcttccctggagctggtggtggggggtaaagattgccccgggaggaatgggctctttccatgccatgataaactcttccgtgcatgtcataatgtacctgtactacggattatctgcctttggccctgtggcacaaccctacctttggtggaaaaagcacatgacagccattcagctgatccagtttgtcctggtctcactgcacatctcccagtactactttatgtccagctgtaactaccagtacccagtcattattcacctcatctggatgtatggcaccatcttcttcatgctgttctccaacttctggtatcactcttataccaagggcaagcggctgccccgtgcacttcagcaaaatggagctccaggtattgccaaggtcaaggccaactgagaagcatggcctagataggcgcccacctaagtgcctcaggactgcaccttagggcagtgtccgtcagtgccctctccacctacacctgtgaccaaggcttatgtggtcaggactgagcaggggactggccctcccctccccacagctgctctacagggaccacggctttggttcctcacccacttcccccgggcagctccagggatgtggcctcattgctgtctgccactccagagctgggggctaaaagggctgtacagttatttccccctccctgccttaaaacttgggagaggagcactcagggctggccccacaaagggtctcgtggcctttttcctcacacagaagaggtcagcaataatgtcactgtggacccagtctcactcctccaccccacacactgaagcagtagcttctgggccaaaggtcagggtgggcgggggcctgggaatacagcctgtggaggctgcttactcaacttgtgtcttaattaaaagtgacagaggaaaccacgg

SEQ ID NO: 6506 - DNA, 3997 bp, Homo sapiens
  source 1..3997: mol_type = unassigned DNA; mol_type = unassigned DNA
gatagcgccgggcagagggacccggctaccctggacagcgcatcgccgcccgcccgggtcgccgcgccacagccgctgcggatcatggaacatctaaaggcctttgatgatgaaatcaatgcttttttggacaatatgtttggaccgcgagattctcgagtcagagggtggttcatgttggactcttaccttcctaccttttttcttactgtcatgtatctgctctcaatatggctgggtaacaagtatatgaagaacagacctgctctttctctcaggggtatcctcaccttgtataatcttggaatcacacttctctccgcgtacatgctggcagagctcattctctccacttgggaaggaggctacaacttacagtgtcaagatcttaccagcgcaggggaagctgacatccgggtagccaaggtgctttggtggtactatttctccaaatcagtagagttcctggacacaattttcttcgttttgcggaaaaaaacgagtcagattacttttcttcatgtatatcatcatgcttctatgtttaacatctggtggtgtgtcttgaactggataccttgtggacaaagtttctttggaccaacactgaacagttttatccacattcttatgtactcctactatggactttctgtgtttccatctatgcacaagtatctttggtggaagaaatatctcacacaggctcagctggtgcagttcgtgctcaccatcacgcacaccatgagcgccgtcgtgaaaccgtgtggcttccccttcggttgtctcatcttccagtcatcttatatgctaacgttagtcatcctcttcttaaatttttacgttcagacataccgaaaaaagccaatgaagaaagatatgcaagagccacctgcagggaaagaagtgaagaatggtttttccaaagcctacttcactgcagcaaatggagtgatgaacaagaaagcacaataaaaatgagtaacagaaaaagcacatatactagcctaacagattggcttgttttaaagcaaagactgaattgaaggttacatgttttaggataaactaatttcttttgagttcataaatcatttgtacccagaatgtattaatatattgctattaggttaatctgttaactgaatgctttgatcagcattgaggtgatgctcacctccgaggacctcagaactggtgcagcttctctctccctccctcccacagactgaacctttcgccagaagctgtccttataacgccttatacgcatacacagccaggaaacgtggagcattgtttctcacagagagtctccaaataaaaagggttttgttcagattaaaatgtttacaacaaaatgttaattatattctaaatacagggtatgttctaatctatattaagcaataatgccagtgcataatcattccatttgttcctttagcaatcaaccccagaaaatattaaaatgggatcatacacagaagatagaaaaatctagcaaaacttctctttctgtaagccagagtcttgtctatcagattcccacaaccactcctgattctaaatttagtgatatggtaatgaaattggtatttattttaaatattagttattctaaggagaaaaaaatgcttctgcaagattttcataattcaggggctgtggataggattgttcctctgtttccctaatcattcatctgttcatgtctccctcttgtgccagtcagcctaggttatacagatgccatgctccacaccacgagcagtgtacaaatctggctgcccgtttactttctgagcaagcactggagtccactccgacctttttctttgaacatgcatgctgctggaatatgtataaatcagaactagcagaagtagcagagtgatgggagcaaaataggcactgaattcgtcaactcttttttgtgagcctacttgtgaatattacctcagatacctgttgtcactcttcacaggttatttaagtttttgaagctgggaggaaaaagatggagtagcttggaaagattccagcactgagccgtgggccggtcatgagccacgataaaaaatgccagtttggcaaactcagcactcctgttccctgctcaggtatatgcgatctctaccgagaagcaagcacaaaagtagacaaaagtattaatgagtatttcctttctccataagtgcaggactgttactcactactaaactctaccaagaatggaaacaaagaatattttctgaagatttttttgaagattaatttataccctataaaataaaacttgttagcttcgatgaagtcacttcatcttctctcctgccttatttttttaaataagtttttaggtcctgacactgacatcaaatacatgcacaccagaaaggcatttccaccaccgtccccactcattagcgtccagagtgcctttctctctcggctttttttcccccctgagctctagttttaaactttctcctgttaaaaaaattgtacttttatttcatgtaaactgcccctctgaggatttgggcatattttttggaaggtgcctaatgcttaggatagtctctagggtgatgcactgcacctgcttccttcccttcagtgcggccgacccatttctgttgaacagatgtctcctgtgtgatgcccctgactcttacatttatctttctaaatcattttctgaagctgacttgctctagggtgcttcatcaccacttccatcttgcatcaccttataactgttctgtcttgttctctcccagcaatttattttaaaacaagggctagcttcaagcatgactgttaatggctcctctgtgacaaaacacaagttggaccaaggagaaagccctttggagaaactggaccctagttcagtttagatctcaaatataggctgaaatctcttaccaaagtgcgttccagataaaaatgagacttagaagacagactggtctaatatgctcactggtcatcacattcagcttattcttacgtgccagtgaggccctaaggtctcagtgcatagcatacctgccactctggatgttttcctgggcttcatatctgtatggcaaggagggagctgtccttcagcagacaaagtcaagcagctttaagtacaaggcagcttgaaacctctctgatgaaagtgaaaaatgtgggtagcttatactttcaaactaatgccagtgactagagagaggtttcattcatgatgtgtatttccaatttggtcttcaattcaagagatgcttcataaaacacttatagccttaaaccattcaagggctaattaaaaaaatagttatgaaatcttagccacaaaaaataaatcaggtaaacattttaacctgtcgttaagtgttgtaacttcaaaaaaccaaaatgcttattttaatgtgatttttctaaaactattgaaaaattaatatttctataatctattaaaaaaaatggagaatgttttctctcaaatttcctctgacccatgggaatgaaaatacttaaatactgtaaagcatatctattaataattcccccaattttttaaactaacaaaatggaatgttaactgaatggaattaaacatagcaattgtcaagccatcaaaattatatatcgaaccacttaggcatgttacggggtaaagtcctcacccctgcatttgagaaatattttattatttttattttaaggcaaaacagtgtttactgtgatgggcagaacagccttttgtatctaggagtccatttgagttctttccaatatttccatatcgttcataaatgtgtctgggggcttccttgtttggaaaatatggatatcgctttgttttcctttgaaagtaattatatcttaagaacatagtatcatgaatggagtagacagggaggctgcagaagccatttctctttgtagataaaaagcattatctatgattgttgtataataaattgatttttacattaaa

SEQ ID NO: 6507 - DNA, 2827 bp, Homo sapiens
  source 1..2827: mol_type = unassigned DNA; mol_type = unassigned DNA
gcgccattgtgacgtcacggtcagcccacgttctgattgtagatagccggcgccttcctcttcccatcgcgcgggtcctagccaccggtgtctccttctacatccgcctctgcgccggctgccacccgcgctccctccgccgccgccgccttgctgctgctcaaagctgctgccgccccttgggctaaaaggttttcaaatggaacattttgatgcatcacttagtacctatttcaaggcattgctaggccctcgagatactagagtaaaaggatggtttcttctggacaattatatacccacatttatctgctctgtcatatatttactaattgtatggctgggaccaaaatacatgaggaataaacagccattctcttgccgggggattttagtggtgtataaccttggactcacactgctgtctctgtatatgttctgtgagttagtaacaggagtatgggaaggcaaatacaacttcttctgtcagggcacacgcaccgcaggagaatcagatatgaagattatccgtgtcctctggtggtactacttctccaaactcatagaatttatggacactttcttcttcatcctgcgcaagaacaaccaccagatcacggtcctgcacgtctaccaccatgcctcgatgctgaacatctggtggtttgtgatgaactgggtcccctgcggccactcttattttggtgccacacttaatagcttcatccacgtcctcatgtactcttactatggtttgtcgtcagtcccttccatgcgtccatacctctggtggaagaagtacatcactcaggggcagctgcttcagtttgtgctgacaatcatccagaccagctgcggggtcatctggccgtgcacattccctcttggttggttgtatttccagattggatacatgatttccctgattgctctcttcacaaacttctacattcagacctacaacaagaaaggggcctcccgaaggaaagaccacctgaaggaccaccagaatgggtccatggctgctgtgaatggacacaccaacagcttttcacccctggaaaacaatgtgaagccaaggaagctgcggaaggattgaagtcaaagaattgaaaccctccaaaccacgtcatctgattgtaagcacaatatgagttgtgccccaatgctcgttaacagctgctgtaactagtctggcctacaatagtgtgattcatgtaggacttctttcatcaattcaaaacccctagaaaacgtatacagattatataagtagggataagatttctaacatttctgggctctctgacccctgcgctagactgtggaaagggagtattattatagtatacaacactgctgttgccttattagttataacatgataggtgctgaattgtgattcacaatttaaaaacactgtaatccaaacttttttttttaactgtagatcatgcatgtgattgtaaatgtaaatttgtacaatgttgttatggtagagaaacacacatgccttaaaatttaaaaagcagggcccaaagcttattagtttaaattagggtatgtttcaagtttgtattaatttgtaatagctctgtttagaaaaaatcaaagaccatgatttatgaaactaatgtgacataatttccagtgacttgttgatgtgaaatcagacacggcaccttcagttttgtactattggctttgaatcaagcaggctcaaatctagtggaacagtcagtttaactttttaacagatcttatttttttattttgagtgccactattaatgtaaaaaggggggggctctacagcagtcgtgatgaaacttaaatatatattctttgtcctcgagattttaggaagggtgtagggtgagtaggccatttttaatttctgaagtgctaagtgtttttatacagcaaacaaaaagtcaattttgctttccaccagtgcgagagaggatgtatacttttcaagagagatgattgcctatttaccgtttgacagagtcccgtagatgagcaatggggaactggttgccagggtctaaatttggattgatttatgcactgttatctgttttgacacagatttccttgtaaaatgtgcctagtttaccaaaattaacaaagggggggaaaggaccttagaactttttaaggtaaaatcaaatatagctacagcataagagaatcgagaaatttgatagaggtaacttgtttaatgtaaatctaatagtacttgtaatttctttctgcttagaatctaaagatgtgtttagaacctcttgtttaaaaataatagactgcttatcataaaatcacatctcacacatttgaggcagtggtcaaacaggtaaagcctatgatgtgtgtcattttaaagtgtcggaatttagcctctgaataccttctccattgggggaaagatattcttggaaccactcatgacatatcttagaaggtcattgacaatgtataaactaattgttggtttgatatttatgtaaatatcagtttaccatgctttaattttgcacattcgtactatagggagcctattggttctctattagtcttgtgggttttctgtttgaaaaggagtcatggcatctgtttacatttaccttatcaaacctagaatgtgtatatttataaatgtatgtcttcattgctaggtactaatttgcagatgtctttacatatttcaatacagaaactataacattcaatagtgtgctgtcaaagtgtgcttagctcacctggatatacctacattgttaaatgtctaaacagtaatcattaaaacatttttgattacctgt

SEQ ID NO: 6508 - DNA, 761 bp, Homo sapiens
  source 1..761: mol_type = unassigned DNA; mol_type = unassigned DNA
gattgtagatagccggcgccttcctcttcccatcgcgcgggtcctagccaccggtgtctccttctacatccgcctctgcgccggctgccacccgcgctccctccgccgccgccgccttgctgctgctcaaagctgctgccgccccttgggctaaaaggttttcaaatggaacattttgatgcatcacttagtacctatttcaaggcattgctaggccctcgagatactagagtaaaaggatggtttcttctggacaattatatacccacatttatctgctctgtcatatatttactaattgtatggctgggaccaaaatacatgaggaataaacagccattctcttgccgggggattttagtggtgtataaccttggactcacactgctgtctctgtatatgttctgtgagaatgaagtcagtttaattagactccaagatggagagttcaggactggagccaggggaagtgcacaggagtgactcctggccccagcactatgcacatttctgtgttcaagggacaaaaccacagcaagctgtcagttagtaacaggagtatgggaaggcaaatacaacttcttctgtcagggcacacgcaccgcaggagaatcagatatgaagattatccgtgtcctctggtggtactacttctccaaactcatagaatttatggacactttcttcttcatcctgcgcaagaacaaccaccagatcacggtcctgcacgtctaccaccatgcctcgatgctgaacatctg

SEQ ID NO: 6509 - DNA, 696 bp, Homo sapiens
  source 1..696: mol_type = unassigned DNA; mol_type = unassigned DNA
ctcttcccatcgcgcgggtcctagccaccggtgtctccttctacatccgcctctgcgccggctgccacccgcgctccctccgccgccgccgccttgctgctgctcaaagctgctgccgccccttgggctaaaaggttttcaaatggaacattttgatgcatcacttagtacctatttcaaggcattgctaggccctcgagatactagagtaaaaggatggtttcttctggacaattatatacccacatttatctgctctgtcatatatttactaattgtatggctgggaccaaaatacatgaggaataaacagccattctcttgccgggggattttagtggtgtataaccttggactcacactgctgtctctgtatatgttctgtgagaatgaagtcagtttaattagactccaagatggagagttcaggactggagccaggggaagtgcacaggagtgactcctggccccagcactatgcacatttctgtgttcaagggacaaaaccacagcaagctgtcagatgattccctggtaaagagaagaaaaacactgtataaagtacagctgtgtgcatctgagtggatgtggggggttctgaacacattgtaatagaagttagtaacaggagtatgggaaggcaaatacaacttcttctgtcagggcacacgcaccgcaggagaatcagatatgaag

SEQ ID NO: 6510 - DNA, 794 bp, Homo sapiens
  source 1..794: mol_type = unassigned DNA; mol_type = unassigned DNA
ctcttcccatcgcgcgggtcctagccaccggtgtctccttctacatccgcctctgcgccggctgccacccgcgctccctccgccgccgccgccttgctgctgctcaaagctgctgccgccccttgggctaaaaggttttcaaatggaacattttgatgcatcacttagtacctatttcaaggcattgctaggccctcgagatactagagtaaaaggatggtttcttctggacaattatatacccacatttatctgctctgtcatatatttactaattgtatggctgggaccaaaatacatgaggaataaacagccattctcttgccgggggattttagtggtgtataaccttggactcacactgctgtctctgtatatgttctgtgagaatgaagtcagtttaattagactccaagatggagagttcaggactggagccaggggaagtgcacaggagtgactcctggccccagcactatgcacatttctgtgttcaagggacaaaaccacagcaagctgtcagatgattccctggtaaagagaagaaaaacactgtataaagtacagctgtgtgcatctgagtggatgtggggggttctgaacacattgtaatagaaggacttctgatcagcctgcatggatcctgcttgactggccatgactttagagagtagtagaagacagaaaagttaatacaccttctaatgaattaccatttagtaacaggagtatgggaaggcaaatacaacttcttctgtcagggcacacgcaccgcaggagaatcagatatgaag

SEQ ID NO: 6511 - DNA, 580 bp, Homo sapiens
  source 1..580: mol_type = unassigned DNA; mol_type = unassigned DNA
ccaccggtgtctccttctacatccgcctctgcgccggctgccacccgcgctccctccgccgccgccgccttgctgctgctcaaagctgctgccgccccttgggctaaaaggttttcaaatggaacattttgatgcatcacttagtacctatttcaaggcattgctaggccctcgaggtatcagcagctctgtcctcagaatgggtcccccacttcacacagttgtaggatggctacagcagctccaagcagcacattcagaggaagaagaaaaaatgtttcatttgtgtggttttaagcataaagaagttgtttcccagagctctttgccagctgtcatccctcaaaactcactggccacaattgcttcacatgcccctgcctgaaccagccaccagagggggttaggaccaccacagattgactagatcctaaggattctctacctggggctggagttcgggtcaggtgcccgggaagcactgtgcggtgtgggaggatgaatatgtgccaatttggaaagatgagtatttgtgggaaaatgaataaagcaaagtgtaaatcagaggtttaagttaaaa

SEQ ID NO: 6512 - DNA, 3081 bp, Homo sapiens
  source 1..3081: mol_type = unassigned DNA; mol_type = unassigned DNA
aaaaaaatttcccagagacacgtggaaccgaggggccaaccccggcctaggctctccaccgcatcggattctggaatttacgatcacgaaagttctattgtcccgcgattggctcccgggccgcatgacatcatagcgcttgattcatccttcgggtcccgattggctggccgcgccattgtgacgtcacggtcagcccacgttctgattgtagatagccggcgccttcctcttcccatcgcgcgggtcctagccaccggtgtctccttctacatccgcctctgcgccggctgccacccgcgctccctccgccgccgccgccttgctgctgctcaaagctgctgccgccccttgggctaaaaggttttcaaatggaacattttgatgcatcacttagtacctatttcaaggcattgctaggccctcgagatactagagtaaaaggatggtttcttctggacaattatatacccacatttatctgctctgtcatatatttactaattgtatggctgggaccaaaatacatgaggaataaacagccattctcttgccgggggattttagtggtgtataaccttggactcacactgctgtctctgtatatgttctgtgagtccaaaagggagcaaccccgtcgatctgcctgtgcctcacgaactgatccttcgactcagcagcagctgccagaaaacaggttagtaacaggagtatgggaaggcaaatacaacttcttctgtcagggcacacgcaccgcaggagaatcagatatgaagattatccgtgtcctctggtggtactacttctccaaactcatagaatttatggacactttcttcttcatcctgcgcaagaacaaccaccagatcacggtcctgcacgtctaccaccatgcctcgatgctgaacatctggtggtttgtgatgaactgggtcccctgcggccactcttattttggtgccacacttaatagcttcatccacgtcctcatgtactcttactatggtttgtcgtcagtcccttccatgcgtccatacctctggtggaagaagtacatcactcaggggcagctgcttcagtttgtgctgacaatcatccagaccagctgcggggtcatctggccgtgcacattccctcttggttggttgtatttccagattggatacatgatttccctgattgctctcttcacaaacttctacattcagacctacaacaagaaaggggcctcccgaaggaaagaccacctgaaggaccaccagaatgggtccatggctgctgtgaatggacacaccaacagcttttcacccctggaaaacaatgtgaagccaaggaagctgcggaaggattgaagtcaaagaattgaaaccctccaaaccacgtcatctgattgtaagcacaatatgagttgtgccccaatgctcgttaacagctgctgtaactagtctggcctacaatagtgtgattcatgtaggacttctttcatcaattcaaaacccctagaaaacgtatacagattatataagtagggataagatttctaacatttctgggctctctgacccctgcgctagactgtggaaagggagtattattatagtatacaacactgctgttgccttattagttataacatgataggtgctgaattgtgattcacaatttaaaaacactgtaatccaaacttttttttttaactgtagatcatgcatgtgattgtaaatgtaaatttgtacaatgttgttatggtagagaaacacacatgccttaaaatttaaaaagcagggcccaaagcttattagtttaaattagggtatgtttcaagtttgtattaatttgtaatagctctgtttagaaaaaatcaaagaccatgatttatgaaactaatgtgacataatttccagtgacttgttgatgtgaaatcagacacggcaccttcagttttgtactattggctttgaatcaagcaggctcaaatctagtggaacagtcagtttaactttttaacagatcttatttttttattttgagtgccactattaatgtaaaaaggggggggctctacagcagtcgtgatgaaacttaaatatatattctttgtcctcgagattttaggaagggtgtagggtgagtaggccatttttaatttctgaagtgctaagtgtttttatacagcaaacaaaaagtcaattttgctttccaccagtgcgagagaggatgtatacttttcaagagagatgattgcctatttaccgtttgacagagtcccgtagatgagcaatggggaactggttgccagggtctaaatttggattgatttatgcactgttatctgttttgacacagatttccttgtaaaatgtgcctagtttaccaaaattaacaaagggggggaaaggaccttagaactttttaaggtaaaatcaaatatagctacagcataagagaatcgagaaatttgatagaggtaacttgtttaatgtaaatctaatagtacttgtaatttctttctgcttagaatctaaagatgtgtttagaacctcttgtttaaaaataatagactgcttatcataaaatcacatctcacacatttgaggcagtggtcaaacaggtaaagcctatgatgtgtgtcattttaaagtgtcggaatttagcctctgaataccttctccattgggggaaagatattcttggaaccactcatgacatatcttagaaggtcattgacaatgtataaactaattgttggtttgatatttatgtaaatatcagtttaccatgctttaattttgcacattcgtactatagggagcctattggttctctattagtcttgtgggttttctgtttgaaaaggagtcatggcatctgtttacatttaccttatcaaacctagaatgtgtatatttataaatgtatgtcttcattgctaggtactaatttgcagatgtctttacatatttcaatacagaaactataacattcaatagtgtgctgtcaaagtgtgcttagctcacctggatatacctacattgttaaatgtctaaacagtaatcattaaaacatttttgattacctgtg

SEQ ID NO: 6513 - DNA, 2875 bp, Homo sapiens
  source 1..2875: mol_type = unassigned DNA; mol_type = unassigned DNA
aaaaaaatttcccagagacacgtggaaccgaggggccaaccccggcctaggctctccaccgcatcggattctggaatttacgatcacgaaagttctattgtcccgcgattggctcccgggccgcatgacatcatagcgcttgattcatccttcgggtcccgattggctggccgcgccattgtgacgtcacggtcagcccacgttctgattgtagatagccggcgccttcctcttcccatcgcgcgggtcctagccaccggtgtctccttctacatccgcctctgcgccggctgccacccgcgctccctccgccgccgccgccttgctgctgctcaaagctgctgccgccccttgggctaaaaggttttcaaatggaacattttgatgcatcacttagtacctatttcaaggcattgctaggccctcgagatactagagtaaaaggatggtttcttctggacaattatatacccacatttatctgctctgtcatatatttactaattgtatggctgggaccaaaatacatgaggaataaacagccattctcttgccgggggattttagtggtgtataaccttggactcacactgctgtctctgtatatgttctgtgagttagtaacaggagtatgggaaggcaaatacaacttcttctgtcagggcacacgcaccgcaggagaatcagatatgaagattatccgtgtcctctggtggtactacttctccaaactcatagaatttatggacactttcttcttcatcctgcgcaagaacaaccaccagatcacggtcctgcacgtctaccaccatgcctcgatgctgaacatctggtggtttgtgatgaactgggtcccctgcggccactcttcagtttgtgctgacaatcatccagaccagctgcggggtcatctggccgtgcacattccctcttggttggttgtatttccagattggatacatgatttccctgattgctctcttcacaaacttctacattcagacctacaacaagaaaggggcctcccgaaggaaagaccacctgaaggaccaccagaatgggtccatggctgctgtgaatggacacaccaacagcttttcacccctggaaaacaatgtgaagccaaggaagctgcggaaggattgaagtcaaagaattgaaaccctccaaaccacgtcatctgattgtaagcacaatatgagttgtgccccaatgctcgttaacagctgctgtaactagtctggcctacaatagtgtgattcatgtaggacttctttcatcaattcaaaacccctagaaaacgtatacagattatataagtagggataagatttctaacatttctgggctctctgacccctgcgctagactgtggaaagggagtattattatagtatacaacactgctgttgccttattagttataacatgataggtgctgaattgtgattcacaatttaaaaacactgtaatccaaacttttttttttaactgtagatcatgcatgtgattgtaaatgtaaatttgtacaatgttgttatggtagagaaacacacatgccttaaaatttaaaaagcagggcccaaagcttattagtttaaattagggtatgtttcaagtttgtattaatttgtaatagctctgtttagaaaaaatcaaagaccatgatttatgaaactaatgtgacataatttccagtgacttgttgatgtgaaatcagacacggcaccttcagttttgtactattggctttgaatcaagcaggctcaaatctagtggaacagtcagtttaactttttaacagatcttatttttttattttgagtgccactattaatgtaaaaaggggggggctctacagcagtcgtgatgaaacttaaatatatattctttgtcctcgagattttaggaagggtgtagggtgagtaggccatttttaatttctgaagtgctaagtgtttttatacagcaaacaaaaagtcaattttgctttccaccagtgcgagagaggatgtatacttttcaagagagatgattgcctatttaccgtttgacagagtcccgtagatgagcaatggggaactggttgccagggtctaaatttggattgatttatgcactgttatctgttttgacacagatttccttgtaaaatgtgcctagtttaccaaaattaacaaagggggggaaaggaccttagaactttttaaggtaaaatcaaatatagctacagcataagagaatcgagaaatttgatagaggtaacttgtttaatgtaaatctaatagtacttgtaatttctttctgcttagaatctaaagatgtgtttagaacctcttgtttaaaaataatagactgcttatcataaaatcacatctcacacatttgaggcagtggtcaaacaggtaaagcctatgatgtgtgtcattttaaagtgtcggaatttagcctctgaataccttctccattgggggaaagatattcttggaaccactcatgacatatcttagaaggtcattgacaatgtataaactaattgttggtttgatatttatgtaaatatcagtttaccatgctttaattttgcacattcgtactatagggagcctattggttctctattagtcttgtgggttttctgtttgaaaaggagtcatggcatctgtttacatttaccttatcaaacctagaatgtgtatatttataaatgtatgtcttcattgctaggtactaatttgcagatgtctttacatatttcaatacagaaactataacattcaatagtgtgctgtcaaagtgtgcttagctcacctggatatacctacattgttaaatgtctaaacagtaatcattaaaacatttttgattacctgtg

SEQ ID NO: 6514 - DNA, 3994 bp, Homo sapiens
  source 1..3994: mol_type = unassigned DNA; mol_type = unassigned DNA
tccctccggccctcggcgggcacctggcggcggcgggcagggggcggcgctgcgcgcgtcacgcggctgggtgggatagcgggcaggtgacacccggcggcctcctcccctttccaacccagtcggcggccgggacagcgggggccgctgtgaggagctccgcgctcgcgctgccagtcgccgccctctctcccgcgcgcgcccggcgcttcggctccgctccctgtgcggcatttaaacttccctcttagaactgcttttgtggcatcccataagttttgaacccattaaaagagccagtaaatcctgtggaaaatggccttcagtgatcttacatcgaggactgtgcatctttatgataattggatcaaagatgctgatccaagagttgaagattggctcctcatgtcctcgcctctgccacaaaccatcctcctaggattctatgtctattttgtcacttccttgggaccaaagctcatggaaaatcgcaagccctttgaactcaagaaagcaatgataacgtacaattttttcatagtactcttttctgtgtatatgtgttatgagtttgtgatgtctggctggggtataggttattcatttcgatgtgacattgttgactattcacggtcacccacagctttgaggatggcacgtacctgctggctttattacttctccaaatttattgagctattagatacgatcttttttgttctgcgcaagaaaaatagccaagtgactttccttcatgtattccatcataccatcatgccgtggacctggtggtttggagtcaaatttgctgcaggtggtttgggaacattccatgcccttctaaatacagctgtacatgtagtcatgtattcctactatggactttctgcattggggccagcctaccagaagtatttgtggtggaaaaaatatttgacatcattacagcttgtccagtttgttattgtcgccatccacataagccagttctttttcatggaggattgcaagtatcagtttccagtctttgcgtgcatcattatgagttacagtttcatgtttctgctgctctttctccatttttggtaccgtgcttacaccaaaggtcagaggttgcccaaaactgtgaaaaatggaacttgcaaaaacaaagataattgaagcccaacataagtctatgatcgaaactgatacattgtcttccttgacaatcaagagatatttacctatgcagtgcattttgtatatttttcaaaactaagagcttgtatttttatggtaagttattgggatgtctgatatttgagagcccgaagcttccagataacagtcttctgataattagagcctacagcagccagaatttgtttttgtttttgtttttgtttttttagctgcttttaaacctaatccaaaggttttgtttaaaacattttgttgcagtgaaaaaaagatatgaagcaatacagtactcttcaaagaagtccaataaagatgaaaaatatcattaggtattttgagcacagacggagatccatgtgataaaatagattccttctgctgggtctggaaagtctggaaaccacctgtaggccctggctttgtcatttattgactgtattcagaagatactatatttgctctagagttaactcccattttagcaagctagcacaggtgaaaattgagtgagtttttgataacttgtcatttaaaatcattaatgataattttcaatggatcttttcagtagccatcaccagttttgctgataagacttcctcacaacccatttgttgtacaaactgtttcaaagtagcaatcctttgggttagtacacttgataccaagtttcattcagttgattattttcaaaacaaggtgatttgttttaatgggttaatgaatactttgctattactgttttacaattaactttgtatatctctggaaagaggtgaatttgtcaatgaaaaaagtattgtgtagttcagtgggaaaaacctgttgtctgttatagtatcacatcactttcttacattgtcatggtttaaattattatcttggtgaaatatataggttagatacttaaatgttcatattattagcacactacaggtactacccttaaatcataaataatattacccattgtacacagtttccagatatgagttagagtggctgtgaagcaactagaggcaaattgtggcacagagaatatccaggggaaaattgattatgtaagcaagggctgttctactttgagagagagacagacagactacataatagtaatatattatataattaatgttatagatacactgaacaataaaacattttctggaattatgaattaattaacaacctggatttctgtttccagacctataaaccatgtaatgaaggactgaaattcgtttggcatacactttgtttctttaaaattgctagtttctttctgttatttttacattttcttgtcagagaatcaaaactattagtcagtagagttttgtccatgaaataatatttggacatttgtgaatttttccctattttttttcttcttttatttatactcaattttgaagcactgtttatgtttgtaggactttaaacaattagtacttaaagccccagttaattttgaacacacagagatacttattgtactctgtgtacagtaagtatttttatgtttacacttaccagattcataaggttatttgcctttaagtgatcttttgtgattttacttgattacagcatgagaaggtaaaggttgataaatgggagtaattacatatatatatataatttattatttttttttctgaagcagagttttactcttgttgcccaggctagagtgcaatggcacaatctcggttcactgcaacctctgcctcccaggttcaagtgattctcctgtctcagcctcccaagtagctgggattacaggtgcccgccaccatgctcagctaatttttgtatttttagtagagacagggttggccaggctggtctcgagctcctgacctcaggtgatcctcccacctcggcctcccaaagttctgggattacaggggtgagccactgtgcccggccataattttatatttttagaaaataaagaatgaaggacaaaagagcacagctaaatgaaactgctgctctaatttattccactggaaaggtctcaggactccttaactgttttccaggtttggctcttcatatctaacctgtgctaaaatgagaaggtatgctaggtgctgttagaaatcacaccatttccaaagaacccaagtagtatagagaccaaaatgaggcaaaaataaaagagatgaaacaggagagtttatttcttgcatactttccgaccttcatcatacaacctctcctaacctccctgtagtctttaaaatgtttaacttgcctataagctaacatgtaataaaacacatactcaattatatgaatagaagtggagagccagaatgctacaaaagaaatcacagctgctagaagtatcctccatagaaacatcaacatgattgtggatcaaaatgattttcactggatatggaatttgtatgggccatatttattaaaagagttctgtgtggtcacatagagttcctttgggatttcatcccacttttcaggacttaatttgtttgggtttgcttacctaacaagcaacaacaacaacaaaataaatagttccaaaatctagtttattacataaatctctatgaatccttgagggcctatatctatattataaataaatacaaatatagatttttaaatatctatgggactttgccatttacagccttaagtataaaattacgagattatattctttccattaccctttatttctgctaactttttaaagactggaacattctgtggatgttgtcaaagtttgagtttgtttttccctgtgtattataataaatttgtggtattgcatgta

SEQ ID NO: 6515 - DNA, 4165 bp, Homo sapiens
  source 1..4165: mol_type = unassigned DNA; mol_type = unassigned DNA
cagtcgccgccctctctcccgcgcgcgcccggcgcttcggctccgctccctgtgcggcatttaaacttccctcttagaactgcttttgtggcatcccataagttttgaacccattaaaagagccagtaaatcctgtggaaaatggccttcagtgatcttacatcgaggactgtgcatctttatgataattggatcaaagatgctggttgattcttacctatcaactagaaattgcaagtctaccaaattcaggaaggaaatgcacacctcttggcacctaccacagatgaaattatagtcaaatttacaacgatttcagcaaagatacactgtttcatcatttgcagctttctcagcagactactaaagaccaaatttatctcactaaaagtgttcccaacagtttttcctttgaggaatgccaaggttctttcttcttcatttcattagtacttggaatcttaaagatgtactctttgagccagtacctgctacttaagaagagaatactctcttagaagcagctgatggaaaagcccattaatattctatatccaagagttgaagattggctcctcatgtcctcgcctctgccacaaaccatcctcctaggattctatgtctattttgtcacttccttgggaccaaagctcatggaaaatcgcaagccctttgaactcaagaaagcaatgataacgtacaattttttcatagtactcttttctgtgtatatgtgttatgagtttgtgatgtctggctggggtataggttattcatttcgatgtgacattgttgactattcacggtcacccacagctttgaggatggcacgtacctgctggctttattacttctccaaatttattgagctattagatacgatcttttttgttctgcgcaagaaaaatagccaagtgactttccttcatgtattccatcataccatcatgccgtggacctggtggtttggagtcaaatttgctgcaggtggtttgggaacattccatgcccttctaaatacagctgtacatgtagtcatgtattcctactatggactttctgcattggggccagcctaccagaagtatttgtggtggaaaaaatatttgacatcattacagcttgtccagtttgttattgtcgccatccacataagccagttctttttcatggaggattgcaagtatcagtttccagtctttgcgtgcatcattatgagttacagtttcatgtttctgctgctctttctccatttttggtaccgtgcttacaccaaaggtcagaggttgcccaaaactgtgaaaaatggaacttgcaaaaacaaagataattgaagcccaacataagtctatgatcgaaactgatacattgtcttccttgacaatcaagagatatttacctatgcagtgcattttgtatatttttcaaaactaagagcttgtatttttatggtaagttattgggatgtctgatatttgagagcccgaagcttccagataacagtcttctgataattagagcctacagcagccagaatttgtttttgtttttgtttttgtttttttagctgcttttaaacctaatccaaaggttttgtttaaaacattttgttgcagtgaaaaaaagatatgaagcaatacagtactcttcaaagaagtccaataaagatgaaaaatatcattaggtattttgagcacagacggagatccatgtgataaaatagattccttctgctgggtctggaaagtctggaaaccacctgtaggccctggctttgtcatttattgactgtattcagaagatactatatttgctctagagttaactcccattttagcaagctagcacaggtgaaaattgagtgagtttttgataacttgtcatttaaaatcattaatgataattttcaatggatcttttcagtagccatcaccagttttgctgataagacttcctcacaacccatttgttgtacaaactgtttcaaagtagcaatcctttgggttagtacacttgataccaagtttcattcagttgattattttcaaaacaaggtgatttgttttaatgggttaatgaatactttgctattactgttttacaattaactttgtatatctctggaaagaggtgaatttgtcaatgaaaaaagtattgtgtagttcagtgggaaaaacctgttgtctgttatagtatcacatcactttcttacattgtcatggtttaaattattatcttggtgaaatatataggttagatacttaaatgttcatattattagcacactacaggtactacccttaaatcataaataatattacccattgtacacagtttccagatatgagttagagtggctgtgaagcaactagaggcaaattgtggcacagagaatatccaggggaaaattgattatgtaagcaagggctgttctactttgagagagagacagacagactacataatagtaatatattatataattaatgttatagatacactgaacaataaaacattttctggaattatgaattaattaacaacctggatttctgtttccagacctataaaccatgtaatgaaggactgaaattcgtttggcatacactttgtttctttaaaattgctagtttctttctgttatttttacattttcttgtcagagaatcaaaactattagtcagtagagttttgtccatgaaataatatttggacatttgtgaatttttccctattttttttcttcttttatttatactcaattttgaagcactgtttatgtttgtaggactttaaacaattagtacttaaagccccagttaattttgaacacacagagatacttattgtactctgtgtacagtaagtatttttatgtttacacttaccagattcataaggttatttgcctttaagtgatcttttgtgattttacttgattacagcatgagaaggtaaaggttgataaatgggagtaattacatatatatatataatttattatttttttttctgaagcagagttttactcttgttgcccaggctagagtgcaatggcacaatctcggttcactgcaacctctgcctcccaggttcaagtgattctcctgtctcagcctcccaagtagctgggattacaggtgcccgccaccatgctcagctaatttttgtatttttagtagagacagggttggccaggctggtctcgagctcctgacctcaggtgatcctcccacctcggcctcccaaagttctgggattacaggggtgagccactgtgcccggccataattttatatttttagaaaataaagaatgaaggacaaaagagcacagctaaatgaaactgctgctctaatttattccactggaaaggtctcaggactccttaactgttttccaggtttggctcttcatatctaacctgtgctaaaatgagaaggtatgctaggtgctgttagaaatcacaccatttccaaagaacccaagtagtatagagaccaaaatgaggcaaaaataaaagagatgaaacaggagagtttatttcttgcatactttccgaccttcatcatacaacctctcctaacctccctgtagtctttaaaatgtttaacttgcctataagctaacatgtaataaaacacatactcaattatatgaatagaagtggagagccagaatgctacaaaagaaatcacagctgctagaagtatcctccatagaaacatcaacatgattgtggatcaaaatgattttcactggatatggaatttgtatgggccatatttattaaaagagttctgtgtggtcacatagagttcctttgggatttcatcccacttttcaggacttaatttgtttgggtttgcttacctaacaagcaacaacaacaacaaaataaatagttccaaaatctagtttattacataaatctctatgaatccttgagggcctatatctatattataaataaatacaaatatagatttttaaatatctatgggactttgccatttacagccttaagtataaaattacgagattatattctttccattaccctttatttctgctaactttttaaagactggaacattctgtggatgttgtcaaagtttgagtttgtttttccctgtgtattataataaatttgtggtattgcatg

SEQ ID NO: 6516 - DNA, 1034 bp, Homo sapiens
  source 1..1034: mol_type = unassigned DNA; mol_type = unassigned DNA
attataaactcatttctgttttattttactgaagaacccattaaaagagccagtaaatcctgtggaaaatggccttcagtgatcttacatcgaggactgtgcatctttatgataattggatcaaagatgctgatccaagagttgaagattggctcctcatgtcctcgcctctgccacaaaccatcctcctaggattctatgtctattttgtcacttccttgggaccaaagctcatggaaaatcgcaagccctttgaactcaagaaagcaatgataactttgtgatgtctggctggggtataggttattcatttcgatgtgacattgttgactattcacggtcacccacagctttgaggatggcacgtacctgctggctttattacttctccaaatttattgagctattagatacgatcttttttgttctgcgcaagaaaaatagccaagtgactttccttcatgtattccatcataccatcatgccgtggacctggtggtttggagtcaaatttgctgcaggtggtttgggaacattccatgcccttctaaatacagctgtacatgtagtcatgtattcctactatggactttctgcattggggccagcctaccagaagtatttgtggtggaaaaaatatttgacatcattacagcttgtccagtttgttattgtcgccatccacataagccagttctttttcatggaggattgcaagtatcagtttccagtctttgcgtgcatcattatgagttacagtttcatgtttctgctgctctttctccatttttggtaccgtgcttacaccaaaggtcagaggttgcccaaaactgtgaaaaatggaacttgcaaaaacaaagataattgaagcccaacataagtctatgatcgaaactgatacattgtcttccttgacaatcaagagatatttacctatgcagtgcattttgtatatttttcaaaactaagagcttgtatttttatggtaagttattgggatgtctgatatttgagagcccgaagcttccagataa

SEQ ID NO: 6517 - DNA, 737 bp, Homo sapiens
  source 1..737: mol_type = unassigned DNA; mol_type = unassigned DNA
gagccgcatcctgtcttggtggctgctgctggccgggaggaggctgatgaatacagagccgtggaacaggtcgtgccggagatggaaacaggaaagcctgttgttttgtcgtcccagatacttaggaacttcaagcagtcgtcccagatataaaaggcatttaaacttccctcttagaactgcttttgtggcatcccataagttttgaacccattaaaagagccagtaaatcctgtggaaaatggccttcagtgatcttacatcgaggactgtgcatctttatgataattggatcaaagatgctgatccaagagttgaagattggctcctcatgtcctcgcctctgccacaaaccatcctcctaggattctatgtctattttgtcacttccttgggaccaaagctcatggaaaatcgcaagccctttgaactcaagaaagcaatgataacgtacaattttttcatagtactcttttctgtgtatatgtgttatgagtttgtgatgtctggctggggtataggttattcatttcgatgtgacattgttgactattcacggtcacccacagctttgaggatggcacgtacctgctggctttattacttctccaaatttattgagctattagatacgatcttttttgttctgcgcaagaaaaatagccaagtgactttccttcatgtattccatcataccatcatgccgtggacctggtggtttggagtcaaatttgctg

SEQ ID NO: 6518 - DNA, 730 bp, Homo sapiens
  source 1..730: mol_type = unassigned DNA; mol_type = unassigned DNA
agtcggcggccgggacagcgggggccgctgtgaggagctccgcgctcgcgctgccagtcgccgccctctctcccgcgcgcgcccggcgcttcggctccgctccctgtgcgatacttaggaacttcaagcagtcgtcccagatataaaaggcatttaaacttccctcttagaactgcttttgtggcatcccataagttttgaacccattaaaagagccagtaaatcctgtggaaaatggccttcagtgatcttacatcgaggactgtgcatctttatgataattggatcaaagatgctgatccaagagttgaagattggctcctcatgtcctcgcctctgccacaaaccatcctcctaggattctatgtctattttgtcacttccttgggaccaaagctcatggaaaatcgcaagccctttgaactcaagaaagcaatgataacgtacaattttttcatagtactcttttctgtgtatatgtgttatgagtttgtgatgtctggctggggtataggttattcatttcgatgtgacattgttgactattcacggtcacccacagctttgaggatggcacgtacctgctggctttattacttctccaaatttattgagctattagatacgatcttttttgttctgcgcaagaaaaatagccaagtgactttccttcatgtattccatcataccatcatgccgtggacctggtggtttggagtcaaatttgctg

SEQ ID NO: 6519 - DNA, 595 bp, Homo sapiens
  source 1..595: mol_type = unassigned DNA; mol_type = unassigned DNA
gccgccctctctcccgcgcgcgcccggcgcttcggctccgctccctgtgcgaacccattaaaagagccagtaaatcctgtggaaaatggccttcagtgatcttacatcgaggactgtgcatctttatgataattggatcaaagatgctgatccaagagttgaagattggctcctcatgtcctcgcctctgccacaaaccatcctcctaggattctatgtctattttgtcacttccttgggaccaaagctcatggaaaatcgcaagccctttgaactcaagaaagcaatgataacgtacaattttttcatagtactcttttctgtgtatatgtgttatgagatactgttttaaaagaagaccttcccaccatcagactgaaagaattttgtgatgtctggctggggtataggttattcatttcgatgtgacattgttgactattcacggtcacccacagctttgaggatggcacgtacctgctggctttattacttctccaaatttattgagctattagatacgatcttttttgttctgcgcaagaaaaatagccaagtgactttccttcatgtattccatcataccatcatgccg

SEQ ID NO: 6520 - DNA, 3827 bp, Homo sapiens
  source 1..3827: mol_type = unassigned DNA; mol_type = unassigned DNA
aacccagtcggcggccgggacagcgggggccgctgtgaggagctccgcgctcgcgctgccagtcgccgccctctctcccgcgcgcgcccggcgcttcggctccgctccctgtgcgaacccattaaaagagccagtaaatcctgtggaaaatggccttcagtgatcttacatcgaggactgtgcatctttatgataattggatcaaagatgctgatccaagagttgaagattggctcctcatgtcctcgcctctgccacaaaccatcctcctaggattctatgtctattttgtcacttccttgggaccaaagctcatggaaaatcgcaagccctttgaactcaagaaagcaatgataacgtacaattttttcatagtactcttttctgtgtatatgtgttatgagtttgtgatgtctggctggggtataggttattcatttcgatgtgacattgttgactattcacggtcacccacagctttgaggatggcacgtacctgctggctttattacttctccaaatttattgagctattagatacgatcttttttgttctgcgcaagaaaaatagccaagtgactttccttcatgtattccatcataccatcatgccgtggacctggtggtttggagtcaaatttgctgcaggtggtttgggaacattccatgcccttctaaatacagctgtacatgtagtcatgtattcctactatggactttctgcattggggccagcctaccagaagtatttgtggtggaaaaaatatttgacatcattacagcttgtccagtttgttattgtcgccatccacataagccagttctttttcatggaggattgcaagtatcagtttccagtctttgcgtgcatcattatgagttacagtttcatgtttctgctgctctttctccatttttggtaccgtgcttacaccaaaggtcagaggttgcccaaaactgtgaaaaatggaacttgcaaaaacaaagataattgaagcccaacataagtctatgatcgaaactgatacattgtcttccttgacaatcaagagatatttacctatgcagtgcattttgtatatttttcaaaactaagagcttgtatttttatggtaagttattgggatgtctgatatttgagagcccgaagcttccagataacagtcttctgataattagagcctacagcagccagaatttgtttttgtttttgtttttgtttttttagctgcttttaaacctaatccaaaggttttgtttaaaacattttgttgcagtgaaaaaaagatatgaagcaatacagtactcttcaaagaagtccaataaagatgaaaaatatcattaggtattttgagcacagacggagatccatgtgataaaatagattccttctgctgggtctggaaagtctggaaaccacctgtaggccctggctttgtcatttattgactgtattcagaagatactatatttgctctagagttaactcccattttagcaagctagcacaggtgaaaattgagtgagtttttgataacttgtcatttaaaatcattaatgataattttcaatggatcttttcagtagccatcaccagttttgctgataagacttcctcacaacccatttgttgtacaaactgtttcaaagtagcaatcctttgggttagtacacttgataccaagtttcattcagttgattattttcaaaacaaggtgatttgttttaatgggttaatgaatactttgctattactgttttacaattaactttgtatatctctggaaagaggtgaatttgtcaatgaaaaaagtattgtgtagttcagtgggaaaaacctgttgtctgttatagtatcacatcactttcttacattgtcatggtttaaattattatcttggtgaaatatataggttagatacttaaatgttcatattattagcacactacaggtactacccttaaatcataaataatattacccattgtacacagtttccagatatgagttagagtggctgtgaagcaactagaggcaaattgtggcacagagaatatccaggggaaaattgattatgtaagcaagggctgttctactttgagagagagacagacagactacataatagtaatatattatataattaatgttatagatacactgaacaataaaacattttctggaattatgaattaattaacaacctggatttctgtttccagacctataaaccatgtaatgaaggactgaaattcgtttggcatacactttgtttctttaaaattgctagtttctttctgttatttttacattttcttgtcagagaatcaaaactattagtcagtagagttttgtccatgaaataatatttggacatttgtgaatttttccctattttttttcttcttttatttatactcaattttgaagcactgtttatgtttgtaggactttaaacaattagtacttaaagccccagttaattttgaacacacagagatacttattgtactctgtgtacagtaagtatttttatgtttacacttaccagattcataaggttatttgcctttaagtgatcttttgtgattttacttgattacagcatgagaaggtaaaggttgataaatgggagtaattacatatatatatataatttattatttttttttctgaagcagagttttactcttgttgcccaggctagagtgcaatggcacaatctcggttcactgcaacctctgcctcccaggttcaagtgattctcctgtctcagcctcccaagtagctgggattacaggtgcccgccaccatgctcagctaatttttgtatttttagtagagacagggttggccaggctggtctcgagctcctgacctcaggtgatcctcccacctcggcctcccaaagttctgggattacaggggtgagccactgtgcccggccataattttatatttttagaaaataaagaatgaaggacaaaagagcacagctaaatgaaactgctgctctaatttattccactggaaaggtctcaggactccttaactgttttccaggtttggctcttcatatctaacctgtgctaaaatgagaaggtatgctaggtgctgttagaaatcacaccatttccaaagaacccaagtagtatagagaccaaaatgaggcaaaaataaaagagatgaaacaggagagtttatttcttgcatactttccgaccttcatcatacaacctctcctaacctccctgtagtctttaaaatgtttaacttgcctataagctaacatgtaataaaacacatactcaattatatgaatagaagtggagagccagaatgctacaaaagaaatcacagctgctagaagtatcctccatagaaacatcaacatgattgtggatcaaaatgattttcactggatatggaatttgtatgggccatatttattaaaagagttctgtgtggtcacatagagttcctttgggatttcatcccacttttcaggacttaatttgtttgggtttgcttacctaacaagcaacaacaacaacaaaataaatagttccaaaatctagtttattacataaatctctatgaatccttgagggcctatatctatattataaataaatacaaatatagatttttaaatatctatgggactttgccatttacagccttaagtataaaattacgagattatattctttccattaccctttatttctgctaactttttaaagactggaacattctgtggatgttgtcaaagtttgagtttgtttttccctgtgtattataataaatttgtggtattgcatgt

SEQ ID NO: 6521 - DNA, 1234 bp, Homo sapiens
  source 1..1234: mol_type = unassigned DNA; mol_type = unassigned DNA
gaggaagaggtcggtccggccatggcgcgggttggacccgggagggcgggggtctcttgccagggccggggccggggacggggcgggagcggtcagcggcgacctccaacctgggagatctcagactccgacgctgaggactccgccggctcggaggccgccgcgagagcccgggacccagcgggtgagcgcagggcggctgccgaggcgttgcggctgctgcggccggagcaggtcctgaagcgcctcgcggtgtgcgtggacacagccatcctggaagacgccggtgccgacgtcctgatggaggccctggaggccctgggctgcgagtgccgcatcgagccccagcgcccggcccgcagcctgcggtggacccgagcgagtcccgacccctgcccccgcagcctgcctcctgaagtgtgggctgcaggtgaacaggaattgctgctgctgctggagcccgaggagtttctgcagggcgtcgccacactgacccagatctctggcccaacccactgggtgccctggatctcccccgagaccaccgcccggccccacctggctgtcatcgggctggatgcctacctgtggtctcgccagcacgtttcccgggggacacagcagccagagagcccgaaggtggccggtgccgaggtggccgtcagctggccggaggtggaagaggccctggtactcctgcagctctgggcaaacctggacgtgctactggtggcctcttggcaggagctgagtcggcacgtgtgcgccgttaccaaggctctcgcccagtatcccctcaagcagtaccgggaatcccaggccttctccttctgcacagcagggcgctgggcagccggcgagccagtggcaagagacggcgcagggctgcaggcggcctggcggaggcagatcaggcagttcagtcgggtcagcccagccgtggctgatgcagttgtcacagccttcccctccccccgccttctgcagcaggcgctggaggcctgcagcacggagcgggagcgcatgggcctcctggccgaccttcctgtgccgcccagtgaaggcgggcgtccccgcagggtggggcctgacctctcccgccgcatctgcctcttcctgaccacagccaaccctgatctcctgctggacctgggctcctgaccacacgtgggaccaccaggacagcatgcagccttggggacagaccagacaccctgggcggtgggggaggacc

SEQ ID NO: 6522 - DNA, 5613 bp, Homo sapiens
  source 1..5613: mol_type = unassigned DNA; mol_type = unassigned DNA
ctcagactccgacgctgaggactccgccggctcggaggccgccgcgagagcccgggacccagcgggtgagcgcagggcggctgccgaggcgttgcggctgctgcggccggagcaggtcctgaagcgcctcgcggtgtgcgtggacacagccatcctggaagacgccggtgccgacgtcctgatggaggccctggaggccctgggctgcgagtgccgcatcgagccccagcgcccggcccgcagcctgcggtggacccgagcgagtcccgacccctgcccccgcagcctgcctcctgaagtgtgggctgcaggtgaacaggaattgctgctgctgctggagcccgaggagtttctgcagggcgtcgccacactgacccagatctctggcccaacccactgggtgccctggatctcccccgagaccaccgcccggccccacctggctgtcatcgggctggatgcctacctgtggtaccgctcactctcatgcccacagcagggctggctgggacgggggttcaggggaggtgggcacacttctggggttgctgtggcacagctgatcccacttctccaggtgggctctggcagaggccaagctcgggcagggcaggccccatggggagcggggaggaatggtcacctctgctcaggtctcgccagcacgtttcccgggggacacagcagccagagagcccgaaggtggccggtgccgaggtggccgtcagctggccggaggtggaagaggccctggtactcctgcagctctgggcaaacctggacgtgctactggtggcctcttggcaggagctgagtcggcacgtgtgcgccgttaccaaggctctcgcccagtatcccctcaagcagtaccgggaatcccaggccttctccttctgcacagcagggcgctgggcagccggcgagccagtggcaagagacggcgcagggctgcaggcggcctggcggaggcagatcaggcagttcagtcgggtcagcccagccgtggctgatgcagttgtcacagccttcccctccccccgccttctgcagcaggcgctggaggcctgcagcacggagcgggagcgcatgggcctcctggccgaccttcctgtgccgcccagtgaaggcgggcgtccccgcagggtggggcctgacctctcccgccgcatctgcctcttcctgaccacagccaaccctgatctcctgctggacctgggctcctgaccacacgtgggaccaccaggacagcatgcagccttggggacagaccagacaccctgggcggtgggggaggacccccagccacatgtggaccctcagcctgggtgggttctctggctgagcaggtctgacctcaggggaagggtgggtggttgcaggggaagttttaggtagctgggagaagaggggcttctggctggcagatggctggcggttcctgtgctgagtcctgaacacgtaggccccaggggaggcctcagcagcagggctgtgcccccccaacacacacacacactcggcagggaccagaaggcagctccagggccccactgccacctggaggcttggggtgtggcaccctcagccagaagcagtaggggactcccaaggatgtggaggggcagtgaggcctgggagaaggcccaggctgctcgcaagcccggcctctgcacggatacgtttcagctcacgccatgtgggtgttagacatcaactctacatttattgcagtcctttaagtctatgacggcggggcagccgctgacagcatgcagagcaagttaggaaaaaccgaggccctgtgggaacagcaacgcgggctccagccaggctctcgtcctcgcagcctcccacaagacctggggctcagggcagccgcttccccacccagcacagcagcagaggggccctagagcccccacagaaaggactgtcccagcctcgggagcaagagatggctccctccggacgggcctcatccaactccgccctggagtgtggctggaaggaagggacagagaaagaagggacagaggaaaggggctgtcccagcccaagaaggcagttccactgggaagtcagtcaggtccggcggcagcgcttcctctggcagggccgaggctcgcgactgctggggtgggcggaggtcgctgcctggggatcggacactggagccttgcggcggctgcaactcatgctcaggacccagcccagcttgttgtgtagcacctgcttgaggcccggcggcagcggcagaccctccagcgtgtctcccgagtctggccgcagctggcgcaggcggtggcagcacaggtactggagggaagtggcgctggcacaggagcgggtgaccttcatgctgctccgggccgccgtggagcacaccatcgggtagaatctcttgttctgcagcttggtggctgccacacctggaagggaggggcccagcctgaaccccaggcagggaaggggccagctactgggcgcagcccctcagacctcacgctacagtcacccgggtgggcagctggcacagctgaggcaaggcagggtgcacgcgctggccctgccactccagcctggcctcactgtcccaccccctgggaccctggggcctcaggcttctgggaggaaccctttcagaaaacctcagtgtcccctgggctggggcggggtggctgcctccctcggggtgacagctgagaggagctcaagtcctgtgacggcctcacctatacacttcctgttcttgaaaaaggtgagtgtgccgtgccaggtgtccaggtgcacgccaatgatggagccctggccgaaccgcgatgagaagctggtcttgtcgcccttgtggtggaggaggcctgggggcagccagggtcgcagtgagcccgggagctccaggctcggccccgccccaccctgggcctcacgcacccgtgtaggagaggccccagctgtcctcatccctgcccagcaggctgcagaacgtgtggcggtatttgtccaggtccacatccgacgtcccgatgcccaccatctaggaacaggggccaggcagagggcgcggggctgggctgccggagccaggttccccagaagcaccctgggccgaagcaacttaccatgtcggtgccgtagacgggagaggtcatcttgatctcccagaagtgctggccctcccccagctccttggtgccccggatggccgctgtgccgcagctgtactccatgtggaagctgaccttacggttgtcacagctcagcagggtggctgatgacttatttaagtcatcccagacccagtcgaaatctgcaagagaggcccaggctggggcagccctgagagctccatggggctctgccctgcccacccccaggcccgcccgcagtgcagtcccagcaggggctgggccccacgctcacactcgtcttcctctccgcagcggcagtccctgccccggtgggccgagtgcaggctgctacagaaggaggcctcgctctgcccagcacagtcacagaaggactcgccggtcacgggcaccgcactggggatggatggcggcagcgtggagtactcggggtcggagtccgagtcgctgtgctgggagagaagggccggctgttactacctgttgcccgctctctaccctctcacccttgccctctgtccctgtcccaccctgtccctgacccacccaggaaaggatgggggtccaggcctccagggacttcacagtaccccgagcgcacagcccaggctccctcccaacgggctccggctctgccccattctgcatgaccaggagggccctggaggcccagccacagagcagtagccaaggctgcctggcctccaagtggtttctagacggtggataagccccaggtccaccccacctgcccagagctgagatggtgtggacaccttccctgctaggccagccctgcaggggcccccaggcaaggccaccacccccacaccaggcccagctgcagccacccggcctcagggcagtccccaccacactgtggcccaacgaccttcctgttacctgagcagacctggctcaccacagggtcctactgcccagtgcccactacaggccccgcccctcctggtgcaggtttcagctgtcacctccctgaggcttctccagccccttcacccctgttccatttttcttcttttgcttcactgaagttctccttggtcctgattcttggcctcctcccaccagaacgtgagctccttgtgggaggcagtgcccctcccagcctcctccctgtcacagactgtgtgggggccacccaggggctgaatggaccagggggtcagcagggagagtgctaagtggtggcggggggcctgtggcagaggccttgtgacagtgagggttgagggctggtccagagagatgatgtgatccccaggagaagccacaggggaccatgacatgggcgccaccagcttccaggtgaacgtggacctatcgaaagccagcttcagggcaggacactgtcctttctggaggggatggccccaccccacagacaaggcaggcccagacaactctaccccactgcctagaagtgcgggtccccagagccagggtagaccccctgagtcaggagcccgggcacagaactgagcacctgcactgcaggcccagggccgggttccctggagaaggagaaagactgaagccactgcctacctcctgcccacaacagactgcaggcccatttggtgacacaggacaagcagcacatgtgtcgaacactgccgagcccgcaggcacgcctgcatcccacagccacgagcctgtgaggctcaggcatgtgacctgcaggagctggaggcgggcgggaaggcaggtgggggcctctccctggctggagcagggagctccaggagacctcaggacggcccccacccggtgggtaaggaccctgtttcccaatttgcccccaaggcctaatggacccaccgggcttagggagtcctcactcagaggagaggagcccacccctcccaggacacctggctgagccggaacagcagcgcaggggagctgtgacagcagagagcagcaccaggtcacacaagcagccgccccggaaggacacggcccatggtgacagaggacaagcagcatgcgtgtgtcagacactggcctggcctgtggacacgcccgcgtcccacagccatgaccctgcgaggccaggagagactgctccagggcacatgacctgtggtagctggaagtggggcagggaggcgcagccacactcctgctctggtccgagggagatctcaggaaaccgactgggaaatcaccccccacagggacccccacccctcccagcctcactgcgcccgtcaggccaggcagctgccctcagggtctgccaaggtgggggtcaggggccatgggggcaggtagctctgcctgcaaagcccacaagcatgtcagatcacctgggctgcagacagacaaacacctgagctgttctgaataccttcaggttcctggcctccctgagcaagtgcagaaatttttaccttcaaggatcagggtttttctgtttgtttgttttttaacacacatatatgtg

SEQ ID NO: 6523 - DNA, 480 bp, Homo sapiens
  source 1..480: mol_type = unassigned DNA; mol_type = unassigned DNA
aggcttgctgttctgcaaaccagctgtggcctggtggcccatggccataggccgcagcctcctgtgaacaactgtgccacacgttctcatcttcagatctctggcccaacccactgggtgccctggatctcccccgagaccaccgcccggccccacctggctgtcatcgggctggatgcctacctgtggtctcgccagcacgtttcccgggggacacagcagccagagagcccgaaggtggccggtgccgaggtggccgtcagctggccggaggtggaagaggccctggtactcctgcagctctgggcaaacctggacgtgctactggtggcctcttggcaggagctgagtcggcacgtgtgcgccgttaccaaggctctcgcccagtatcccctcaagcagtaccgggaatcccaggccttctccttctgcacagcagggcgctgggcagccggcgagccagtggcaagagacggcgca

SEQ ID NO: 6524 - DNA, 434 bp, Homo sapiens
  source 1..434: mol_type = unassigned DNA; mol_type = unassigned DNA
gctgtggcacagctgatcccacttctccaggtgggctctggcagaggccaagctcgggcagggcaggccccatggggagcggggaggaatggtcacctctgctcaggtctcgccagcacgtttcccgggggacacagcagccagagagcccgaaggtggccggtgccgaggtggccgtcagctggccggaggtggaagaggccctggtactcctgcagctctgggcaaacctggacgtgctactggtggcctcttggcaggagctgagtcggcacgtgtgcgccgttaccaaggctctcgcccagtatcccctcaagcagtaccgggaatcccaggccttctccttctgcacagcagggcgctgggcagccggcgagccagtggcaagagacggcgcagggctgcaggcggcctggcggaggcagatcaggcag

SEQ ID NO: 6525 - DNA, 4586 bp, Homo sapiens
  source 1..4586: mol_type = unassigned DNA; mol_type = unassigned DNA
gtctcgccagcacgtttcccgggggacacagcagccagagagcccgaaggtggccggtgccgaggtggccgtcagctggccggaggtggaagaggccctggtactcctgcagctctgggcaaacctggacgtgctactggtggcctcttggcaggagctgagtcggcacgtgtgcgccgttaccaaggctctcgcccagtatcccctcaagcagtaccgggaatcccaggccttctccttctgcacagcagggcgctgggcagccggcgagccagtggcaagagacggcgcagggctgcaggcggcctggcggaggcagatcaggcagttcagtcgggtcagcccagccgtggctgatgcagttgtcacagccttcccctccccccgccttctgcagcaggcgctggaggcctgcagcacggagcgggagcgcatgggcctcctggccgaccttcctgtgccgcccagtgaaggcgggcgtccccgcagggtggggcctgacctctcccgccgcatctgcctcttcctgaccacagccaaccctgatctcctgctggacctgggctcctgaccacacgtgggaccaccaggacagcatgcagccttggggacagaccagacaccctgggcggtgggggaggacccccagccacatgtggaccctcagcctggtcctttaagtctatgacggcggggcagccgctgacagcatgcagagcaagttaggaaaaaccgaggccctgtgggaacagcaacgcgggctccagccaggctctcgtcctcgcagcctcccacaagacctggggctcagggcagccgcttccccacccagcacagcagcagaggggccctagagcccccacagaaaggactgtcccagcctcgggagcaagagatggctccctccggacgggcctcatccaactccgccctggagtgtggctggaaggaagggacagagaaagaagggacagaggaaaggggctgtcccagcccaagaaggcagttccactgggaagtcagtcaggtccggcggcagcgcttcctctggcagggccgaggctcgcgactgctggggtgggcggaggtcgctgcctggggatcggacactggagccttgcggcggctgcaactcatgctcaggacccagcccagcttgttgtgtagcacctgcttgaggcccggcggcagcggcagaccctccagcgtgtctcccgagtctggccgcagctggcgcaggcggtggcagcacaggtactggagggaagtggcgctggcacaggagcgggtgaccttcatgctgctccgggccgccgtggagcacaccatcggcggcagtccctgccccggtgggccgagtgcaggctgctacagaaggaggcctcgctctgcccagcacagtcacagaaggactcgccggtcacgggcaccgcactggggatggatggcggcagcgtggagtactcggggtcggagtccgagtcgctgtgctgggagagaagggccggctgttactacctgttgcccgctctctaccctctcacccttgccctctgtccctgtcccaccctgtccctgacccacccaggaaaggatgggggtccaggcctccagggacttcacagtaccccgagcgcacagcccaggctccctcccaacgggctccggctctgccccattctgcatgaccaggagggccctggaggcccagccacagagcagtagccaaggctgcctggcctccaagtggtttctagacggtggataagccccaggtccaccccacctgcccagagctgagatggtgtggacaccttccctgctaggccagccctgcaggggcccccaggcaaggccaccacccccacaccaggcccagctgcagccacccggcctcagggcagtccccaccacactgtggcccaacgaccttcctgttacctgagcagacctggctcaccacagggtcctactgcccagtgcccactacaggccccgcccctcctggtgcaggtttcagctgtcacctccctgaggcttctccagccccttcacccctgttccatttttcttcttttgcttcactgaagttctccttggtcctgattcttggcctcctcccaccagaacgtgagctccttgtgggaggcagtgcccctcccagcctcctccctgtcacagactgtgtgggggccacccaggggctgaatggaccagggggtcagcagggagagtgctaagtggtggcggggggcctgtggcagaggccttgtgacagtgagggttgagggctggtccagagagatgatgtgatccccaggagaagccacaggggaccatgacatgggcgccaccagcttccaggtgaacgtggacctatcgaaagccagcttcagggcaggacactgtcctttctggaggggatggccccaccccacagacaaggcaggcccagacaactctaccccactgcctagaagtgcgggtccccagagccagggtagaccccctgagtcaggagcccgggcacagaactgagcacctgcactgcaggcccagggccgggttccctggagaaggagaaagactgaagccactgcctacctcctgcccacaacagactgcaggcccatttggtgacacaggacaagcagcacatgtgtcgaacactgccgagcccgcaggcacgcctgcatcccacagccacgagcctgtgaggctcaggcatgtgacctgcaggagctggaggcgggcgggaaggcaggtgggggcctctccctggctggagcagggagctccaggagacctcaggacggcccccacccggtgggtaaggaccctgtttcccaatttgcccccaaggcctaatggacccaccgggcttagggagtcctcactcagaggagaggagcccacccctcccaggacacctggctgagccggaacagcagcgcaggggagctgtgacagcagagagcagcaccaggtcacacaagcagccgccccggaaggacacggcccatggtgacagaggacaagcagcatgcgtgtgtcagacactggcctggcctgtggacacgcccgcgtcccacagccatgaccctgcgaggccaggagagactgctccagggcacatgacctgtggtagctggaagtggggcagggaggcgcagccacactcctgctctggtccgagggagatctcaggaaaccgactgggaaatcaccccccacagggacccccacccctcccagcctcactgcgcccgtcaggccaggcagctgccctcagggtctgccaaggtgggggtcaggggccatgggggcaggtagctctgcctgcaaagcccacaagcatgtcagatcacctgggctgcagacagacaaacacctgagctgttctgaataccttcaggttcctggcctccctgagcaagtgcagaaatttttaccttcaaggatcagggtttttctgtttgtttgttttttaacacacatatatgtgaacaaagagtatgcgtttgtactggcagaagaagcgtctggtaagacaaccagcaagttaacaatggtcacctccagaaatgggctgggtaaaccaaagaatttttttgtttttgttttttttgagtcagggtctagctctgtcacccaggctggaacgcactggtgtgatcacggctcactgcagccttgacctccctggctcaagcaatcctcccagctcagcctcctgagtcgttgggactacaggcacgtgccaccacgcctgacacattttttaaatttttgtagagacagtgtttcaccatgttgcccaggcaggtctcaaactcctgggctcaagtggtcctccagcttcagcctcccaaagtgctaggattataggtgtgagccacagtgcccagccccgtagtggagaatttctgttgaatgaaccaaaagcaactgccaacctctccatgcaccatgtgtttcagaggagaaagcacagtgaagaatgcagtgtgttctgaggtcctgtcacccctgaggctgtgtgtgtcctttgccaaattaaagagtcttactgaatgcggtgcatccaggagacaggcccaggtttggactggtcctctagcctcagaagcatctttttctccgactgattccgtgttcaggtaatgtctgcctgcctgcctagggcatctccacaccttaggccagccacgtccgcctcgcccgctggaacctacctgcccatcagagtcgtagccccagttagtggagcctgctagagccacggcccgggcatctgcgtctcggcgggctgcactcaggacgaagtgccaggccctgctgttccgggggcgtctggccatggtggaaagaatctagaagaaaacacaggctctgggcaaaggaagactcacagcactcccagccctgagcttccaggctgggccacggacccactcaaagtggggactgcaggggccgcaccggtgcccagccagggctccagaacgcttcaggagcccgtacctcactccaggatctgagcagctcaataaaacccaggtagatcctgtgaaacgccacccaga

SEQ ID NO: 6526 - DNA, 549 bp, Homo sapiens
  source 1..549: mol_type = unassigned DNA; mol_type = unassigned DNA
ccaggccttctccttctgcacagcagggcgctgggcagccggcgagccagtggcaagagacggcgcagggctgcaggcggcctggcggaggcagatcaggcagttcagtcgggtcagcccagccgtggctgatgcagttgtcacagccttcccctccccccgccttctgcagcaggcgctggaggcctgcagcacggagcgggagcgcatgggcctcctggccgaccttcctgtgccgcccagtgaaggcgggcgtccccgcagggtggggcctgacctctcccgccgcatctgcctcttcctgaccacagccaaccctgatctcctgctggacctgggctcctgaccacacgtgggaccaccaggacagcatgcagccttggggacagaccagacaccctgggcggtgggggaggacccccagccacatgtggaccctcagcctggcctcccacaagacctggggctcagggcagccgcttccccacccagcacagcagcagaggggccctagagcccccacagaaaggactgtcccagcctcgggag

SEQ ID NO: 6527 - DNA, 5910 bp, Homo sapiens
  source 1..5910: mol_type = unassigned DNA; mol_type = unassigned DNA
ccggagggggcggccgcggagcactggttggagcgccgcgaagcgcccgagcctcttgccttcgcgggcggcgccctggccgccggcagccttgtggccggtgccccgatccgccgcgctccggacccgggcaggcggggcgcgcccgctgcgcgcgggatgtggcagcccagacggccctggccccgcgtgccctggcgctgggcgctggcgctgctggccctggttggcgcggggctgtgccacgccggcccgcagcccgggtatcccgcgcggcccagcgccaggaacaagaactggtgcgcctacatcgtgaacaagaatgtgagctgctccgtgctggagggaagtgagagttttattcaggctcagtacaactgtgcctggaaccagatgccctgtccgtcggcgctggtgtatcgagtgaacttcagacctagatatgtcactaggtataagacagtgacacagttggaatggaggtgctgtcctggctttagagggggagattgccaagaaggtcccaaagaccccgtgaagaccctccgccccacgccggctcggcctcgaaacagcttgaagaaagccacagataatgaacccagccaattctcagagcccaggaagactttgtccccaactggtacagcacaaccaagctggggggtagatccaaaagaggggcctcaggaacttcaggaaaagaagatacaggtgctagaggagaaggttcttcgactcacaaggacggttcttgacctccagtcttcccttgctggagtgagtgaaaatctcaaacatgccactcaggatgatgccagtagaacacgggcaccagggctcagcagccagcaccccaagcctgacaccactgttagtggagacacagaaacgggccagagtcctggtgtcttcaacactaaggaatctggcatgaaggacatcaagtctgaattggctgaagtcaaagatactctaaagaacaaaagtgacaagctggaagagctggatggaaaagtgaagggctacgaagggcagctcagacagctccaggaagcagctcagggcccgacggtgaccatgacaaccaacgaactctaccaagcctatgtggacagtaagatcgacgccctgagagaggagctcatggagggcatggacagaaagctggctgacctgaaaaactcatgtgagtacaagctcactggcctccagcagcagtgtgatgactatgggagcagctacctgggagtgatagagctcataggggagaaggaaacaagcctgagaaaagaaataaataacctccgagcccggctacaggagccttcagcccaggcaaattgctgcgacagtgaaaagaatggtgacattggtcaacagatcaagacattggaccagaaaatcgagagagttgctgaagccaccagaatgctgaatggaagactggacaatgagtttgaccgccttatagttccagagccagatgtggattttgatgcaaaatggaatgaactcgatgcaaggatcaatgtgacggagaagaacgctgaagaacattgcttttacattgaggaaacccttcggggcgccattaatggagaggtgggtgacttgaagcagcttgttgatcagaaaatacagtctctggaagaccgtctggggagcgttctcctacagatgaccaataacactggtgcagagctcagtcccccaggggcagcagccctgccaggagtgtcagggtcaggagatgaacgggtcatgatggaattaaaccacctgaaggacaaagttcaagttgttgaagacatttgcctgctgaacatccagggaaagcctcatgggatggaaggtgccttgccaaacagggaagaccgcgcagtacgcgacagcctgcaccttttgaaatctctcaacgacacgatgcacaggaagtttcaagaaaccgaacaaaccatccagaaacttcaacaggattttagttttctttattctcaattaaaccacacagaaaatgatgtgactcatcttcaaaaggaaatgagcaattgtagagcaggtgaaaacgctggcatgggtaggttcactaaggtgggtgagcaagaaaggacagtggacaccctgccgtccccccagcaccccgtggctcattgctgcagtcagctggaggagaggtggcagaggttgcagagccaggtcatctcggagctggatgcttgtaaggaatgcacgcagggggtccagagggaggtctccatggtggagggcagggtgtctcatatggagaaaacttgcagcaagctggactctatctcaggaaatcttcagaggatcaaggaggggctcaacaagcatgtcagcagcctgtggaactgtgtcaggcagatgaacggaacgctcaggtcgcattccagagacatttctggcctgaagaattcagtccagcagttctacagccacgtcttccagatttctactgatttgcaagatctggtcaaatttcagccatcagcaaaggcgccctcgcccccgccgcccgcagaggccccgaaggagccgctgcagcccgagcccgccccgccgaggcccagcggccccgcaaccgcagaggaccctgggcgacggcccgtcctgccccagcggccccccgaggagaggccgccccagccgccaggctccaccggggtcatcgcggagacgggccaggccgggccccccgcaggcgcaggcgtgtctgggcggggtctgccgcggggcgtggacggccagaccgggagcggcaccgtccccggcgcagaaggcttcgcgggcgcaccaggatacccgaagtcacctcctgtagcttccccaggagctccggtgccttctctggtgtctttttctgcggggctcacccagaagcctttccccagtgatgggggcgttgtcctctttaacaaagtgctggtgaacgacggggatgtttacaaccccagcaccggggtcttcacggctccttatgatgggcgctacctgatcacggccaccctcacccccgagagagacgcctacgtggaagcagtgctgtcggtctccaacgccagcgtggcccagctgcataccgctgggtacaggagagagttcctggaataccaccgccctccaggagctttgcatacctgcgggggcccgggggcattccacctcatcgtgcacctgaaggcgggagatgcagtcaacgtcgtggtgactgggggcaagctggctcacacagactttgatgaaatgtactccacatttagtggggttttcttatatcctttcctttcccacctctaaggtggctggggagatgtcaggggaaagatagatagttgtaaaaactctaaagctttaatatattcggtttgtatgtaatggaagcacggggctagagtttccacataggccccaacataaaggccttccctcgctgttgaggccaccatgccttactgcatccagccaggctgcagggagtgaggcacacggtgaacatggccactgacttttctgccactctaactggacaactggaagacttggaaaggcctccacctgtatctacactctgagggccctggactgggcctgagcttgccacagaggctccgtctgactgtgggctgggaggagggaggcaggggagagccggtcacggtggctggtctttactgcagggcagcactgtggccagctgtctgtctttacactgcatgcagaagtttaaacactgaagtgccgaagtggcccgtgccgccgcacagagaccccgactttagtttgggctgttccacgcttggctcaccattgccgcctgggacttaacctgctcaggcgggccttcgcccagctgcaaatagggatgcgttagagactgttcccaaagcttgttgggctccttaaatggcatgtacaatttaagtgcaaagacagggagtgtcaataaagatggaaagccatttccagttaacttttgttaatttaagtgtggtcccttacagatcgggagttgttgctaaaaagcaaactgaagaaatgttttgtttcaaaaagggctacagaaagtaaccttgagtaaaattaatctcagctacaaaactgttacccctccgcatccaagctatacacttgggttttgtttctggcttgtgaagacggaccagatgtgcacggaggtcaaggccccatgtcatctgcagctggagcggctcctctggggatgctgcactcagatcccacagcagctgcccaggctaacttgatccctgctgcttcactgcaccaatctccagcagacacagctcgccgagctcttgggtttctaagcagcaggaagctcaacctaacgctggccacacgctgacagctgagcccatctgagaacacggcatcttcacacagcgagacgcctccactgaggggaggcccgggagtatcaatctgtcaccagtggccacggagacctctcagcacccttagttcaaggtagtctctgtggatcaggttggtaacacctactggttaatcaagtcccactggggaaaggtttggacggtagaatcaagagctgcagtttccttggcccacaagatgctcttatgctgtaaaaaaaatgctttaagaattgtttgcaaatgaatttacagggtggccactggacacttcagagttccttatttactccccccgccacagctaggaagaccagcaagaactaaaggtttgccgttttactatttaaaatgtggacctctttgtccaggagcgggagggagaatggcatctcaccccattacaacagctggggaactggctaaagagagctgtcagagagtatccttggctgtcctaggaatgactcatggaaagcgccccagtgcagcagtgttttcaggaaaacccagtgggcacgcgccatcgccctctcctctcctctcacgctccttttgaaaagaccgcactcggcgcccaaggggacgtgctcaagagctgcaggggcagggcccaggcaaaaggtgggtgatgactacctgctgctttccctactccgtagatgggtctggaacatcgggtaaaacccagtcctcctctcagtgcatctctactcaccaacaatggtgaatctcagctctgtgtattcaagacaggcaaaacagaatatgcctcattatggctggagcgtgcctctactttgagataaagctggatgacaggtggatcctggcccacttaggagacatctttagaaagggaaaggctgtctttttgtacaggtagtagaacaacaaggtcagctgagcttaaggctgtggggttcgaagcagcccttcaagaagtcatcacccctgaagtagtgcctgcgagtcagtcagaggcataccaaaccctgagacagaatcaggcacaagttcacaacttttttttttttttggggggagacagtcctactctgtcgcccaggctggagtgcagtagcgcgatctcagctcactgcaacctccgcctcccgggttcaagcaattctcctacctcagcctcccgagtagcggggactacaggtgcatgccgccacgcccggttaattttttgtattttagtagagatggggtttcaccgtgttgcccaggctggtcgcgaactcctgagctcagccaatccgcccacctcggcctcccaaagtgctgggattacaggtatgagccaccacgcccagccaagttcacaacttctgatatcaagttgttgctgagaaaaggtcaggacacttcttaagtagagaaggactgtgacatcccctccaaacctccatgtaacactaacaaatggcctcatttacacgattaaaaacaaaatggtatcgtcaataaatgcaaaccttaaactgca

SEQ ID NO: 6528 - DNA, 1544 bp, Homo sapiens
  source 1..1544: mol_type = unassigned DNA; mol_type = unassigned DNA
ccgggagacgcacgccaggagcttcctccgttggaagtcccttccgctggcgacgtgggcgctgtggccgcggccctcgtggagcctgagccctcctcacggcctccgcgcagccctggggccccccggcagggtccctcggcagcccgcgggagaggccgtggggccccggcaggagtgtggttcagagacggtgcgggggtcggtggcctcaggtccctttcagtcacttgcgacgcacccgcggtttccgcgtgctgtgaaatcgggaattgttgatgccggagccaagagtgaggccggtttggaaagcgcaggcgtgtctgggcggggtctgccgcggggcgtggacggccagaccgggagcggcaccgtccccggcgcagaaggcttcgcgggcgcaccaggatacccgaagtcacctcctgtagcttccccaggagctccggtgccttctctggtgtctttttctgcggggctcacccagaagcctttccccagtgatgggggcgttgtcctctttaacaaagtgctggtgaacgacggggatgtttacaaccccagcaccggggtcttcacggctccttatgatgggcgctacctgatcacggccaccctcacccccgagagagacgcctacgtggaagcagtgctgtcggtctccaacgccagcgtggcccagctgcataccgctgggtacaggagagagttcctggaataccaccgccctccaggagctttgcatacctgcgggggcccgggggcattccacctcatcgtgcacctgaaggcgggagatgcagtcaacgtcgtggtgactgggggcaagctggctcacacagactttgatgaaatgtactccacatttagtggggttttcttatatcctttcctttcccacctctaaggtggctggggagatgtcaggggaaagatagatagttgtaaaaactctaaagctttaatatattcggtttgtatgtaatggaagcacggggctagagtttccacataggccccaacataaaggccttccctcgctgttgaggccaccatgccttactgcatccagccaggctgcagggagtgaggcacacggtgaacatggccactgacttttctgccactctaactggacaactggaagacttggaaaggcctccacctgtatctacactctgagggccctggactgggcctgagcttgccacagaggctccgtctgactgtgggctgggaggagggaggcaggggagagccggtcacggtggctggtctttactgcagggcagcactgtggccagctgtctgtctttacactgcatgcagaagtttaaacactgaagtgccgaagtggcccgtgccgccgcacagagaccccgactttagtttgggctgttccacgcttggctcaccattgccgcctgggacttaacctgctcaggcgggccttcgcccagctgcaaatagggatgcgttagagactgttcccaaagcttgttgggctccttaaatggcatgtacaatttaagtgcaaagacagg

SEQ ID NO: 6529 - DNA, 775 bp, Homo sapiens
  source 1..775: mol_type = unassigned DNA; mol_type = unassigned DNA
gggcaggggtccccggcggcgtccgggtggcccgcggcgtcctcggaagatgcgggcggacgcccgtgtgtcccgctggcctgacgtcgcaggggtggccgcagagtcctcacggggaccccgctcgccgggactcatggaggggaccctgacggggcagtcagggctgaggtttcctaatcccgtgtgtttctttctccccgacgcccggcagaggcgccctcgcccccgccgcccgcagaggccccgaaggagccgctgcagcccgagcccgccccgccgaggcccagcggccccgcaaccgcagaggaccctgggcgacggcccgtcctgccccagcggccccccgaggagaggccgccccagccgccaggctccaccggggtcatcgcggagacgggccaggccgggccccccgcaggcgcaggcgtgtctgggcggggtctgccgcggggcgtggacggccagaccgggagcggcaccgtccccggcgcagaaggcttcgcgggcgcaccaggatacccgaagtcacctcctgtagcttccccaggagctccggtgccttctctggtgtctttttctgcggggctcacccagaagcctttccccagtgatgggggcgttgtcctctttaacaaagtgctggtgaacgacggggatgtttacaaccccagcaccggggtcttcacggctccttatgatgggcgctacctgatcacggccaccctcacccccgagagagacgcctacgtggaagcagtgctgtcggtctcca

SEQ ID NO: 6530 - DNA, 9570 bp, Homo sapiens
  source 1..9570: mol_type = unassigned DNA; mol_type = unassigned DNA
ctgggcatccacttgacagccggcggcgctcgcggccctcagcatgttccgcgaggcgagggttttcctcccgcctgtgggctgaggcggcggcggcccccgaaacgagatgcacctgacgggcgcggcttagaggacgcggctggcgggaagtcccggcagccagcgggagggctttcgttgccgggccgccgccgcctcccgtcgccgccgcgggcccgagcgggagcggcgggtgggcgccccgacatggcggcccggagcgccccgagctgccacctgcggctcgagtgggtgtacggctaccggggccaccagtgccgcaacaacctctactacactgcggccaaggagatcgtatacttcgtggcgggggtcggcgtggtgtacagcccgcgggagcacaggcagaagttctaccggggccacagcgacgacatcatcagccttgcattgcatcctgaacgagtgttggtagcaacaggacaagttgggaaagagccttatatttgtatttgggattcatacactgtgcagaccatatcagttttaaaggatgttcatacacatggtatagcttgcttggcgtttgacttagatggacagcgcttggtttcagttggacttgattcaaagaatgcagtttgtgtttgggactggaaaaggggaaaaatgttgtctatggctcctggtcatacagatagaatatttgatatttcttgggatttgtaccagccaaataaacttgtcagctgtggtgtaaaacatatcaagttctggagtttatgtggaaatgctctgaccccaaaacgaggtgtctttggtaagacgggtgaccttcagacaatactgtgcctagcctgtgcaagggatgaattaacatattctggtgcactcaatggggatatatatgtttggaaaggaatcaatcttatacgaacaatacaaggagcccatgctgcaggaatttttagcatgaatgcttgtgaagaaggctttgctactggtggcagagatggttgtattcgtctttgggatttaacttttaaaccaattactgtgattgatctcagggaaacagaccagggatacaaaggtttgtctgtaaggagtgtgtgttggcgaggtgaccacattctagttggaacacaggacagtgaaatttttgaaattgtggtgcaagaaagaaataaaccttttctaattatgcaagggcattgtgaaggtgaactttgggcacttgctgtccatcctactaaacctttggctgtgactggaagtgatgatcgttcggtcaggatatggagcctagtagatcatgcattaatagcaaggtgtaatatggaagaaccaattcgttgtgcagctgtcaatgcagatggaatccatcttgcccttggaatgaaggatggctcattcactgtacttagagtaagagatatgacggaagttgtacatattaaagataggaaggaggcaattcatgagttaaaatattcaccagatggaacttaccttgctgttggatgcaatgacagctcggttgatatttatggagttgctcagcgttataaaaaagttggcgagtgtttgggatcccttagtttcatcactcatctggactggtcttcagacagtagatatttgcagacaaatgatggaaatgggaaaagacttttttatagaatgccaggaggaaaggaagtgacaagtacagaagaaataaaaggtgttcattgggcttcatggacatgtgtttcaggccttgaagtaaatggaatttggcccaagtattcagatatcaacgatataaattcagtagatggaaattatattggccaagttttagttacagctgatgactatggaattataaaattattccgatatccatgtttaagaaaaggggccaagtttagaaaatatattggccattcagctcacgtaactaatgtcagatggtcacatgattatcagtgggttatttctattggtggagcagatcactctgtctttcagtggaaatttattcctgaaagaaaactgaaagatgctgttcacatagcaccccaagaaagtctggctgactctcatagtgatgaatcagattcagatctgtctgatgttccagaactggattctgaaattgaacaagagacacagctcacctaccgtcgacaggtttacaaagaagatctacctcagcttaaagaacagtgcaaagagaaacaaaaaagtgctacttctaaaagaagagagcgggctccaggaaatagtattcgattacactttgttcacggttacagaggttatgactgtcgaagtaatctgttttatactcaaattggtgaaattgtgtaccatgtggcagcagtgggtgtcatttataatcgacagcaaaacacacagcgtttttatctgggtcatgatgatgatattctctgcctaactattcatcctttgaaagactacgtggcaacaggccaggttggtagagatccctcaattcatatatgggatacagagaccattaaaccattgtccatattaaagggccaccaccagtatggtgttagtgccgttgatttctcagcggatgggaaacgtttggcatcagttggcatagatgatagccatactgttgtgctctgggactggaagaaaggagagaaactttcaatagcaagaggaagtaaagataagatttttgttgtaaagatgaacccctatgtgcctgataaactaattacagctggaattaaacacatgaaattttggcgtaaagcagggggaggattgattggaagaaaaggctacataggcacactggggaaaaatgacacaatgatgtgtgcagtgtatggatggactgaagagatggctttttctggaacatccacaggagatgtgtgtatctggagagacatctttcttgtaaaaacagtgaaagcgcatgatgggccagtgttcagtatgcatgcattggaaaaagggtttgtaactggaggaaaagatggtatagtagctctttgggatgactcttttgaaagatgtctcaagacctatgctataaaaagagctgcattggccccaggatctaaaggtcttctcttggaagataatccatctatacgtgccatatcattaggacatggtcatattttagttggcacaaagaatggtgaaatactagaagtggataaaagtggcccaataacacttctggttcagggacacatggaaggagaggtgtggggtttagctacacacccttatctgcccatctgtgctactgtaagcgatgataaaaccttaagaatatgggatctctcacctagtcattgtatgttggctgtccggaagctgaaaaagggtgggaggtgttgctgtttttctcctgatggtaaagctttagccgtaggtctcaacgatggaagcttcttaatggcaaatgcggatactctagaggatcttgtgtcttttcatcacagaaaagatatgatttcagatattcgattttcacctggttctgggaaatatcttgctgtagcatcccatgacagctttatagatatatacaatgtaatgagtagtaaacgagtaggaatatgcaaaggagctaccagttacataacccatattgattgggatattagaggaaagcttttacaggtcaacactggtgctaaggaacaattattctttgaagctcccagagggaaaaaacaaaccatccccagcgtggaggtagaaaaaattgcttgggcatcatggacaagtgtacttggtttatgctgtgaaggaatttggccagtaattggagaagttacagatgtaactgcttcttgcctcaccagtgacaaaatggttctagctaccggggacgatttgggatttgtgaagttatttagatatcctactaaagggaaatttggaaagtttaagaggtatgtggcccatagtacacatgtcacaaatgttcgctggacttatgatgacagcatgttggttaccctaggcggtacagatatgtctttaatggtgtggacaaatgagatggaaggctatcgagaaaaaaggccttgtgatagtgaagaatccgacattgattctgaagaagatgggggctatgacagtgatgttacaagggagaatgaaatcagttacaccatcagagccttatcaacaaatattcgcccaatgttaggaatcaagcctcatttacaacaaaaagaaccctcaattgatgaaaggcagggagtagtaagaggttccaggcctccagtgagcagggccccaccacagccagagaaactccagacaaacaatgtaggcaagaaaaagagacctatagaggaccttgtgttggagctcatttttggttatcgaggcagagactgtaggaataatgttcactatttaaatgatggtgatgatataatttatcacactgcatctgttggaattctgcacaatgttgctacaggttctcagagtttttatcaggaacataatgatgatattctgtgcctcacagtaaaccagcaccccaaatttatcaacatagtggcaactggccaagtaggtgattcagcagacatgtcagctacagctccttctattcacatctgggatgcaatgaacaagcagactttatctatcctaagatgctaccattcaaagggagtatgttcagtcagcttcagtgctactggcaaactattgctgtctgtgggactagacccagaacatactattaccatttggagatggcaggaaggtgccaaaattgccagcagagctggtcacaatcaacgtatttttgtggcagaattccgaccagattcagatacccagtttgtctcagtgggagtaaaacatgtgaagttctggaccctggcaggaagagctcttcttagcaaaaaagggctactgagcacactggaagatgcccggatgcagaccatgctcgctattgcatttggtgcaaataacttgacgtttacaggtaccatcagtggtgatgtctgtgtgtggaaagatcacatattgtgtagaatcgtggcgagagctcacaacgggcctgtgtttgccatgtacaccaccctgcgagatggacttatcgtgactgggggaaaggaaaggccgtcaaaagaaggaggagcggttaaactgtgggatcaggaactgaggcggtgccgtgccttcaggcttgagacaggacaagccacagattgtgttcgttctgtgtgcagaggcaaaggcaagatccttgttgggacaaggaatgctgaaataatcgaagttggagagaaaaatgcagcttgtaatattttagttaacggtcatgtggatgggccaatctggggactagcaacacatccttccagggattttttcctttctgctgcagaagatgggacagtgagactttgggatattgctgataaaaagatgttaaacaaagtgaatttgggacatgctgctcgtactgtgtgttacagccctgaaggggacatggtggctattggaatgaaaaatggagaatttatcattttactagtgagttctctaaaaatatggggaaagaagagagacaggagatgtgcaatccatgatatcagatttagtccggattcccggtatctggcagtaggttctagtgagaactcagtggatttttatgacctaacgctgggccccactcttaacagaatcagctactgcaaagacattccaagctttgtcattcaaatggacttctctgcagatagcagttatctccaggtctctagtggctgctataaacggcatgtctatgaagtgccttcaggaaaacatcttatggatcatgccgctattgacagaattacttgggctacatggactagtattctaggagatgaggttttgggaatctggtccagacatgctgagaaagctgatgtcaactgtgcctgtgtatctcattcaggaatcagtcttgttacaggagatgactttggcatggttaagttatttgacttcccatgtccagaaaaatttgcaaaacacaaaaggttcttgggtcattcgccccatgtgacaaatattcgatttaccagtggtgatcgacatgttgttagtgctggaggtgatgactgcagcttatttgtctggaaatgtgtacatacacctcactgagagatgctgagatgactacagaaattaactttgagaccagaattacagagaagaaaaaccaaaacccaaccctgcatggtcaagtggtgctaacccaagactgtaacagggagaaatgcccagaatcatcaaaatagtgaaagactgatctgttcaaaatatttgctatatgcactgggtataatccgtaatccatacactgccagataatgccatttcaaggaaggatcgaatacttgatggtaaaggccaagtccccctgtattgggaagtgtgtgatttcggcagacctgctgggaaaatttagggtagagcactctttacagaagaactcaaaaacccaatttggataattttcattatctttttagcaaaatggtttcttaatgtttatattttattttcaaggttcattgtttaatgaaatattttattcttgcatttccataaggaaagggaaagtcatgatcatcctaaaggatcacagtttttaaaaggcaaacattttccctaaggaaacagacacaagctttcctagagaatatgatgttttttaggcattaataaggtccttttttataaaggacacttttctcctagtagttttgaattcaggaacagatccaaagttagcagtatatggctgctacatttccattttcattttcgagccatcagtttatgttcagatgccatctctgtaatcgcacatttaaaacataactgtagcctcactaatggaaaagtagtatgatgaacaatcattcccaatggtgtacaatgtaagggttttagggagcaacagtatttaactggaagaaagaattgcatatttaatgtagtctaatatatacacatttgtttaacatgtaaacaaaagtgttaaattcacatatacaacattatacaatttaatcactcttggaataaaatttttatagccttttttctattgggaaaatttgtttagatgtgtgccactccataggtttatttccaaaatgaatgagcccaactccatttgtaaaaacttgtcagttagaattcctttttttagtggattagggctgaattcttagatccttatttcttttcactttaaatgctgccaaagatcactactcatcattcaggaattcgctgtctagcctatctgtagtttcctgaagattgaaaattatgtagactgctatttaaaaatatatttttctaagtgtgaggtttaagatgctgtattgaccctatgagtttttaatgtgttaattatctttatagcataatagatcgctttaggttcctggaatcccatttggtctgacaggatatatgaagattcttaatacctattttctgtgtctaatacttggttaatactaaaaatagaaatgactaaattacatcacagaaagcataaccagtgattgaacctggtagttttaaagctctaaatagctgtggctgaaggactgattatggggctaagaagcttgaaacgtaagttggtacttgttcatcagtggattctcctaaattaagccaaattttgaaatacatgactattaagtttctactcatgtatttacagtcagtcaataaattaaaggaggaaaaaaatccctgaacaacctgcccataaaaagaaaaatactctacatttgagcctgctgcagttttaaattttccctctgggtcaagtttgccagcttttggctacagagaaattatatttccattacagtgcaggtagaaactctgtaaccttaagcatgtaaactacatagaataaaactgtttccactgcatttctgtccttcaaagtggccaacctgattaagtcagccttaatcactgctgctgtcagtttcacgactaaaggtcatattgactaagtagtcatcagctgaccacctcgctgtatcagccagcaacgaggggaaggtgaagaaacatgataggccatatagaatctgccctatgtttacttttttaacccagataattatttttgtgtgcagtatctaagctcctgattgtgtaacctgggacttctggcaccttttgttccattcattttatgtataaaatgcatgccaaagcacactgtgccctctggtacccttgcttccaatcgccaaccatgctcatttccttcctttttttgtggtccctttttgtggtgatcattttaaaccacgtcatccaacaaatgttttatggtcaaccttagcttgttcataagccatagcaactgaaagattaaactcttaaatatgtgtctgggcagtggctattaaatagcaaaaaacaatcagattttagtattttattatttccttgtaaaatggctgaactaaattaaacccttgtttcccatttgttctataatttatagtgaaactgagaacaaaactatctttataaatgatagctaaaagtatttccagatatttaaacaatttaaaataaatttcttctgcagagatgcaaagcatctcaacactggaatgaacaaatgccttaaattcaatggagtaaacctttagaatgaagaggaactgtcatttcacccaagccgaagacaacagccttatgcacttgtgtgctctgtctttgctgcttctcgtgtttcaagcctttcctgtgggatcagcacagcaaagtgcaacttaccaaatggtttaatgactggttaattctttcttctcccaatggaaaagcaatggcaacacaacagtagactgctggcttgacaatcttaaacgtgagcctttgcacatgtaggtttatcatcatttgagtatacgactaagcaagtcaatgaactttttttttttttttagcagtttaatttggtcctgagaatgttgcagtctttattaccccttttgcattaatccacttttctaaccaccttttaagctttaatttttaacactatacaccaagtctttgaaatcagtgatctgttatttaactctaaagcatttgacacttcttgccttaacagttttaaaaaccacacacaaaaaaactctgtaagtaatacagtaggccaaaagtttcatcctatctatcttgcagtttacctatctgatctgatctctgtaattatagttctgtcatttaaaatatactatttaaatctaatttttacatttcaaaaattatcttcagtagtaactaagtatattttctgtggattctgagaatgttatttttcagaatgtgagaatatatatgtacatttataatcttgtgactttaaagtctgttttcagatacagtatgtaaatacttgtaaaaaaatttgtataattttgtgataatgtagtttcccaaaaaaattatttagaaggcattatgttattagtaaatgagagcactgta

SEQ ID NO: 6531 - DNA, 3556 bp, Homo sapiens
  source 1..3556: mol_type = unassigned DNA; mol_type = unassigned DNA
gcgagacttcgtctcaaaaaaaaaaaattcttcttccaagattcaagttgtgtcatttcaccttaataactggaggttagttaagctgggctgtgttctttgcttaatattaagacaacgttttttccagatggaagaaaactatcttaatgaattgttagcttattaattatgtaatgctaatggcttttaaaagctgagatgttctgactgggtgttgtggctcacacctgtaatcccagtaccttgggaggccaagggggaaggattgcttgaggccaggagtttgggaccatagtgagaccccgcctctatttaaaaaattaaattttgttttgttttgttttgagttggagttttgctcttgttgcccatgctgaagtgcaatggtgcaatctcagctcaccacaacctgtgcctcctgggttcaagcgattctcctgcttcagcctcccgagtagatgggattacaggcgtgcaccaccatgcctggctaattttgtatttttagtagagacagggtttctctatgttggtcaggctggtctcaaactctcgacctcaggtgatctgcccgcctccgcttcccaaagttctgggattataggtgtgagccactgggcctggcctaagaaagtttttttaagccattagacgtttttaaaggaattgggagatgacaattggggaaatatttaaaatttaagtaaaatataaagcttccttatttcatgtaacccagacaatctcagtatacatgatcagttgtgtctgacaggtaaatctatttgaggccttatcacacgttacttttaagaactagaaaggaaaagtcactgatcttaagtatttataatacttcatgtggtctaatactttttacgttttgttttgattcagatttagtccggattcccggtatctggcagtaggttctagtgagaactcagtggatttttatgacctaacgctgggccccactcttaacagaatcagctactgcaaagacattccaagctttgtcattcaaatggacttctctgcagatagcagttatctccaggtctctagtggctgctataaacggcatgtctatgaagtgccttcaggaaaacatcttatggatcatgccgctattgacagaattacttgggctacatggactagtattctaggagatgaggttttgggaatctggtccagacatgctgagaaagctgatgtcaactgtgcctgtgtatctcattcaggaatcagtcttgttacaggagatgactttggcatggttaagttatttgacttcccatgtccagaaaaatttgcaaaacacaaaaggttcttgggtcattcgccccatgtgacaaatattcgatttaccagtggtgatcgacatgttgttagtgctggaggtgatgactgcagcttatttgtctggaaatgtgtacatacacctcactgagagatgctgagatgactacagaaattaactttgagaccagaattacagagaagaaaaaccaaaacccaaccctgcatggtcaagtggtgctaacccaagactgtaacagggagaaatgcccagaatcatcaaaatagtgaaagactgatctgttcaaaatatttgctatatgcactgggtataatccgtaatccatacactgccagataatgccatttcaaggaaggatcgaatacttgatggtaaaggccaagtccccctgtattgggaagtgtgtgatttcggcagacctgctgggaaaatttagggtagagcactctttacagaagaactcaaaaacccaatttggataattttcattatctttttagcaaaatggtttcttaatgtttatattttattttcaaggttcattgtttaatgaaatattttattcttgcatttccataaggaaagggaaagtcatgatcatcctaaaggatcacagtttttaaaaggcaaacattttccctaaggaaacagacacaagctttcctagagaatatgatgttttttaggcattaataaggtccttttttataaaggacacttttctcctagtagttttgaattcaggaacagatccaaagttagcagtatatggctgctacatttccattttcattttcgagccatcagtttatgttcagatgccatctctgtaatcgcacatttaaaacataactgtagcctcactaatggaaaagtagtatgatgaacaatcattcccaatggtgtacaatgtaagggttttagggagcaacagtatttaactggaagaaagaattgcatatttaatgtagtctaatatatacacatttgtttaacatgtaaacaaaagtgttaaattcacatatacaacattatacaatttaatcactcttggaataaaatttttatagccttttttctattgggaaaatttgtttagatgtgtgccactccataggtttatttccaaaatgaatgagcccaactccatttgtaaaaacttgtcagttagaattcctttttttagtggattagggctgaattcttagatccttatttcttttcactttaaatgctgccaaagatcactactcatcattcaggaattcgctgtctagcctatctgtagtttcctgaagattgaaaattatgtagactgctatttaaaaatatatttttctaagtgtgaggtttaagatgctgtattgaccctatgagtttttaatgtgttaattatctttatagcataatagatcgctttaggttcctggaatcccatttggtctgacaggatatatgaagattcttaatacctattttctgtgtctaatacttggttaatactaaaaatagaaatgactaaattacatcacagaaagcataaccagtgattgaacctggtagttttaaagctctaaatagctgtggctgaaggactgattatggggctaagaagcttgaaacgtaagttggtacttgttcatcagtggattctcctaaattaagccaaattttgaaatacatgactattaagtttctactcatgtatttacagtcagtcaataaattaaaggaggaaaaaaatccctgaacaacctgcccataaaaagaaaaatactctacatttgagcctgctgcagttttaaattttccctctgggtcaagtttgccagcttttggctacagagaaattatatttccattacagtgcaggtagaaactctgtaaccttaagcatgtaaactacatagaataaaactgtttccactgcatttctgtccttcaaagtggccaacctgattaagtcagccttaatcactgctgctgtcagtttcacgactaaaggtcatattgactaagtagtcatcagctgaccacctcgctgtatcagccagcaacgaggggaaggtgaagaaacatgataggccatatagaatctgccctatgtttacttttttaacccagataattatttttgtgtgcagtatctaagctcctgattgtgtaacctgggacttctggcaccttttgttccattcattttatgtataaaatgcatgccaaagc

SEQ ID NO: 6532 - DNA, 3600 bp, Homo sapiens
  source 1..3600: mol_type = unassigned DNA; mol_type = unassigned DNA
atttcagatattcgattttcacctggttctgggaaatatcttgctgtagcatcccatgacagctttatagatatatacaatgtaatgagtagtaaacgagtaggaatatgcaaaggagctaccagttacataacccatattgattgggatattagagcttttacaggtcaacactggtgctaaggaacaattattctttgaagctcccagagggaaaaaacaaaccatccccagcgtggaggtagaaaaaattgcttgggcatcatggacaagtgtacttggtttatgctgtgaaggaatttggccagtaattggagaagttacagatgtaactgcttcttgcctcaccagtgacaaaatggttctagctaccggggacgatttgggatttgtgaagttatttagatatcctactaaagggaaatttggaaagtttaagaggtatgtggcccatagtacacatgtcacaaatgttcgctggacttatgatgacagcatgttggttaccctaggcggtacagatatgtctttaatggtgtggacaaatgagatggaaggctatcgagaaaaaaggccttgtgatagtgaagaatccgacattgattctgaagaagatgggggctatgacagtgatgttacaagggagaatgaaatcagttacaccatcagagccttatcaacaaatattcgcccaatgttaggaatcaagcctcatttacaacaaaaagaaccctcaattgatgaaaggcctccagtgagcagggccccaccacagccagagaaactccagacaaacaatgtaggcaagaaaaagagacctatagaggaccttgtgttggagctcatttttggttatcgaggcagagactgtaggaataatgttcactatttaaatgatggtgatgatataatttatcacactgcatctgttggaattctgcacaatgttgctacaggttctcagagtttttatcaggaacataatgatgatattctgtgcctcacagtaaaccagcaccccaaatttatcaacatagtggcaactggccaagtaggtgattcagcagacatgtcagctacagctccttctattcacatctgggatgcaatgaacaagcagactttatctatcctaagatgctaccattcaaagggagtatgttcagtcagcttcagtgctactggcaaactattgctgtctgtgggactagacccagaacatactattaccatttggagatggcaggaaggtgccaaaattgccagcagagctggtcacaatcaacgtatttttgtggcagaattccgaccagattcagatacccagtttgtctcagtgggagtaaaacatgtgaagttctggaccctggcaggaagagctcttcttagcaaaaaagggctactgagcacactggaagatgcccggatgcagaccatgctcgctattgcatttggtgcaaataacttgacgtttacaggtaccatcagtggtgatgtctgtgtgtggaaagatcacatattgtgtagaatcgtggcgagagctcacaacgggcctgtgtttgccatgtacaccaccctgcgagatggacttatcgtgactgggggaaaggaaaggccgtcaaaagaaggaggagcggttaaactgtgggatcaggaactgaggcggtgccgtgccttcaggcttgagacaggacaagccacagattgtgttcgttctgtgtgcagaggcaaaggcaagatccttgttgggacaaggaatgctgaaataatcgaagttggagagaaaaatgcagcttgtaatattttagttaacggtcatgtggatgggccaatctggggactagcaacacatccttccagggattttttcctttctgctgcagaagatgggacagtgagactttgggatattgctgataaaaagatgttaaacaaagtgaatttgggacatgctgctcgtactgtgtgttacagccctgaaggggacatggtggctattggaatgaaaaatggagaatttatcattttactagtgagttctctaaaaatatggggaaagaagagagacaggagatgtgcaatccatgatatcagatttagtccggattcccggtatctggcagtaggttctagtgagaactcagtggatttttatgacctaacgctgggccccactcttaacagaatcagctactgcaaagacattccaagctttgtcattcaaatggacttctctgcagatagcagttatctccaggtctctagtggctgctataaacggcatgtctatgaagtgccttcaggaaaacatcttatggatcatgccgctattgacagaattacttgggctacatggactagtattctaggagatgaggttttgggaatctggtccagacatgctgagaaagctgatgtcaactgtgcctgtgtatctcattcaggaatcagtcttgttacaggagatgactttggcatggttaagttatttgacttcccatgtccagaaaaatttgcaaaacacaaaaggttcttgggtcattcgccccatgtgacaaatattcgatttaccagtggtgatcgacatgttgttagtgctggaggtgatgactgcagcttatttgtctggaaatgtgtacatacacctcactgagagatgctgagatgactacagaaattaactttgagaccagaattacagagaagaaaaaccaaaacccaaccctgcatggtcaagtggtgctaacccaagactgtaacagggagaaatgcccagaatcatcaaaatagtgaaagactgatctgttcaaaatatttgctatatgcactgggtataatccgtaatccatacactgccagataatgccatttcaaggaaggatcgaatacttgatggtaaaggccaagtccccctgtattgggaagtgtgtgatttcggcagacctgctgggaaaatttagggtagagcactctttacagaagaactcaaaaacccaatttggataattttcattatctttttagcaaaatggtttcttaatgtttatattttattttcaaggttcattgtttaatgaaatattttattcttgcatttccataaggaaagggaaagtcatgatcatcctaaaggatcacagtttttaaaaggcaaacattttccctaaggaaacagacacaagctttcctagagaatatgatgttttttaggcattaataaggtccttttttataaaggacacttttctcctagtagttttgaattcaggaacagatccaaagttagcagtatatggctgctacatttccattttcattttcgagccatcagtttatgttcagatgccatctctgtaatcgcacatttaaaacataactgtagcctcactaatggaaaagtagtatgatgaacaatcattcccaatggtgtacaatgtaagggttttagggagcaacagtatttaactggaagaaagaattgcatatttaatgtagtctaatatatacacatttgtttaacatgtaaacaaaagtgttaaattcacatatacaacattatacaatttaatcactcttggaataaaatttttatagcctttt

SEQ ID NO: 6533 - DNA, 5910 bp, Homo sapiens
  source 1..5910: mol_type = unassigned DNA; mol_type = unassigned DNA
atggcggcccggagcgccccgagctgccacctgcggctcgagtgggtgtacggctaccggggccaccagtgccgcaacaacctctactacactgcggccaaggagatcgtatacttcgtggcgggggtcggcgtggtgtacagcccgcgggagcacaggcagaagttctaccggggccacagcgacgacatcatcagccttgcattgcatcctgaacgagtgttggtagcaacaggacaagttgggaaagagccttatatttgtatttgggattcatacactgtgcagaccatatcagttttaaaggatgttcatacacatggtatagcttgcttggcgtttgacttagatggacagcgcttggtttcagttggacttgattcaaagaatgcagtttgtgtttgggactggaaaaggggaaaaatgttgtctatggctcctggtcatacagatagaatatttgatatttcttgggatttgtaccagccaaataaacttgtcagctgtggtgtaaaacatatcaagttctggagtttatgtggaaatgctctgaccccaaaacgaggtgtctttggtaagacgggtgaccttcagacaatactgtgcctagcctgtgcaagggatgaattaacatattctggtgcactcaatggggatatatatgtttggaaaggaatcaatcttatacgaacaatacaaggagcccatgctgcaggaatttttagcatgaatgcttgtgaagaaggctttgctactggtggcagagatggttgtattcgtctttgggatttaacttttaaaccaattactgtgattgatctcagggaaacagaccagggatacaaaggtttgtctgtaaggagtgtgtgttggcgaggtgaccacattctagttggaacacaggacagtgaaatttttgaaattgtggtgcaagaaagaaataaaccttttctaattatgcaagggcattgtgaaggtgaactttgggcacttgctgtccatcctactaaacctttggctgtgactggaagtgatgatcgttcggtcaggatatggagcctagtagatcatgcattaatagcaaggtgtaatatggaagaaccaattcgttgtgcagctgtcaatgcagatggaatccatcttgcccttggaatgaaggatggctcattcactgtacttagagtaagagatatgacggaagttgtacatattaaagataggaaggaggcaattcatgagttaaaatattcaccagatggaacttaccttgctgttggatgcaatgacagctcggttgatatttatggagttgctcagcgttataaaaaagttggcgagtgtttgggatcccttagtttcatcactcatctggactggtcttcagacagtagatatttgcagacaaatgatggaaatgggaaaagacttttttatagaatgccaggaggaaaggaagtgacaagtacagaagaaataaaaggtgttcattgggcttcatggacatgtgtttcaggccttgaagtaaatggaatttggcccaagtattcagatatcaacgatataaattcagtagatggaaattatattggccaagttttagttacagctgatgactatggaattataaaattattccgatatccatgtttaagaaaaggggccaagtttagaaaatatattggccattcagctcacgtaactaatgtcagatggtcacatgattatcagtgggttatttctattggtggagcagatcactctgtctttcagtggaaatttattcctgaaagaaaactgaaagatgctgttcacatagcaccccaagaaagtctggctgactctcatagtgatgaatcagattcagatctgtctgatgttccagaactggattctgaaattgaacaagagacacagctcacctaccgtcgacaggtttacaaagaagatctacctcagcttaaagaacagtgcaaagagaaacaaaaaagtgctacttctaaaagaagagagcgggctccaggaaatagtattcgattacactttgttcacggttacagaggttatgactgtcgaagtaatctgttttatactcaaattggtgaaattgtgtaccatgtggcagcagtgggtgtcatttataatcgacagcaaaacacacagcgtttttatctgggtcatgatgatgatattctctgcctaactattcatcctttgaaagactacgtggcaacaggccaggttggtagagatccctcaattcatatatgggatacagagaccattaaaccattgtccatattaaagggccaccaccagtatggtgttagtgccgttgatttctcagcggatgggaaacgtttggcatcagttggcatagatgatagccatactgttgtgctctgggactggaagaaaggagagaaactttcaatagcaagaggaagtaaagataagatttttgttgtaaagatgaacccctatgtgcctgataaactaattacagctggaattaaacacatgaaattttggcgtaaagcagggggaggattgattggaagaaaaggctacataggcacactggggaaaaatgacacaatgatgtgtgcagtgtatggatggactgaagagatggctttttctggaacatccacaggagatgtgtgtatctggagagacatctttcttgtaaaaacagtgaaagcgcatgatgggccagtgttcagtatgcatgcattggaaaaagggtttgtaactggaggaaaagatggtatagtagctctttgggatgactcttttgaaagatgtctcaagacctatgctataaaaagagctgcattggccccaggatctaaaggtcttctcttggaagataatccatctatacgtgccatatcattaggacatggtcatattttagttggcacaaagaatggtgaaatactagaagtggataaaagtggcccaataacacttctggttcagggacacatggaaggagaggtgtggggtttagctacacacccttatctgcccatctgtgctactgtaagcgatgataaaaccttaagaatatgggatctctcacctagtcattgtatgttggctgtccggaagctgaaaaagggtgggaggtgttgctgtttttctcctgatggtaaagctttagccgtaggtctcaacgatggaagcttcttaatggcaaatgcggatactctagaggatcttgtgtcttttcatcacagaaaagatatgatttcagatattcgattttcacctggttctgggaaatatcttgctgtagcatcccatgacagctttatagatatatacaatgtaatgagtagtaaacgagtaggaatatgcaaaggagctaccagttacataacccatattgattgggatattagaggaaagcttttacaggtcaacactggtgctaaggaacaattattctttgaagctcccagagggaaaaaacaaaccatccccagcgtggaggtagaaaaaattgcttgggcatcatggacaagtgtacttggtttatgctgtgaaggaatttggccagtaattggagaagttacagatgtaactgcttcttgcctcaccagtgacaaaatggttctagctaccggggacgatttgggatttgtgaagttatttagatatcctactaaagggaaatttggaaagtttaagaggtatgtggcccatagtacacatgtcacaaatgttcgctggacttatgatgacagcatgttggttaccctaggcggtacagatatgtctttaatggtgtggacaaatgagatggaaggctatcgagaaaaaaggccttgtgatagtgaagaatccgacattgattctgaagaagatgggggctatgacagtgatgttacaagggagaatgaaatcagttacaccatcagagccttatcaacaaatattcgcccaatgttaggaatcaagcctcatttacaacaaaaagaaccctcaattgatgaaaggcctccagtgagcagggccccaccacagccagagaaactccagacaaacaatgtaggcaagaaaaagagacctatagaggaccttgtgttggagctcatttttggttatcgaggcagagactgtaggaataatgttcactatttaaatgatggtgatgatataatttatcacactgcatctgttggaattctgcacaatgttgctacaggttctcagagtttttatcaggaacataatgatgatattctgtgcctcacagtaaaccagcaccccaaatttatcaacatagtggcaactggccaagtaggtgattcagcagacatgtcagctacagctccttctattcacatctgggatgcaatgaacaagcagactttatctatcctaagatgctaccattcaaagggagtatgttcagtcagcttcagtgctactggcaaactattgctgtctgtgggactagacccagaacatactattaccatttggagatggcaggaaggtgccaaaattgccagcagagctggtcacaatcaacgtatttttgtggcagaattccgaccagattcagatacccagtttgtctcagtgggagtaaaacatgtgaagttctggaccctggcaggaagagctcttcttagcaaaaaagggctactgagcacactggaagatgcccggatgcagaccatgctcgctattgcatttggtgcaaataacttgacgtttacaggtaccatcagtggtgatgtctgtgtgtggaaagatcacatattgtgtagaatcgtggcgagagctcacaacgggcctgtgtttgccatgtacaccaccctgcgagatggacttatcgtgactgggggaaaggaaaggccgtcaaaagaaggaggagcggttaaactgtgggatcaggaactgaggcggtgccgtgccttcaggcttgagacaggacaagccacagattgtgttcgttctgtgtgcagaggcaaaggcaagatccttgttgggacaaggaatgctgaaataatcgaagttggagagaaaaatgcagcttgtaatattttagttaacggtcatgtggatgggccaatctggggactagcaacacatccttccagggattttttcctttctgctgcagaagatgggacagtgagactttgggatattgctgataaaaagatgttaaacaaagtgaatttgggacatgctgctcgtactgtgtgttacagccctgaaggggacatggtggctattggaatgaaaaatggagaatttatcattttactagtgagttctctaaaaatatggggaaagaagagagacaggagatgtgcaatccatgatatcagatttagtccggattcccggtatctggcagtaggttctagtgagaactcagtggatttttatgacctaacgctgggccccactcttaacagaatcagctactgcaaagacattccaagctttgtcattcaaatggacttctctgcagatagcagttatctccaggtctctagtggctgctataaacggcatgtctatgaagtgccttcaggaaaacatcttatggatcatgccgctattgacagaattacttgggctacatggactagtattctaggagatgaggttttgggaatctggtccagacatgctgagaaagctgatgtcaactgtgcctgtgtatctcattcaggaatcagtcttgttacaggagatgactttggcatggttaagttatttgacttcccatgtccagaaaaatttgcaaaacacaaaaggttcttgggtcattcgccccatgtgacaaatattcgatttaccagtggtgatcgacatgttgttagtgctggaggtgatgactgcagcttatttgtctggaaatgtgtacatacacctcactga

SEQ ID NO: 6534 - DNA, 770 bp, Homo sapiens
  source 1..770: mol_type = unassigned DNA; mol_type = unassigned DNA
gggctactgagcacactggaagatgcccggatgcagaccatgctcgctattgcatttggtgcaaataacttgacgtttacaggtaccatcagtggtgatgtctgtgtgtggaaagatcacatattgtgtagaatcgtggcgagagctcacaacgggcctgtgtttgccatgtacaccaccctgcgagatggacttatcgtgactgggggaaaggaaaggccgtcaaaagaaggaggagcggttaaactgtgggatcaggaactgaggcggtgccgtgccttcaggcttgagacaggacaagccacagattgtgttcgttctgtgtgcagaggcaaaggcaagatccttgttgggacaaggaatgctgaaataatcgaagttggagagaaaaatgcagcttgtaatattttagttaacggtcatgtggatgggccaatctggggactagcaacacatccttccagggattttttcctttctgctgcagaagatgggacagtgagactttgggatattgctgataaaatgttaaacaaagtgaatttgggacatgctgctcgtactgtgtgttacagccctgaaggggacatggtggctattggaatgaaaaatggagaatttatcattttactagtgagttctctaaaaatatggggaaagaagagagacaggagatgtgcaatccatgatatcagaatcagctactgcaaagacattccaagctttgtcattcaaatggacttctctgcagatagcagttatctccaggt

SEQ ID NO: 6535 - DNA, 354 bp, Homo sapiens
  source 1..354: mol_type = unassigned DNA; mol_type = unassigned DNA
agttctggaccctggcaggaagagctcttcttagcaaaaaagggctactgagcacactggaagatgcccggatgcagaccatgctcgctattgcatttggtgcaaataacttgacgtttacaggtaccatcagtggtgatgtctgtgtgtggaaagatcacatattgtgtagaatcgtggcgagagctcacaacgggcctgtgtttgccatgtacaccaccctgcgagatggacttatcgtgactgggggaaaggaaaggccggcaagatccttgttgggacaaggaatgctgaaataatcgaagttggagagaaaaatgcagcttgtaatattttagttaacggtcatgtgga

SEQ ID NO: 6536 - DNA, 3925 bp, Homo sapiens
  source 1..3925: mol_type = unassigned DNA
cagatggaacttaccttgctgttggatgcaatgacagctcggttgatatttatggagttgctcagcgttataaaaaagttggcgagtgtttgggatcccttagtttcatcactcatctggactggtcttcagacagtagatatttgcagacaaatgatggaaatgggaaaagacttttttatagaatgccaggaggaaaggaagtgacaagtacagaagaaataaaaggtgttcattgggcttcatggacatgtgtttcaggccttgaagtaaatggaatttggcccaagtattcagatatcaacgatataaattcagtagatggaaattatattggccaagttttagttacagctgatgactatggaattataaaattattccgatatccatgtttaagaaaaggggccaagtttagaaaatatattggccattcagctcacgtaactaatgtcagatggtcacatgattatcagtgggttatttctattggtggagcagatcactctgtctttcagtggaaatttattcctgaaagaaaactgaaagatgctgttcacatagcaccccaaggttatattcacttatatttgcacagacatttaaatttgatgtagcggtcattggggagccagtgaagggatttaaaggagctattgagtttgcagtgagtggagaggaagataatctgtagtacagtttactgacatctgtgtcacttgaatagaaagtctggctgactctcatagtgatgaatcagattcagatctgtctgatgttccagaactggattctgaaattgaacaagagacacagctcacctaccgtcgacaggtttacaaagaagatctacctcagcttaaagaacagtgcaaagagaaacaaaaaagtgctacttctaaaagaagagagcgggctccaggaaatagtattcgattacactttgttcacggttacagaggttatgactgtcgaagtaatctgttttatactcaaattggtgaaattgtgtaccatgtggcagcagtgggtgtcatttataatcgacagcaaaacacacagcgtttttatctgggtcatgatgatgatattctctgcctaactattcatcctttgaaagactacgtggcaacaggccaggttggtagagatccctcaattcatatatgggatacagagaccattaaaccattgtccatattaaagggccaccaccagtatggtgttagtgccgttgatttctcagcggatgggaaacgtttggcatcagttggcatagatgatagccatactgttgtgctctgggactggaagaaaggagagaaactttcaatagcaagaggaagtaaagataagatttttgttgtaaagatgaacccctatgtgcctgataaactaattacagctggaattaaacacatgaaattttggcgtaaagcaggagatgtgtgtatctggagagacatctttcttgtaaaaacagtgaaagcgcatgatgggccagtgttcagtatgcatgcattggaaaaagggtttgtaactggaggaaaagatggtatagtagctctttgggatgactcttttgaaagatgtctcaagacctatgctataaaaagagctgcattggccccaggatctaaaggtcttctcttggaagataatccatctatacgtgccatatcattaggacatggtcatattttagttggcacaaagaatggtgaaatactagaagtggataaaagtggcccaataacacttctggttcagggacacatggaaggagaggtgtggggtttagctacacacccttatctgcccatctgtgctactgtaagcgatgataaaaccttaagaatatgggatctctcacctagtcattgtatgttggctgtccggaagctgaaaaagggtgggaggtgttgctgtttttctcctgatggtaaagctttagccgtaggtctcaacgatggaagcttcttaatggcaaatgcggatactctagaggatcttgtgtcttttcatcacagaaaagatatgatttcagatattcgattttcacctggttctgggaaatatcttgctgtagcatcccatgacagctttatagatatatacaatgtaatgagtagtaaacgagtaggaatatgcaaaggagctaccagttacataacccatattgattgggatattagaggaaagcttttacaggtcaacactggtgctaaggaacaattattctttgaagctcccagagggaaaaaacaaaccatccccagcgtggaggtagaaaaaattgcttgggcatcatggacaagtgtacttggtttatgctgtgaaggaatttggccagtaattggagaagttacagatgtaactgcttcttgcctcaccagtgacaaaatggttctagctaccggggacgatttgggatttgtgaagttatttagatatcctactaaagggaaatttggaaagtttaagaggtatgtggcccatagtacacatgtcacaaatgttcgctggacttatgatgacagcatgttggttaccctaggcggtacagatatgtctttaatggtgtggacaaatgagatggaaggctatcgagaaaaaaggccttgtgatagtgaagaatccgacattgattctgaagaagatgggggctatgacagtgatgttacaagggagaatgaaatcagttacaccatcagagccttatcaacaaatattcgcccaatgttaggaatcaagcctcatttacaacaaaaagaaccctcaattgatgaaaggcctccagtgagcagggccccaccacagccagagaaactccagacaaacaatgtaggcaagaaaaagagacctatagaggaccttgtgttggagctcatttttggttatcgaggcagagactgtaggaataatgttcactatttaaatgatggtgatgatataatttatcacactgcatctgttggaattctgcacaatgttgctacaggttctcagagtttttatcaggaacataatgatgatattctgtgcctcacagtaaaccagcaccccaaatttatcaacatagtggcaactggccaagtaggtgattcagcagacatgtcagctacagctccttctattcacatctgggatgcaatgaacaagcagactttatctatcctaagatgctaccattcaaagggagtatgttcagtcagcttcagtgctactggcaaactattgctgtctgtgggactagacccagaacatactattaccatttggagatggcaggaaggtgccaaaattgccagcagagctggtcacaatcaacgtatttttgtggcagaattccgaccagattcagatacccagtttgtctcagtgggagtaaaacatgtgaagttctggaccctggcaggaagagctcttcttagcaaaaaagggctactgagcacactggaagatgcccggatgcagaccatgctcgctattgcatttggtgcaaataacttgacgtttacaggtaccatcagtggtgatgtctgtgtgtggaaagatcacatattgtgtagaatcgtggcgagagctcacaacgggcctgtgtttgccatgtacaccaccctgcgagatggacttatcgtgactgggggaaaggaaaggccgtcaaaagaaggaggagcggttaaactgtgggatcaggaactgaggcggtgccgtgccttcaggcttgagacaggacaagccacagattgtgttcgttctgtgtgcagaggcaaagtatttacaagagaggattttgaaagtttccatcacaaagaaatgataaatgtctgaggtgatggttatgcgtattaccctatgccctatagatatgtataattatgtgtcaatttcaaaataaaaattcaaaactacaactcctatg

SEQ ID NO: 6537 - DNA, 627 bp, Homo sapiens
  source 1..627: mol_type = unassigned DNA
ctccgtctcaaaaaaaataaaataaaatgaataaaagttgtaatattttctttctaccttcctgctttagaagctctcaagatgaagagggcagtctagtggaccacagaatgggtcatctttgggaaggtgtgacaagacacctctctgggagggatggtgtgagaggctcagtgaaggcactgagtgctgcatgcctttcctcctccccacttctctgttgcaggcctccagtgagcagggccccaccacagccagagaaactccagacaaacaatgtaggcaagaaaaagagacctatagaggaccttgtgttggagctcatttttggttatcgaggcagagactgtaggaataatgttcactatttaaatgatggtgatgatataatttatcacactgcatctgttggaattctgcacaatgttgctacaggttctcagagtttttatcaggaacataatgatgatattctgtgcctcacagtaaaccagcaccccaaatttatcaacatagtggcaactggccaagtaggtgattcagcagacatgtcagctacagctccttctattcacatctgggatgcaatgaacaagcagactttatctatcctaagatgctaccatt

SEQ ID NO: 6538 - DNA, 5197 bp, Homo sapiens
  source 1..5197: mol_type = unassigned DNA
ggcgggatcggggaaggaggggccccgccgcctagagggtggagggagggcgcgcagtcccagcccagagcttcaaaacagcccggcggcctcgcctcgcacccccagccagtccgtcgatccagctgccagcgcagccgccagcgccggcacatcccgctctgggctttaaacgtgacccctcgcctcgactcgccctgccctgtgaaaatgttggtgcttcttgctttcatcatcgccttccacatcacctctgcagccttgctgttcattgccaccgtcgacaatgcctggtgggtaggagatgagttttttgcagatgtctggagaatatgtaccaacaacacgaattgcacagtcatcaatgacagctttcaagagtactccacgctgcaggcggtccaggccaccatgatcctctccaccattctctgctgcatcgccttcttcatcttcgtgctccagctcttccgcctgaagcagggagagaggtttgtcctaacctccatcatccagctaatgtcatgtctgtgtgtcatgattgcggcctccatttatacagacaggcgtgaagacattcacgacaaaaacgcgaaattctatcccgtgaccagagaaggcagctacggctactcctacatcctggcgtgggtggccttcgcctgcaccttcatcagcggcatgatgtacctgatactgaggaagcgcaaatagagttccggagctgggttgcttctgctgcagtacagaatccacattcagataaccattttgtatataatcattattttttgaggtttttctagcaaacgtattgtttcctttaaaagccaaaaaaaaaaaaaaaaaaaaaaaaaaaagaaaaaagaaaaaaaaaatccaaaagagagaagagtttttgcattcttgagatcagagaatagactatgaaggctggtattcagaactgctgcccactcaaaagtctcaacaagacacaagcaaaaatccagcaatgctcaaatccaaaagcactcggcaggacatttcttaaccatggggctgtgatgggaggagaggagaggctgggaaagccgggtctctggggacgtgcttcctatgggtttcagctggcccaagcccctcccgaatctctctgctagtggtgggtggaagagggtgaggtggggtataggagaagaatgacagcttcctgagaggtttcacccaagttccaagtgagaagcaggtgtagtccctggcattctgtctgtatccaaaccagagcccagccatccctccggtatcggggtgggtcagaaaaagtctcacctcaatttgccgacagtgtcacctgcttgccttaggaatggtcatccttaacctgcgtgccagatttagactcgtctttaggcaaaacctacagcgccccccccctcaccccagacctacagaatcagagtcttcaagggatggggccagggaatctgcatttctaacgcgctccctgggcaacgcttcagatgcgttgaagttggggaccacggtgcctgggccaggtcagcagagctgcctcgtaaatgctggggtatcgtcatgtggagatggggaggtgaatgcaacccccacagcaggccaaaaccttggcctccatcgccacagctgtctacatctagggccccaaaactccattcctgagccatgtgaactcatagacaccttcagggtgtggggtacagcctccttcccatcttatcccagaaggcctctcccttcttgtccagcccttcatgctacacctggctggcctctcacccctatttctagagcctcagaggacccatccaccattcattcattcattcattcattcattcattcattcattcatcaacataaatcataacttgcatgcatgtgccaggcacaggggataccctctagagacaatctcctcctagggctcatggcctagtggaggagacagattaaaacttaattagaaaaactggctgggtacagtggctcatgcttgtaatcccagcactttgggaggctgaggcgggtggatcacctgaggtcaggagttcaagaccagcctggccaaaatggtaaaacctgtctctactaaaaatacaaaaatgagctgggcgtggtggtgcatgcctgtaatcccagctatcaggtggctgaggcaggagaatcacttgaaatgggaggtggaggttgcagtgagccgagaccgtgccactgcactccagcctgggtgacagagtgagactccatctcaaaaaaagaaaaaaaagaaaagaaactaattacacactgtgatggaggctgcaaagaacaccactaagaattcaaaatcagctgggtgcggtggctcacacctgtaatcccagcactttgggaggctgaggcaggtggatcacaaggtcaggagttcaagaccagcctggccaacatggtgaaaccccgtctctaccgaaaatacaacaaaattagcccggtgtggtggcaggtgcctgtaatcccagctacttaggaggctgaggcaggagaatcgcttgaaactgggaggcggaggtcgcagtgagccgagattcaccactgcactccagcccaggcgacagtctgagactccgtctcaaaaataaaacgattcaaaatcgaggcctgtggcatggtagggaggctgctttacgcgtgcctattattaaatgctcctggaggcatttaggtatttagatcagtctaaatatagctccattcagttcgtgcagatgacagttattgggcagtacctgtctgtgtaacacccagaaaacatgtctgtggaggggcccatggtcccgacagtaaatgcggtgagagggtcccatagagctggagttttcaagctttaggggttcccgtgctgcttgggacaggctgattcagagggtctgggtgaatgatttccaggtgattttaagactgtgctgagaaatagggcttttggggccttgtccttcaggatcaaagcatgatgctgtgtggcaatgcagaccacccaggaaccatcccaggagataagctctttgcacctcattgtctttttctgcttatgttggagcaggatgctgggggctgtcctgggatggggtgtgggacctcgtgctatttaaatacttttgcacttgaccttctgctgagtggagtggtggtttgccatcagctcagttccagtggagctgaagagacatctggtttgagtagttttagggccaccatggatatctcttcaatgcaggattggctctttccatctgctctttcattcatttgtttttgacagatagtattaaatgtttaccatgttccaggcactgtgtgaggctctgaaaatacaggggtgagcaaatccagatatcctccctgccatcatgaagtttggagtctatgagataggaccccctccctatggagaagccaccaatgcagtacagggtgacctggggccagagacaggacaaatgtcacctcctgcctccatgagatactctcactagtcatattgtgggcaagaatgtggcttacacccctagggttaacaggatgctacccaagctcatggaggaagttgaatcttaagttcccttgaaactttctaccttggtggcttttctataattttcttttttctttttcttttttttttttttttttgagactgagttttgctcttgttgcccaggctggagtgcagtggcaccatcttggctcaccgcaacctctgcctcctgggttcaagtgattctcctgcctcagcctcccgagtagctgggattacaggcatgtcccaccatgcccagctaatttttgtatttttagtagagatggggtttctccatgttggtcaggctggtttcgaactcccaacctcaggtgatccgcccacctcagccttccaaagtgctgggattacaggcatgagccactgcgtctggccttctataattttctggtagtcacgatggaaacaaacaaaacaccttagaaccagagatcgaccccctcaagcaatacatcaattcccttcacaagaaacgtcggggctacatgagtatctgtgttgaatgcggtctgaaatgatcctatggattttcccggctggttgccactgctgtacaacattcagtgcccacatccacctgtgccattaagcttttttgagacatgagagatgcctcttccctgctgtatgacatgcatttgggaagttggaaagaaatgacaaaatcagggagaaaacatccaagcttcttacctgtagatagaatcagccctcacttggtgcttattaccagttattcaagaacaataacaacaacaaaattagtagacatccaagaagcacatattaggaccaaagatagcatcaactgtatttgaaggaactgtagtttgcgcattttatgacatttttataaagtactgtaattctttcattgaggggctatgtgatggagacagactaactcattttgttatttgcattaaaattattttgggtctctgttcaaatgagtttggagaatgcttgacttgttggtctgtgtgaatgtgtatatatatatacctgaatacaggaacatcggagacctattcactcccacacactctgctatagtttgcgtgcttttgtggacacccctcatgaacaggctggcgctctaggacgctctgtgttcactgatgatgaagaaacctagaactccaagcctgtttgtaaacacactaaacacagtggcctagatagaaactgtatcgtagtttaaaatctgcctcgcgggatgttactaaactcgctaatagtttaaaggttacttacaatagagcaagttggacaattttgtggtgttggggaaatgttagggcaaggcctagaggttcattttgaatcttggtttgtgactttagggtagttagaaactttctacttaatgtacctttaaaatagtccattttctatgttttgtataatctgaaactgtacatggaaaataaagtttaaaaccagattgcccagagcaagactctaatgttcccaacggtgatgacatctagggcagaatgctgccattttgaggggcagggggtcagctgatttctcatcaagataataatgtatggtttttacactaagcaactgataaatggacaatttatcactgga

SEQ ID NO: 6539 - DNA, 781 bp, Homo sapiens
  source 1..781: mol_type = unassigned DNA
ggcctgggagtccttgcagggtggcctgggtgactgctcaccagcccggccctccccagggttctgggccagagcctccctggccgttggagcgggagctgtgggtggaacacttctgaattgggagattgcctcggacctccagacgccgaacatctcagcacatcccgctctgggctttaaacgtgacccctcgcctcgactcgccctgccctgtgaaaatgttggtgcttcttgctttcatcatcgccttccacatcacctctgcagccttgctgttcattgccaccgtcgacaatgcctggtgggtaggagatgagttttttgcagatgtctggagaatatgtaccaacaacacgaattgcacagtcatcaatgacagctttcaagagtactccacgctgcaggcggtccaggccaccatgatcctctccaccattctctgctgcatcgccttcttcatcttcgtgctccagctcttccgcctgaagcagggagagaggtttgtcctaacctccatcatccagctaatgtcatgtctgtgtgtcatgattgcggcctccatttatacagacaggcgtgaagacattcacgacaaaaacgcgaaattctatcccgtgaccagagaaggcagctacggctactcctacatcctggcgtgggtggccttcgcctgcaccttcatcagcggcatgatgtacctgatactgaggaagcgcaaatagagttccggagctgggttgcttctgctgcagtacagaatccacattcagataaccat

SEQ ID NO: 6540 - DNA, 3582 bp, Homo sapiens
  source 1..3582: mol_type = unassigned DNA
agagcttcaaaacagcccggcggcctcgcctcgcacccccagccagtccgtcgatccagctgccagcgcagccgccagcgccggcacatcccgctctgggctttaaacgtgacccctcgcctcgactcgccctgccctgtgaaaatgttggtgcttcttgctttcatcatcgccttccacatcacctctgcagccttgctgttcattgccaccgtcgacaatgtaagtttcctttcctgccactcacgcagaaacctgggtcctgcagtcaatagaagtgggttgtattggtctgttctcatgctgctgataaaggcataccagagactaggtaatttataaggaaaatgaggtctaatggactcacaattccacatgtctgggaggcctctgcagaaggcaaaggaggagcaaagccacatcttacatggtggcaggcaagagagcgtgtgcaggggaactgccctttataaaaccgtcagatctcgtgagacttattcactaccacaagaacagtatgggataaacttgctcccatgattcagttacctcccaccgggtccctcccacgacatgtgggaattatgggaatacaatacgagatttgggtggggacacagccgaaccatatcacaggttgagaaccctgccaaagttctcaatgttgaacctgccaaggttcaaccacgattcggggttgtcctccctgcgaaggcacacacatcttctgacccaagggctgaggactcttggcctaaatgtgaaggttcaggccgtcccatgttcaggttttggtggcaggtcctggcaggcagggacgtttgtcctcccatctgtgattctttcatagagcctggctctaggaagccctttgaggatgttgtgtgacttcagctttcctctagatcagagttctcaaccttgccactattgtcattttgggctggataatcctttgttgtaggggcctccctgtgcattgtaggaagttcagcaacgtgtctggccttatctgctagatgcagtagctcccccacccctggttatgacaatccaaaatatcttcagacattgttaaatgtcccatggagaacaaaatcaccctctgttgaggaccgctgccctagatcttccaggtgacccatcccaggtgacctctgcccccaacccctgacacctccttatcaaccagggtcccttgttgctagcccacccggccatgtcctccccagcagagctcatgcatggaactttccagactctacctatgcccctatgaaaaatttaatgtttccctttagtatccagcttgcagccatatggcaggaatgtattggataaataacctcttggcatagattaatatccctccaaacagggagtgacatcagggaagcttcttaacagcctatacactgttccaaagacctggcttccatcctgctcattttagactgcagagataattaaagggcagaaacattgctcagaaagccaaaaagtacaccatacgagtggccaccaactctgcctacatatacggctcccgttgatggatcatcatgacaatagtaacataaactataatgcctgtcacttagcgatcactgtggcccttttatgcatgtcatctcatgtgatccccaccccagctgtaccaggtagggcaccgacatctccttgcaccgggttacaggtgaaggaactgcgcctcagggccattcgggcacttggcagagtttacagtgcagtaagcagcagagccaggatttgagccattccagaggctcctggtcctagagcctgtcaggggagatgagcacaataatcgcatttgggttctggagcttcttgctgagctgctgtgagtggcctgggcagggaccacattgctgctatggattatagcagtggtccccaacgtttttggcaccaggaaccggtttcatggaagacaatttttctacagactggggagggggcattgcagggggatggtttcagaatgattcaagtgcattacatttattgtgcactttattattattacattttaatatataatgaaataattatataactcgtcataatgtggaatcagtgggagccctgagcttgttgttctggactagacggtcccatctgggggtgatgggagacagtgacagatcatcaggcattagagtctcataaggagcgtgcagcctagatccctggcatgcacagttcacaaggttgacactcctataagaatctaatgcccctggtgacctgacaggaggcagagctcaggcagtaatgtgagtgatggggagcagctgtaaatacagatgaagctgccttcactggctgctcacctcctgctgcgtggcctggttcctaacaggctacagacaggtaccagtccatggcccatgggttggggagtcctagattatagtatttggacccaccattccaggagctcactgtgaaataaatgggaccgaatgttcttttagaatctcctttttctatttcttcccatctagtcctttgggatcctgaaaaggtcccagacttagtgaaaaggatagacagacattaggggcaggaaaaccatcagccttagtgaatcgtatccagcacccccagggtatattatcatggcacatactaagaagatgcagatggactttttgtccatcggtgagtctgagggtattcattatgtatttggaattgtgcttggcaactggaaagtagaaggaaggccatcttgggcagtgggggaagggcagcagccaccaaagcacacagggaaatgaatgcttttggctgaagacaggagaatcttgtctggtcatcccatccattgcaatgtttgtttgtttgtttgtgacagggtctctctctgtcacccaggctggagtgtagtgttgcgatcatggctcactgcagcctctactgcccaggctcaagcgatcctcccacctcagactcctgagtagctgggactacagtcacacaccaccatgcctgactaattttttgtatttttttgtagagatgggttgccccggctggtctcaaactcctgggctcaagcaatcctcccacctcggcctcccaaagtgctgaaattataggcatgagccactgtgcccacccctgactgctattacttccagcaactcagcctcatcttttctcccatactctctgagggcctggaccacctcttatcctttgggagaaagtagcagggcatcacctggagccggttagaaatgcagaatcctggccaggcgtggtggctcacgcctgtaatcccagcactttgggaggccaaggcaggtggatcacctgaggtcagaagtttgagactagtctgaccaacatggcgaaaccctgtctctactaaaaatacaaaaatgagccaggtgtgctggtgcatgcctctaaatcccagctactcgtgagactgaggcaggagaattgcttgaacccagtatgggagggttgcagtgagccaagatcatgcatcgcactccagcctgggcaacaagagtgaaactctgtctcaaaaaaaacaaaaaaagg

SEQ ID NO: 6541 - DNA, 3395 bp, Homo sapiens
  source 1..3395: mol_type = unassigned DNA
tctctcatcgtctgggcgagcggggcggctcgtggtgtttctaacccagttcgtggattcaaaggtggctccgcgccgagcgcggccggcgacttgtaggacctcagccctggccgcggccgccgcgcacgccctcggaagactcggcggggtgggggcgcgggggtctccgtgtgcgccgcgggagggccgaaggctgatttggaagggcgtccccggagaaccagtgtgggatttactgtgaacagcatggaggagaatgaccccaagcctggcgaagcagcggcggcggtggagggacagcggcagccggaatccagccccggcggcggctcgggcggcggcggcggtagcagcccgggcgaagcggacaccgggcgccggcgggctctgatgctgcccgcggtcctgcaggcgcccggcaaccaccagcacccgcaccgcatcaccaacttcttcatcgacaacatcctgcggcccgagttcggccggcgaaaggacgcggggacctgctgtgcgggcgcgggaggaggaaggggcggcggagccggcggcgaaggcggcgcgagcggtgcggagggaggcggcggcgcgggcggctcggagcagctcttgggctcgggctcccgagagccccggcagaacccgccatgtgcgcccggcgcgggcgggccgctcccagccgccggcagcgactctccgggtgacggggaaggcggctccaagacgctctcgctgcacggtggcgccaagaaaggcggcgaccccggcggccccctggacgggtcgctcaaggcccgcggcttgggcggcggcgacctgtcggtgagctcggactcggacagctcgcaagccggcgccaacctgggcgcgcagcccatgctctggccggcgtgggtctactgtacgcgctactcggaccggccttcttcaggtcccaggtctcgaaaaccaaagaagaagaacccgaacaaagaggacaagcggccgcgcacggcctttaccgccgagcagctgcagaggctcaaggccgagttccagaccaacaggtacctgacggagcagcggcgccagagcctggcgcaggagctgagcctcaacgagtcacagatcaagatttggttccagaacaagcgcgccaagatcaagaaggccacgggcaacaagaacacgctggccgtgcacctcatggcacagggcttgtacaaccactccaccacagccaaggagggcaagtcggacagcgagtagggcggggggcatggaggccaggtctcagtccgcgctaaacaatgcaataatttaaaatcataaagggccagtgtataaagattataccagcattaatagtgaaaatattgtgtattagctaaggttctgaaatattctatgtatatatcatttacaggtggtataaaatccaaaatatctgactataaaatatttttttgagttttttgtgtttatgagattatgctaattttatgggtttttttcttttttgcgaagggggctgcttagggtttcacctttttttaatcccctaagctccattatatgacattggacacttttttattattccaaaagaagaaaaaattaaaacaacttgctgaagtccaaagattttttattgctgcatttcacacaactgtgaaccgaataaatagctcctatttggtctatgacttctgccactttgtttgtgttggcttggtgaggacagcaggaggggcccacacctcaagcctggaccagccacctcaaggccttggggagcttaggggacctggtgggagagaggggacttccagggtccttgggccagttctgggatttggccctgggaagcagcccagcgtaccccaggcctgctctgggaagtcggctccatgctcaccagcagccgcccaggcccgcagcctcacccggctccctctcctcaccctcctgcacctaactccctcctccttctcctttttcctcctcttcctccttcctccttcctcctgctcctcctttcttcttctttttcttctcctcctcctccttccttcctcctcctccttctctttcctcctcctcctcaccaagggcccaaccgtgtgcatacatcgtctgcgtctgtggtctgtgtcgctgtccccagtcccaccgcagtcctgccgcaggcctaaccctcctgccctgggcactgcctccatgcagaagcgcttcgaggttctggggctaaaggcctggggtgtgtggcctaaagcccaagagcggtggggcgaccctccttttggcttggccccaggaatttcctgtgactccaccagccatcatgggtgccagccagggtcccagaaatgaggccatggctcactgtttctgggcgggcagaaggctctgtagagggagatggcatcatctatcttcctttcctttttcttttcttccctatttttttctttttttcctttatttttttcttttcttggagtggctgcttctgctatagagaacattcttccaagataaatatgtgtgtttacacatatgtctgcatgcatgtgaacacacacacacacacacacacaccaggcgtgtttgagtccacagttctgaaacatgtggctaccttgtctttcaaaagaactcagaatcctccaggatctagaagaaggaagaaagtgtgtaaataatcatttcttatcatcactttttgtcttttcttgttttttaaaatatacattttatttttgaaggtgtggtacagtgtaaattaaatatattcaatatatttcccaccaagtacctatatatgtatataaacaaacacattatctatatataacgccacactgtcttctgtttagtgtatggggaaagaccaatccaactgtccatctgtggctgggacagcccagggggtgtgcccacggctgacccaggggtgtgcacacggctgagctgggagtcccgctggtctccctgaggactgagggtgaacttcgctctttgccttaaacctctttatttcattgcagtaatagttttacgttgtacataatagtgtaaacctttttaaaaaggaaagtataaaaacaaaagttgtaatttaaaagtctgaataaccatctgctgcttaggaaactcaatgaaatgacatgcctttttagcaggaagcaaagttggtttctgttttttgttttctttgttgttttagtttataaaacatgtgcattttacagttccagtatcaaatatttataatcttatgagaaatgaatgaatgtttctatttacaactgtgcttatcaaaattgtgaacacccccacccccgcatttttgtgtgttgaaattcttgaaggttacattaaataaaacaaaatctctttattataaaata

SEQ ID NO: 6542 - DNA, 13168 bp, Homo sapiens
  source 1..13168: mol_type = unassigned DNA
ggttcctcgcggcgatcccgactctcctcccgcggctgcagcagctgccggttgcacacggcctcggcggcggcgcggcgagcgcgggcctgtggagcggcggccgggcgcgcggccccggcgggcacccctcagagggcggccgaggaagctccgggaggaggagcaggaccacgaggaggtgggaggcggcggccgcctggggaccagctccgcgcctcggcctctccgccccctccccagcctttctctcgccctcttctcccacactcccggccggcgcctcggctttgtgcgaggagatggtgtagccccctggccgccgaaggaggagccggacacttgtctcccgtctccgagctgctccccacccctggaggagagacccccccctcggctcggcgccttctgcgtctcccggctggtggggaagcctctgcgccgccggcaccatgagtgaacagagtatctgtcaggcaagagctgctgtgatggtttatgatgatgccaataagaagtgggtgccagctggtggctcaactggattcagcagagttcatatctatcaccatacaggcaacaacacattcagagtggtgggcaggaagattcaggaccatcaggtcgtgataaactgtgccattcctaaagggttgaagtacaatcaagctacacagaccttccaccagtggcgagatgctagacaggtgtatggtctcaactttggcagcaaagaggatgccaatgtcttcgcaagtgccatgatgcatgccttagaagtgttaaattcacaggaaacagggccaacattgcctagacaaaactcacaactacctgctcaagttcaaaatggcccatcccaagaagaattggaaattcaaagaagacaactacaagaacagcaacggcaaaaggagctggagcgggaaaggctggagcgagaaagaatggaaagagaaaggttggagagagagaggttagaaagggaaaggctggagagggagcgactggaacaagaacagctggagagagagagacaagaacgggaacggcaggaacgcctggagcggcaggaacgcctggagcggcaggaacgcctggagcggcaggaacgcctggatcgggagaggcaagaaagacaagaacgagagaggctggagagactggaacgggagaggcaagaaagggagcgacaagagcagttagaaagggaacagctggaatgggagagagagcgcagaatatcaagtgctgctgcccctgcctctgttgagactcctctaaactctgtgctgggagactcttctgcttctgagccaggcttgcaggcagcctctcagccggccgagactccatcccaacagggcattgtcttgggaccacttgcacctccacctcctccaccactcccaccagggcctgcacaggcttcagtagccctccctcctcccccagggccccctccacctcctccactcccatccaccgggcctccaccgccccctcctccccctcctctccctaatcaagtaccccctcctcctccaccacctcctgccccacccctccctgcatctggattctttttggcatccatgtcagaagacaatcgccctttaactggacttgcagctgcaattgccggagcaaaacttaggaaagtgtcacggatggaggatacctctttcccaagtggagggaatgctattggtgtgaactccgcctcatctaaaacagatacaggccgtggaaatggaccccttcctttagggggtagtggtttaatggaagaaatgagtgccctgctggccaggaggagaagaattgctgaaaagggatcaacaatagaaacagaacaaaaagaggacaaaggtgaagattcagagcctgtaacttctaaggcctcttcaacaagtacacctgaaccaacaagaaaaccttgggaaagaacaaatacaatgaatggcagcaagtcacctgttatctccagacgggattctccaaggaaaaatcagattgtttttgacaacaggtcctatgattcattacacagaccaaaatccacacccttatcacagcccagtgccaatggagtccagacggaaggacttgactatgacaggctgaagcaggacattttagatgaaatgagaaaagaattaacaaagctaaaagaagagctcattgatgcaatcaggcaggaactgagcaagtcaaatactgcatagaggaacagactaaggagagataggactttaatctggaggaaaaatatcctacaaacaacaactgttcacaacagcaaacccctacatttatgagctgtaagaagaaaatggagacaaacagaaggagggaaaaaccaacctactctgaaagccttcagacattatgactctggtgataagctctttccctctccgtttgctgcttttttctggcctttacaacagaatggaagagaatcatttaagagttcctgtaacagttatgcagaaaatactaaaacccatcaggcaagatcaccacgcattgaaatattttcatatcaagataaagtcgcacattttccacaatacattgctaaaataaagaggagaaaggcttaggaagtttttttgcagagagtgctggtaaagaattgagcaagtttgctattgtattgtaatgtttctctcaggtttgttcttcctatcatgtttgatattccatgaataattgagatcagccctatgtaagttaagatcataatatgtggaacaaatggaattgtaagtgctttcaaagggtaatatttataagaaagtgtccgaaaaatgtttcttcagcttgagaaattttagaatgataggaagtttctcgagttagccttcatgcaattttgtagattaaaacataaaatttgtccagaacttaaagatttagatgccttcctaaattgttacaatgctttaccaaatctatgacttctacataacacaaaccagtggtcaaatgtaaacactatattgtagatttactgtaggttttcaaccttttttagatttatgcatgtggacatttttataatgtaattacaatcaccacaaggttagcttttttaattgcagacagtaatgcatgtcacactaatatgtagtggccttttcaaggcctagtcccagggaaaacattttgtagagtataggggagtgggaggaaggggaggaataattttttatttaaagttgatttctgcactatctttttctcagttacctgcatgaataaataatgagaaatattttgtgactttaattggtaaatatgttacaaaaccaagtacttaatcttttacatcatgtcttcagctatttgtattttaaccagtaatttcaatggtctgaaacatgattctgagcttcacataatatcttaactgtggaactcaaaagtttgatcactgaatttggcagttattattacctaggtacccccgctgttacacaggtgtttagatacgtgttcctgaatgaagctgcttttgaattttgttatgttgaaatgcaagaaataacaatgatggcagcaattaaggtcacagaaatcattaggtaaaggaaaaccaatgaggagttctgcagttttcttttaataagtaaagtgagacttgggtggtgggaagaaggaaggtgggaagaaggaattagacactctgcctgccactctgcgtgtgtgtgctctcgcgcacgtgctgtctatatggaagccactcccttttctttcctttgaaactggtaaggttaaaataggggagaaatcctacatgttggaatgatagctttttggaaaatttaagaaactctccaggctctccatcttgatttatgcttgagttgttatgtgccatatttgctttgaactctgattatcagaagttttactaaaactttgaaataattcactttcatctgctttctagattttgtacatctcagtccataaagcaaagcttgttgatagtgtagttttctaaacgctgcaaatttgcagcctttaccactacaaagaagtttggatgagggattttttttttctttgtcaaaatagttcctgtttctgtagaaatttcatttttagattaaactgtgatggatgagctatcataattcaagtatacatttcttttttctatcagatattcattgtcatgcagtagtagtaaaaacatcaaagatgcagcaagcttattaagtattattttctaaaagaaataggaggcattttcatctttattattgtacttttggttatgcaaacactttgataatataaacagttatgtcccctataaatctggtcagcaacctcttttgattttgttgggtaagttaaatagtctgtagtaggtagagtactgggtacaagtggtccaaactaagataagagactaaaataaaatgctaaatcttaaaagaaactgggtttatgcactaaacgttttgtgccttggtctaatattaacatgatgtatgtgtaaactgacaaaaaaaaaaaaaaaaaaaaaccagtgttgaatcatgctatatttcccatcatcccagattgctaaatgttctttccaagaagtctgaatgaattattatatacatttgctatcatacatgacagttgtgtcattattagagatttcagtaattaaaatgggaaacagaagcctaagttatttaccttatcaaaaccacgttccttggaaccacattattatgatggtttttgtgctcttgtacgttggatgtcttaagctgagtacagtttaggggatcctttctaatgacaggaaggcactgctttcctcaacactgtgatctgacctgtgacaagtctgtactatccactatgtaaatggctcacaagtcaattgcaaacaaactgaatgtacaaatcttagtgctggtgctgaaatctcttcagaatagtcatcatgatttaaaagtttgtttaaaaatttgcaagcatcaagtgtcaatcaaaactgaagatgaaacactaatgaatgttgaattctcatgcttttaggtgtacttcctttttagaattttcagttttctgctatttttaccgtaactatttcgtttaaatttgtttcatttaagtttcctacacgctaacttcgtttgtgcgattgaaataaaattgcagtatatatatgttgcttgtttgtgacacttagataatcttctgaaataatttgttttaaagtaagttatattggatgtgaaaaacaccttttaaagtccaagactttactacttaaaagtttacatgtcacgtcactattctttacagatttcatagaagtcgtgaatactaagtaatgtatacaaaagaaatatgtgatgatgtgtctactttttgtttgaaataactgttgggtgttccctcttcttattttctctctgcccaccttgacacagtaacttcctcttatagtcaagatgatgattaagtgtttaatttttattccattttgttctgcaacacgttcaggtacttaaaactcattcatgcagttagaattatcctttatgtagtttgcatggtaaaggacattgtgtggtaaagggcattattgagtaatgaattttaagtatagcaaaatatgtatagtgtttatacatgatgctgatttcttaaaacctacatataagcagtagtactttttctctattataaagtattaattttgagttccattttataattctgatgtcttcattagaaatacaaaaatacaatccttgtattttttctttgaccagacccaaattttccccttcccccctccattctcctctccacttctcgtggaccgcgtgttcccaatattcattaacatttgcagccattacagagttacagttgtaaaattttcagctgtttttttttttttttttttgctctagcctgtctcatgttcttgcttctcttcatatgtaagtcagtatttttgtctacaaattaaaagtcacttgtcattcaaaaatgagttaagtaacatgataatcttttaaatttacctagctacaacttttatgtctcttgtaaatttatatatactttcagtgccattgtgaagaattggccttttaattctaagtagtattaccctatgaagcacagtgtgcaaaggtatgctacaaggtctctttaattcctgtgtggccattataattttataacaccattaccctttaaattctaccgattataagcagcgtaaaagtaactatataaagcaaacatcgcaaaggaactctgcaggagctcttaattcctttatgtagctatcataaaattcactttcctgaagacatttactctcattcacttccaaactccaaacctttttctggtagcaccacttttgtttttaatagaaagatgagttcatatctgtacatctctccaaagctctaaggaatgagaaaaggatcctagtatattgaaattactgatgtttaatacctctgccttttcactaaaagccatttaatatttttaaagtcaaaacttgacatacaggtatttataaggaatctccatgactctgaaggaatgaaattgatgtaggtagctttggctatgtaaagacatagtagaggacaattacttaaagaagagttttcttttgaggatttgtagatttgactaagcagctgaagtcagtaacccctcaagaaagtccgtttatagaagccaagaactgttggaggtctgtgatgcaggtttttctgttcccaacatcaaaagctgtggattatttggtgtgttcccctttatgttatctctcgataatttttgagacatcaagattttttaaaatatcaatactggaaagatgaaaccttcaaattaaaacctaaaattgattagaaagaaaagtaaaatattaatgcagtaaatttaggatggttacagatactcaccatcaacataaataaatggagttctaggataaattatttgtggaatactaatggtcaagtcacataagagtaaaatcttttggtgaggagacacatttgacaactgctaaagaattaactaaatttgtctttctaaatagttttctttataaagtaacagaaacattgtaaaaggataaatgactgtcataatgacttaggatgttgtaagaatgtctgccacatttattggttatttctgttgaaatctgaaggaatcgatacatctgaaaattgagaaagggaaataggactgtccccgttacagatactctgtgatgcacacaaccttctaaacggaagtgttagtatcatttaaagcacatagtaggccttgagtatttgcagattaacatgcagaaaaaatcaaagatgaagccccaattaagtgtttgaaccaaagaatcacagtcactgagctgcacccccgttctgtgaagcatgttaaatactcataaagagcagagagcagggcccgtagacgcttctggtgtaggacacaggaattctaggcagagggagaaaattaggggccccagttggtggctgagagtaaaaagaatataccatttgagtagtgctgttctttttcctcagtttttaaagacatataattcctagtagttaggacatctaaatagctcggtaaactggtcagaggcgggaggattgcttgaggccagaagttttgagatcagcctgggtaacagggagactcatttctacaaaaaaatttaaaaatttaggccaggcatggtggtgcacacctgtaatcccagctactcaggagactgaagcgggaggatcacctgagcccagggaggacgcggctgcagtgagccgttatcatgccactgtactccagcctgggtgacagagcgagaacctgtctctaaaaaaaaaaaaaaaaaattctaagagaatatagcttttcatagaaattattagaaaagcttacatatttcattagagagcccagtttgttagactacatttattccgtaaaagttctatatacaaatgacaacccatagtttatcatgtaaatctgatttaactgttcccttcaattccaagaaagatttcttcagcagtagatgacaattctaaaagcataaagaaataactaataaaggagatggatgatgttataggttggtttggttgggttttagtaaatagttattcttctaagaaggcttagaaaatcgagaattgaatagttggtactttgaattccataggaaaaagcactcagaagaaaaagtctacattggctagtgtttagattgagagttaattttcccatcaagtccaaaagtttccatccaagtctatagaaactgagagaaaaggttcttggcttacacttaaaatacacattgttgcaaccatataagagagatacattacagaacgcttttaaaaatttggtctcttaagcgcctaacagtccatgctttagtcacatctgtgaaacctcttttctttttttctttttcttttatttttttttttaaagattaaaggcattttaaaaataaatgtttcatggccgggcatggtggctcacgcctgtaatcccagcactttgggaggctgaggtgggcagatcacctgaggtcaggagtttgagaccagcctggccaacatgatgaaaccccatctctactaaaaatacaaaaaaattggctgggcatagtggtgggcacctgtaatcccagctcttcgggaggctgagacagaagagtcgcttgaatccaggaggtggaggttgcagtgagctaagaccgcgccactgtactccagcctgggcgacagagcgagattccatctctaaataaataaatgtttttcaacgtgttttatgtgagaaataccagcttttcattattactaccagttgatctcaggtgtcacttggttggttctgctgaccgaggcactgggcattttaaatatggagtttccctccacccattgatcaagtctgaggtttgtccatccttggtggcaggctagcttaaccatggattcacaaaccccatttgattgtcgtaagtcataaggccaccccagtgccagtggttgggcatcacagtgagtctgaggtgatgaatttgagttagctgtaggctagttccgcaactcagcaatagcccatggatggttggtaaaagacgttgactttgccacttaaatttccaggagaagaatagcttatagtttatctgaggaaagtaattgggaaggcttagatattgagaagaaagccctgttaaaatctaggtagcatttcctttcttctttattactagagggatgggaggttcaggcctgagtcaggactttacaatttggtgtccttcccagaggtactttgggcttgatcattttaagtttcaattgcaaaaaaaaatttttgacggagtgttgctctgtcactcaggttggagtgcagtggtgcgatctcggctcactgcaacttcccccccctgggttcaaagggattttcctgcctcagcctcccaagtagctgggactacaggcgcgtgccaccatgcccgactaatttttgtatttttagtagagatggggtttcaccatgttgcccaggctggtcttgaactcctgagctcaggtgatctgcccgcctcggccttcaattgcagaagtttttgaagggagaatatttgatcctcacataaaatgtccttgtttctgaaagaaaacatggtaaaaattgttattgagtccatgtctttgccaccttgttggacttgatttccctttctctgtgttcctcccgccctcagtctctctcagtctgtccttttttgtgtgtggagttgtgggcaggtcattggactgggactgactttaccagttttcaggctgtggggctagtcagtcattctctctgagccttctacctctaaagttgagttctttttttaaattctttttgttttgtttttattttttccttgccactatacaagcaaggatagataaagctttttattattattgttattattattatttcgagacagtctcgctctgtcatccaggctggagtgcagtggtgtgatttcagctcactgcaacctctgcctcccgggttcaagcgattctcctacctcagcctccttagtagctgggactacaggcatgcgccaccacacccggctaatttttgtatttttagtagagacagggtttcaccgtattggccaggctggtctcgaactcctgacctcaggtgatccacccaccttggcctcccaaagtgttgggattacaggcataagcgaccgtgcccatccccgataaagttgagttctgaatttcctctttcactgtattctcggcagctactggttggtttattctttttttttaatcttttttggtttattcttcttttgatctttgaagagaaggagaaaaaagatctgagtttggctctcccatcttaagtgcagcttttagttgttttatagtcatagacgctattgcactggacagcatgcatcctggatgtaaacaatgcggaaaaatcaatggagtgaccatcttggggtcagtggtgttgcataaagcaccagtggtgtgctgttctgtgtcagtttcctctgcgccacgtgctttcacagtttgaattaccagcatctctgtggtggcttcagtacattctccattgtgcttcaacctggaagcacattctgccgttcagaaagactgattccaatcatgtaatgggaccacacgagatccatgctccaattatatgaatagcagaaggtccatttgactcttgtagttcaagagctgtttctaagtaaacagactttccagagctcgatgaagtgaagaagcccttctttcaattcctgggcagaattcagtggttttcatatcatctgaacctgctgtgctgctgtttattctatcactgtcagccttgaaaggaaaaaaggaataatcttaccctcctgcccttcttattttatatcttccatcttatccatctatatccatgtagtcattccttccgagttccctggttttaatccaaaagactctgtttaacagcaatgtcttggcagaccaggtgccgcttccgtgccatttgagggctctgagtctttgcttcgtcttaggaagataaagataatttggcagaaagtcagagatggaaatagcagtttgggatgataaaagatgggtcctgttttgctgacattcttttactttggttcttggtgcgtgtcctttgggattcatttcttgctagcatgaataggacatgcttttcgttaggtgcttttcttttttggagaacatgaagtgtttctaacaaaactgaatgagctagaaagaattctattttgagacatctgtagttgatgcaaagtatttctgtaatcctcaatgacagtacttacatatttgcatagaattttttttttaatttttgaggaaacctctctggagtctgtatttataggagcatcctgaaagtccctattatgtagctggtgggagcgagagagggacagccacactcgtgctgtgagcagagcacaacttcaggcagagtgaatgccttctgagttctcattggaagctttctgttgctcagcctctggcagatttcagaaccttctacttaagccaggtgtggtggtgcgtgctcctaggcacagcgactcggggggctgaggcagaaggatcacttgagcccaaagttggaggccagcctgggcaacatagcgaggcctgtctccttaaaaaataaataaataaataataaataaataaataaataaaaaccttgtccttgactattgtgctgtctgctgcccctttgtagggatggggttggggtcagaataagcatgtgcatgaatggcggaaagctttggtggtgtttgtttgtttgtttgttttttgagaggtgggggagtcagcagtgaacctttctggttaaagaacaacgtacataatttctattatgagatttagaaggttaaatacttttttttttcaggcctaccaagttgatagaccaaaagtatatagtagaacagcacagtagaaaaaatttaaaagtgaatttcttatggtccaaaaggatggatagtcacagtccataacctttcataatatatgctggaattggaatctcttgtcatcttgctttgctctgaattttagaactagaagtgtgcatgtatgtcaaaagattatgcagagctattttctttgctaacaatgtaaacatttgcaccccatgaatgggactttataatctggaagtgagcctaaggttgcgtatactgaagtcatgttttaaaagttaaggttgacttaaacatatacaaggctgtattttaattgtaactagaaatcatttactatgcatacagaacctcatgtatcttatcatggaatttgtgaattaatgggccttgccgaattcaagggtaagggaaactggtaacaacttgttttaaatcaacatactataagctcctgcttgcttgactcaagttgtttgaaaatctgaattaaacaggatctcattgtcaggaaacatcttctaagcttgacatctacgtttaagaagggaacgtggaagagaaggtgagacatgaaactaaaacagctgggagggtaggatcagactgcacctgatttttggaccaaagtttcatataggaataaataaaaaggaggaccacttgtgagccaacctaggaaggacttgccagaaagtagcagctcctgctgcaaaatacagtgccttcaaaatgattctctgtgtgaattgcatgcaatttcatgtaaccataaagtgtaacctgtatgtgcatgacatgtgtctagaatgtgtaaagttaggattcagcaggaaggggcctggccctgtcactgtggtggatcagtggacctgctgaagtcactggactcatgtgacttaggtttgcagcatcagacccctgtgtttgcattaagtggccacatcgttgaaatcggatcaatctctccctcagctttctttcctactttgcagctttgctggttttaactgcttcattcttctgcttcttggtatccttttttcttttgaaataaaaacatgaaatacttaa

SEQ ID NO: 6543 - DNA, 3655 bp, Homo sapiens
  source 1..3655: mol_type = unassigned DNA
tcctccttcatgtttttaatacagccactttgactgtaaacaattaaatgtatgtgttcactgttactgaatttactgtctcaacacttaaggttaatgtggattattttgggtctgatatttcaagtagtactaactgccatcctatatactagtttgttttttcagggacgcttacctctcttccaaattttataagtatttattttgcttatttaccaaatccccatgaaaaaaaaaagtcttaattagatgatctgttgcatagttctattactaaagctctaacctaaagtaagtagttatatatacttggaccttacatttcagtatctttcaaaaactgatctagacttttacaactatgataaattggactcattaagtaaatacatgagtcagtttaatttagcatggcattctgcgtaccttcccacataaaataatatcactcagctctattgttgatggtcttacttaacatttctctctctcaggcattgtcttgggaccacttgcacctccacctcctccaccactcccaccagggcctgcacaggcttcagtagccctccctcctcccccagggccccctccacctcctccactcccatccaccgggcctccaccgccccctcctccccctcctctccctaatcaagtaccccctcctcctccaccacctcctgccccacccctccctgcatctggattctttttggcatccatgtcagaagacaatcgccctttaactggacttgcagctgcaattgccggagcaaaacttaggaaagtgtcacggatggaggatacctctttcccaagtggagggaatgctattggtgtgaactccgcctcatctaaaacagatacaggccgtggaaatggaccccttcctttagggggtagtggtttaatggaagaaatgagtgccctgctggccaggaggagaagaattgctgaaaagggatcaacaatagaaacagaacaaaaagaggacaaaggtgaagattcagagcctgtaacttctaaggcctcttcaacaagtacacctgaaccaacaagaaaaccttgggaaagaacaaatacaatgaatggcagcaagtcacctgttatctccagacgggattctccaaggaaaaatcagattgtttttgacaacaggtcctatgattcattacacagaccaaaatccacacccttatcacagcccagtgccaatggagtccagacggaaggacttgactatgacaggctgaagcaggacattttagatgaaatgagaaaagaattaacaaagctaaaagaagagctcattgatgcaatcaggcaggaactgagcaagtcaaatactgcatagaggaacagactaaggagagataggactttaatctggaggaaaaatatcctacaaacaacaactgttcacaacagcaaacccctacatttatgagctgtaagaagaaaatggagacaaacagaaggagggaaaaaccaacctactctgaaagccttcagacattatgactctggtgataagctctttccctctccgtttgctgcttttttctggcctttacaacagaatggaagagaatcatttaagagttcctgtaacagttatgcagaaaatactaaaacccatcaggcaagatcaccacgcattgaaatattttcatatcaagataaagtcgcacattttccacaatacattgctaaaataaagaggagaaaggcttaggaagtttttttgcagagagtgctggtaaagaattgagcaagtttgctattgtattgtaatgtttctctcaggtttgttcttcctatcatgtttgatattccatgaataattgagatcagccctatgtaagttaagatcataatatgtggaacaaatggaattgtaagtgctttcaaagggtaatatttataagaaagtgtccgaaaaatgtttcttcagcttgagaaattttagaatgataggaagtttctcgagttagccttcatgcaattttgtagattaaaacataaaatttgtccagaacttaaagatttagatgccttcctaaattgttacaatgctttaccaaatctatgacttctacataacacaaaccagtggtcaaatgtaaacactatattgtagatttactgtaggttttcaaccttttttagatttatgcatgtggacatttttataatgtaattacaatcaccacaaggttagcttttttaattgcagacagtaatgcatgtcacactaatatgtagtggccttttcaaggcctagtcccagggaaaacattttgtagagtataggggagtgggaggaaggggaggaataattttttatttaaagttgatttctgcactatctttttctcagttacctgcatgaataaataatgagaaatattttgtgactttaattggtaaatatgttacaaaaccaagtacttaatcttttacatcatgtcttcagctatttgtattttaaccagtaatttcaatggtctgaaacatgattctgagcttcacataatatcttaactgtggaactcaaaagtttgatcactgaatttggcagttattattacctaggtacccccgctgttacacaggtgtttagatacgtgttcctgaatgaagctgcttttgaattttgttatgttgaaatgcaagaaataacaatgatggcagcaattaaggtcacagaaatcattaggtaaaggaaaaccaatgaggagttctgcagttttcttttaataagtaaagtgagacttgggtggtgggaagaaggaaggtgggaagaaggaattagacactctgcctgccactctgcgtgtgtgtgctctcgcgcacgtgctgtctatatggaagccactcccttttctttcctttgaaactggtaaggttaaaataggggagaaatcctacatgttggaatgatagctttttggaaaatttaagaaactctccaggctctccatcttgatttatgcttgagttgttatgtgccatatttgctttgaactctgattatcagaagttttactaaaactttgaaataattcactttcatctgctttctagattttgtacatctcagtccataaagcaaagcttgttgatagtgtagttttctaaacgctgcaaatttgcagcctttaccactacaaagaagtttggatgagggattttttttttctttgtcaaaatagttcctgtttctgtagaaatttcatttttagattaaactgtgatggatgagctatcataattcaagtatacatttcttttttctatcagatattcattgtcatgcagtagtagtaaaaacatcaaagatgcagcaagcttattaagtattattttctaaaagaaataggaggcattttcatctttattattgtacttttggttatgcaaacactttgataatataaacagttatgtcccctataaatctggtcagcaacctcttttgattttgttgggtaagttaaatagtctgtagtaggtagagtactgggtacaagtggtccaaactaagataagagactaaaataaaatgctaaatcttaaaagaaactgggtttatgcactaaacgttttgtgccttggtctaatattaacatgatgtatgtgtaaactg

SEQ ID NO: 6544 - DNA, 3308 bp, Homo sapiens
  source 1..3308: mol_type = unassigned DNA
gccggcaccatgagtgaacagagtatctgtcaggcaagagctgctgtgatggtttatgatgatgccaataagaagtgggtgccagctggtggctcaactggattcagcagagttcatatctatcaccatacaggcaacaacacattcagagtggtgggcaggaagattcaggaccatcaggtcgtgataaactgtgccattcctaaagggttgaagtacaatcaagctacacagaccttccaccagtggcgagatgctagacaggtgtatggtctcaactttggcagcaaagaggatgccaatgtcttcgcaagtgccatgatgcatgccttagaagtgttaaattcacaggaaacagtgttctatttagggccaacattgcctagacaaaactcacaactacctgctcaagttcaaaatggcccatcccaagaagaattggaaattcaaagaagacaactacaagaacagcaacggcaaaaggagctggagcgggaaaggctggagcgagaaagaatggaaagagaaaggttggagagagagaggttagaaagggaaaggctggagagggagcgactggaacaagaacagctggagagagagagacaagaacgggaacggcaggaacgcctggagcggcaggaacgcctggagcggcaggaacgcctggagcggcaggaacgcctggatcgggagaggcaagaaagacaagaacgagagaggctggagagactggaacgggagaggcaagaaagggagcgacaagagcagttagaaagggaacagctggaatgggagagagagcgcagaatatcaagtgctgctccatcttcagacagctccctgtataacgctccacttcctgagtattccagttgccagcctccttcagcacctcctccatcatacgctaaagtcatctcagctccagtgtcagatgccactcctgattatgctgtagtgactgctttgccacctacttccacaccccctacaccaccactgcgacactcagcgacacgttttgcaacatctttaggttcagccttccaccctgttcttccccattacgctacagttcctcgtcctctgaacaaaaactctcgaccttcttctcctgtgaacacaccctcttctcagcctccagctacgaagccctgtgcctggtctacttccaatttttcgcccctccctccatctcctccaataatgattagcagccccccaggcaaagctactggtccaaggcctgtcctccctgtttgtgtttcttctcctgtgccccaaatgcctccatcaccgacagcacccaatgggctggttgactctgtaacatatccagtgtctccaccgcctacctcagggccagcagctcctccgccgccgcctccactgccttccctcgcatcactctcacactgtggatctcaagcttctcctcctccaagcacccctattgcctcaactccctcatccaagcctagtgttctcccttctccctctgcagctgcccctgcctctgttgagactcctctaaactctgtgctgggagactcttctgcttctgagccaggcttgcaggcagcctctcagccggccgagactccatcccaacagggcattgtcttgggaccacttgcacctccacctcctccaccactcccaccagggcctgcacaggcttcagtagccctccctcctcccccagggccccctccacctcctccactcccatccaccgggcctccaccgccccctcctccccctcctctccctaatcaagtaccccctcctcctccaccacctcctgccccacccctccctgcatctggattctttttggcatccatgtcagaagacaatcgccctttaactggacttgcagctgcaattgccggagcaaaacttaggaaagtgtcacggatggaggatacctctttcccaagtggagggaatgctattggtgtgaactccgcctcatctaaaacagatacaggccgtggaaatggaccccttcctttagggggtagtggtttaatggaagaaatgagtgccctgctggccaggaggagaagaattgctgaaaagggatcaacaatagaaacagaacaaaaagaggacaaaggtgaagattcagagcctgtaacttctaaggcctcttcaacaagtacacctgaaccaacaagaaaaccttgggaaagaacaaatacaatgaatggcagcaagtcacctgttatctccagaccaaaatccacacccttatcacagcccagtgccaatggagtccagacggaaggacttgactatgacaggctgaagcaggacattttagatgaaatgagaaaagaattaacaaagctaaaagaagagctcattgatgcaatcaggcaggaactgagcaagtcaaatactgcatagaggaacagactaaggagagataggactttaatctggaggaaaaatatcctacaaacaacaactgttcacaacagcaaacccctacatttatgagctgtaagaagaaaatggagacaaacagaaggagggaaaaaccaacctactctgaaagccttcagacattatgactctggtgataagctctttccctctccgtttgctgcttttttctggcctttacaacagaatggaagagaatcatttaagagttcctgtaacagttatgcagaaaatactaaaacccatcaggcaagatcaccacgcattgaaatattttcatatcaagataaagtcgcacattttccacaatacattgctaaaataaagaggagaaaggcttaggaagtttttttgcagagagtgctggtaaagaattgagcaagtttgctattgtattgtaatgtttctctcaggtttgttcttcctatcatgtttgatattccatgaataattgagatcagccctatgtaagttaagatcataatatgtggaacaaatggaattgtaagtgctttcaaagggtaatatttataagaaagtgtccgaaaaatgtttcttcagcttgagaaattttagaatgataggaagtttctcgagttagccttcatgcaattttgtagattaaaacataaaatttgtccagaacttaaagatttagatgccttcctaaattgttacaatgctttaccaaatctatgacttctacataacacaaaccagtggtcaaatgtaaacactatattgtagatttactgtaggttttcaaccttttttagatttatgcatgtggacatttttataatgtaattacaatcaccacaaggttagcttttttaattgcagacagtaat

SEQ ID NO: 6545 - DNA, 2758 bp, Homo sapiens
  source 1..2758: mol_type = unassigned DNA
cggcggccgggcgcgcggccccggcgggcacccctcagagggcggccgaggaagctccgggaggaggagcaggaccacgaggaggtgggaggcggcggccgcctggggaccagctccgcgcctcggcctctccgccccctccccagcctttctctcgccctcttctcccacactcccggccggcgcctcggctttgtgcgaggagatggtgtagccccctggccgccgaaggaggagccggacacttgtctcccgtctccgagctgctccccacccctggaggagagacccccccctcggctcggcgccttctgcgtctcccggctggtggggaagcctctgcgccgccggcaccatgagtgaacagagtatctgtcaggcaagagctgctgtgatggtttatgatgatgccaataagaagtgggtgccagctggtggctcaactggattcagcagagttcatatctatcaccatacaggcaacaacacattcagagtggtgggcaggaagattcaggaccatcaggtcgtgataaactgtgccattcctaaagggttgaagtacaatcaagctacacagaccttccaccagtggcgagatgctagacaggtgtatggtctcaactttggcagcaaagaggatgccaatgtcttcgcaagtgccatgatgcatgccttagaagtgttaaattcacaggaaacagggccaacattgcctagacaaaactcacaactacctgctcaagttcaaaatggcccatcccaagaagaattggaaattcaaagaagacaactacaagaacagcaacggcaaaaggagctggagcgggaaaggctggagcgagaaagaatggaaagagaaaggttggagagagagaggttagaaagggaaaggctggagagggagcgactggaacaagaacagctggagagagagagacaagaacgggaacggcaggaacgcctggagcggcaggaacgcctggagcggcaggaacgcctggagcggcaggaacgcctggatcgggagaggcaagaaagacaagaacgagagaggctggagagactggaacgggagaggcaagaaagggagcgacaagagcagttagaaagggaacagctggaatgggagagagagcgcagaatatcaagtgctgctgcccctgcctctgttgagactcctctaaactctgtgctgggagactcttctgcttctgagccaggcttgcaggcagcctctcagccggccgagactccatcccaacagggcattgtcttgggaccacttgcacctccacctcctccaccactcccaccagggcctgcacaggcttcagtagccctccctcctcccccagggccccctccacctcctccactcccatccaccgggcctccaccgccccctcctccccctcctctccctaatcaagtaccccctcctcctccaccacctcctgccccacccctccctgcatctggattctttttggcatccatgtcagaagacaatcgccctttaactggacttgcagctgcaattgccggagcaaaacttaggaaagtgtcacggatggaggatacctctttcccaagtggagggaatgctattggtgtgaactccgcctcatctaaaacagatacaggccgtggaaatggaccccttcctttagggggtagtggtttaatggaagaaatgagtgccctgctggccaggaggagaagaattgctgaaaagggatcaacaatagaaacagaacaaaaagaggacaaaggtgaagattcagagcctgtaacttctaaggcctcttcaacaagtacacctgaaccaacaagaaaaccttgggaaagaacaaatacaatgaatggcagcaagtcacctgttatctccagaccaaaatccacacccttatcacagcccagtgccaatggagtccagacggaaggacttgactatgacaggctgaagcaggacattttagatgaaatgagaaaagaattaacaaagctaaaagaagagctcattgatgcaatcaggcaggaactgagcaagtcaaatactgcatagaggaacagactaaggagagataggactttaatctggaggaaaaatatcctacaaacaacaactgttcacaacagcaaacccctacatttatgagctgtaagaagaaaatggagacaaacagaaggagggaaaaaccaacctactctgaaagccttcagacattatgactctggtgataagctctttccctctccgtttgctgcttttttctggcctttacaacagaatggaagagaatcatttaagagttcctgtaacagttatgcagaaaatactaaaacccatcaggcaagatcaccacgcattgaaatattttcatatcaagataaagtcgcacattttccacaatacattgctaaaataaagaggagaaaggcttaggaagtttttttgcagagagtgctggtaaagaattgagcaagtttgctattgtattgtaatgtttctctcaggtttgttcttcctatcatgtttgatattccatgaataattgagatcagccctatgtaagttaagatcataatatgtggaacaaatggaattgtaagtgctttcaaagggtaatatttataagaaagtgtccgaaaaatgtttcttcagcttgagaaattttagaatgataggaagtttctcgagttagccttcatgcaattttgtagattaaaacataaaatttgtccagaacttaaa

SEQ ID NO: 6546 - DNA, 713 bp, Homo sapiens
  source 1..713: mol_type = unassigned DNA
agaaaagtgaaaaaatgttgttttatgttctaatcagccctacaattttgataattttttaagaaaatggcttttttaaagaaatgtatttaaatctggtgttgggttggtaaatttgcaattatttatgaactcattaagtattaagaatgttgtttacctgtcctggaaatctcatttatacagaccaaaatccacacccttatcacagcccagtgccaatggagtccagacggaaggacttgactatgacaggctgaagcaggacattttagatgaaatgagaaaagaattaacaaagctaaaagaagagctcattgatgcaatcaggcaggaactgagcaagtcaaatactgcatagaggaacagactaaggagagataggactttaatctggaggaaaaatatcctacaaacaacaactgttcacaacagcaaacccctacatttatgagctgtaagaagaaaatggagacaaacagaaggagggaaaaaccaacctactctgaaagccttcagacattatgactctggtgataagctctttccctctccgtttgctgcttttttctggcctttacaacagaatggaagagaatcatttaagagttcctgtaacagttatgcagaaaatactaaaacccatcaggcaagatcaccacgcattgaaatattttcatatcaagataaagtcgcacattttccacaataca

SEQ ID NO: 6547 - DNA, 578 bp, Homo sapiens
  source 1..578: mol_type = unassigned DNA
caagaattaattgtttaagaatcaaggaagtacaatagaatttcaggattctgatatttattttgagttgttcctatttttttccccaagagggactatttggatttagattaaatgttgaaatacatgaacatattataagttatacttactgtttttatcattggcactaaaaaataatttaaaacagtgtcgaaccaacaagaaaaccttgggaaagaacaaatacaatgaatggcagcaagtcacctgttatctccagaccaaaatccacacccttatcacagcccagtgccaatggagtccagacggaaggacttgactatgacaggctgaagcaggacattttagatgaaatgagaaaagaattaacaaagctaaaagaagagctcattgatgcaatcaggcaggaactgagcaagtcaaatactgcatagaggaacagactaaggagagataggactttaatctggaggaaaaatatcctacaaacaacaactgttcacaacagcaaacccctacatttatgagctgtaagaagaaaatggagacaaacagaaggagggaaaaaccaacct

SEQ ID NO: 6548 - DNA, 807 bp, Homo sapiens
  source 1..807: mol_type = unassigned DNA
caggaagattcaggaccatcaggtcgtgataaactgtgccattcctaaagggttgaagtacaatcaagctacacagaccttccaccagtggcgagatgctagacaggtgtatggtctcaactttggcagcaaagaggatgccaatgtcttcgcaagtgccatgatgcatgccttagaagtgttaaattcacaggaaacagggccaacattgcctagacaaaactcacaactacctgctcaagttcaaaatggcccatcccaagaagaattggaaattcaaagaagacaactacaagaacagcaacggcaaaaggagctggagcgggaaaggctggagcgagaaagaatggaaagagaaaggttggagagagagaggttagaaagggaaaggctggagagggagcgactggaacaagaacagctggagagagagagacaagaacgggaacggcaggaacgcctggagcggcaggaacgcctggagcggcaggaacgcctggagcggcaggaacgcctggatcgggagaggcaagaaagacaagaacgagagaggctggagagactggaacgggagaggcaagaaagggagcgacaagagcagttagaaagggaacagctggaatgggagagagagcgcagaatatcaagtgctggtaagaagtttacaaactcttctgtgttcttgtatctgagcttggatgatgtctcttgtgcagtcatgtgttaaaatatttcacatttgagatgtttgggattaagccatacaatttgaaattatgaataaatatgcagcaattactactttaa

SEQ ID NO: 6549 - DNA, 888 bp, Homo sapiens
  source 1..888: mol_type = unassigned DNA
ggaagccagagtcacttcgtaaattaaccttggaagtgacattccatatatatatatatgtattttttttcccatattctgttcagtagagtgaacagagtatctgtcaggcaagagctgctgtgatggtttatgatgatgccaataagaagtgggtgccagctggtggctcaactggattcagcagagttcatatctatcaccatacaggcaacaacacattcagagtggtgggcaggaagattcaggaccatcaggtcgtgataaactgtgccattcctaaagggttgaagtacaatcaagctacacagaccttccaccagtggcgagatgctagacaggtgtatggtctcaactttggcagcaaagaggatgccaatgtcttcgcaagtgccatgatgcatgccttagaagtgttaaattcacaggaaacagggccaacattgcctagacaaaactcacaactacctgctcaagttcaaaatggcccatcccaagaagaattggaaattcaaagaagacaactacaagaacagcaacggcaaaaggagctggagcgggaaaggctggagcgagaaagaatggaaagagaaaggttggagagagagaggttagaaagggaaaggctggagagggagcgactggaacaagaacagctggagagagagagacaagaacgggaacggcaggaacgcctggagcggcaggaacgcctggagcggcaggaacgcctggagcggcaggaacgcctggatcgggagaggcaagaaagacaagaacgagagaggctggagagactggaacgggagaggcaagaaagggagcgacaagagcagttagaaagggaacagctggaatgggagagagagcgcagaatatcaagtgctg

SEQ ID NO: 6550 - DNA, 665 bp, Homo sapiens
  source 1..665: mol_type = unassigned DNA
ggggaagcctctgcgccgccggcaccatgagtgaacagagtatctgtcaggcaagagctgctgtgatggtttatgatgatgccaataagaagtgggtgccagctggtggctcaactggattcagcagagttcatatctatcaccatacaggcaacaacacattcagagtggtgggcaggaagattcaggaccatcaggtcgtgataaactgtgccattcctaaagggttgaagtacaatcaagctacacagaccttccaccagtggcgagatgctagacaggtgtatggtctcaactttggcagcaaagaggatgccaatgtcttcgcaagtgccatgatgcatgccttagaagtgttaaattcacaggaaacagcccagagcaaggttactgctacccaggacagcactaatttgcgatgtattttctgtgggccaacattgcctagacaaaactcacaactacctgctcaagttcaaaatggcccatcccaagaagaattggaaattcaaagaagacaactacaagaacagcaacggcaaaaggagctggagcgggaaaggctggagcgagaaagaatggaaagagaaaggttggagagagagaggttagaaagggaaaggctggagagggagcgactggaacaagaacagctggagagagag

SEQ ID NO: 6551 - DNA, 5520 bp, Homo sapiens
  source 1..5520: mol_type = unassigned DNA
agagtccagccgggggtgccgcacccactggggagtggggagggaggacacataggaaatgcctggggctggagtctctttggctctctgccagcaagaaacttaaacgtcctggcttgctcaacccgagtgtccctaaactgtccagacttttgcccgtccattgccactatctctccccactctgggtgtcctacccaaggcgctgtctatgcgtgcccagggcctgtcctgcggatacccagctcgccccttgcagccctttttagagcatctcgcgggctctggcatcaccaagcgcacagccccgggctgcgctcccctaaggtgggtccctcagatccggggctgtccattaaccaggctggcccaaagaggcgcagacactcgaacccgggaaaacttattttattctcggttcccggggttgcagctgccagcggctgagacagtgcgtccgctttgtctctctgcactccccgcagcccccctctcccgcttcctctcccgattaactcccccgacacgctcttctctagctcctctcctcctcccactccttctcctcctcttcctcctcctacaccacaggccgcgctaatgcgcttcctccctcccccggtgtcggtctctttgcatacgcgccccctcccctccccgccgcgccacttatagcggggcgcacggcggcggggcgcagactgctctggcagccggagaggaggcggtgcggcggtggcgctgcggagacccggtccagacgcctggcggccgccggcacacaaggcgctttctagctccctcccccgagcgcacagcccgcctccttccgcggcgcctgcagtggcaggcttgctctgccctaccgtgacgcgctccggagacgctctgcgggtcctggacaccgggtccgcggcgtggggacgacagacggaggcgaacgccatcggtagccggtccgcgagccatcgttcggggcgcagtcctctccccggctggccctcctttctccggggcattcgccaccgcttccctgggctgagacgaccggttcgtcgcctccttgcccgtgaccgtcgctagaactcagttgtgcgttgcggccagtcgccactgctgagtggaaacaaaatgtcagtcagtgtgcatgagaaccgcaagtccagggccagcagcggctccattaacatctatctgtttcacaagtcctcctacgctgacagcgtcctcactcacctgaatcttttacgccagcagcgtctcttcactgacgtccttctccatgccggaaataggaccttcccttgccaccgggcagtgctggctgcatgcagtcgctactttgaggccatgttcagtggtggcctgaaagagagccaggacagtgaggtcaactttgacaattccatccacccagaagtcttggagctgctgcttgactatgcgtactcctcccgggtcatcatcaatgaagaaaatgcagaatcgctcctggaagctggtgacatgctggagtttcaagacatccgggatgcatgtgcagagttcctggaaaagaacctgcatcccaccaactgcctgggcatgctgctgctgtctgatgcacaccagtgcaccaagctgtacgaactatcttggagaatgtgtctcagcaacttccaaaccatcaggaagaatgaagatttcctccagctgccccaggacatggtagtgcaactcttgtccagtgaagagctggagacagaggatgaaaggcttgtgtacgagtctgcaattaactggatcagctatgacctgaagaagcgctattgctacctcccagaactgttgcagacagtaaggctggcacttctgccagccatctatctcatggagaatgtggccatggaggaactcatcaccaagcagagaaagagtaaggaaattgtggaagaggccatcaggtgcaaactgaaaatcctgcagaatgacggtgtggtaaccagcctctgtgcccgacctcggaaaactggccatgccctcttccttctgggaggacagactttcatgtgtgacaagttgtatctggtagaccagaaggccaaagaaatcattcccaaggctgacattcccagcccaagaaaagagtttagtgcatgtgcgattggctgcaaagtgtacattactggggggcgggggtctgaaaatggggtctcaaaagatgtctgggtttatgataccctgcacgaggagtggtccaaggctgcccccatgctggtggccaggtttggccatggctctgctgaactgaagcactgcctgtatgtggttggggggcacacggccgcaactggctgcctcccggcctccccctcagtctctctaaagcaggtagaacattatgaccccacaatcaacaaatggaccatggtggccccactccgagaaggcgttagcaacgccgcagtagtgagtgccaaacttaagttatttgctttcggaggtaccagtgtcagtcatgacaagctccccaaagttcagtgttacgatcagtgtgaaaacaggtggactgtaccggccacctgtccccagccctggcgttacacagcagcagctgtgctggggaaccagatttttattatggggggtgatacagaattctctgcctgctctgcttataaattcaacagtgagacttaccagtggaccaaggtgggagatgtgacagcaaagcgcatgagctgccatgctgtggcctctggaaacaaactctacgtggttggaggatactttggcattcagcgatgcaagactttggactgctacgatccaacattagacgtgtggaacagcatcaccactgtcccgtactcgctgattcctactgcatttgtcagcacctggaaacatctgccttcttaaatgcagtacattctaaagagagtgagcatgagctcactccatcactcgatgagataatatgagatttctacttcggagaggccaagtctaatgaagagaaaaaaaggaaaagaagttgcaagactcgaataaaatctgctgcaccttgtaaatgctctaactggacatgaaggaaaggggcgagggaggggggtgggatttttggtgcaagtagcacatggtttaaatatgaatgaacaaacctgtgatctagtccttgtcttgtaattgtggattaatgtcaatgttaatcagcccctcaaagggagagaaaagctggaccttttcccttgctgtaccatattcagcatttgatttccatgggccccaccatttatgtgtagaatttgaaatggttgtcacctctctctgaggacagagcttgaagcctccacaccagctgctgctggagattcaaagcccaactgtgggtccgagagggaagctggctgggctggctgaagaatgaagaccactggactctccgttaatctctaaggggtctgctccccaggaacgtttctgaacaatggggactttgttggtagccatttggtagatgttcttttctatttataagtgactttaaactttcccttggctgttaagaagtttgttatagatttagctatttattgttcgatgcctgcatgctgaaacaatgcctacagctgtcttcacatgtatggacgtgtgtgaatggttgtacgttttgcacattttgtggctgttgagatgtgctttgctgcacaaacatgaaaatttttgagttacaatttggagcataactggagggtgggttggggaggggtggatttttaaaatgtcaagacagggaaggatgacaaaatggaaatttaaatgacatcctagaggtagagaaaccgtggagatcgcttttctcagactcaccaacttttaatgggatttcatggggtttggttgtgctgatagggtaaggggaggctgctttctgcccttctccccactcccatctgatttacttaattcagtctcagctgctgaaatttggaaaggaccaaattgctttacagtttttttctttgtgtagtatcttgaaatcctggaaaattctatggaatagttctgtatatagggcacaagtaaaggcattgtccaaagtttatttatttatttattaccctaagaatgctttgccataaccacatttaatgggaaaaacggcagtatcacagatgtaaattaactcaccagatttactgggcctgaactcattctcttcttgctatatgatttagcaagttctagaaggtctccaagacaataattacattggcacaatgtatacttcagtgctcacccgtaggcaaatctctttttaaaaaactctttggtgcacaagtaacacatttggccacaaaacaccaaagaattgtaggcagtggcccctattgagaagttttccggtagagttggaaatcagttgtgaatacattctttgctagttggagtgcttgtttactaagcatgtgccgtcgtaggtattagtgctagtctcagataggtgcttcccctgaggtgcaggggaagaccaaagtttgcaactcgaactgctttcgtccatgtttctcacattgctgtattttagaaaataggggttaagactgataacaaccttttacattgtgactgtgtttgcattgtctaatgacagataaatccttaacatttctctccaccttagtactttagactaattgtgtttgtccgtccatgccatgaatgagtgggctgtagttgggcctaaataaatgagctgttggaagaaaagaatcacagtactttccagcagtcagtccctggttcctagatgtgttctaagcaatgcaaatgtctaattgtcccccagtgggcatagtcagtgtcgtttatattgtagcagttacagctctgtagtttatgatgcaaatctgccaagagagatgtatgtgtcactgcatggcttctgaaagcaggatgaattttctgcagctgtttcaaagttggggtctgttcttgaatcctctattaattactgtgtgtgagccagagggagctgtggtaagggttgggcccccagcctgtagggaactttctggactcccactctttgaatcgatataggcatttggtctcactacttgaccattctcaccctgtgaaacgtcccacactttgaagcaaatacaattcacagcacagtacacacaaaaaccttggcataagacagagaaggttcttcttattttgtgggctggttgctgtagaaacacataacaaagggcagccctccacttctggtataattgtgtagccccttttctttgggcttgacacctgtcttgaataagagtgattagagctgcataatgtccctctcttggctattgaccatgtggttcacgtacaaaactctgtataagttgaaggaaaatgttcatgttcatatgtacttgtttgctatgactacattttgaggttttgtaaaactgttatttttttttttttcacaatgtgaaactgaaggtcaataaattattagagattttctcttcatta

SEQ ID NO: 6552 - DNA, 5381 bp, Homo sapiens
  source 1..5381: mol_type = unassigned DNA
agagtccagccgggggtgccgcacccactggggagtggggagggaggacacataggaaatgcctggggctggagtctctttggctctctgccagcaagaaacttaaacgtcctggcttgctcaacccgagtgtccctaaactgtccagacttttgcccgtccattgccactatctctccccactctgggtgtcctacccaaggcgctgtctatgcgtgcccagggcctgtcctgcggatacccagctcgccccttgcagccctttttagagcatctcgcgggctctggcatcaccaagcgcacagccccgggctgcgctcccctaaggtgggtccctcagatccggggctgtccattaaccaggctggcccaaagaggcgcagacactcgaacccgggaaaacttattttattctcggttcccggggttgcagctgccagcggctgagacagtgcgtccgctttgtctctctgcactccccgcagcccccctctcccgcttcctctcccgattaactcccccgacacgctcttctctagctcctctcctcctcccactccttctcctcctcttcctcctcctacaccacaggccgcgctaatgcgcttcctccctcccccggtgtcggtctctttgcatacgcgccccctcccctccccgccgcgccacttatagcggggcgcacggcggcggggcgcagactgctctggcagccggagaggaggcggtgcggcggtggcgctgcggagacccggtccagacgcctggcggccgccggcacacaaggcgctttctagctccctcccccgagcgcacagcccgcctccttccgcggcgcctgcagtggcaggcttgctctgccctaccgtgacgcgctccggagacgctctgcgggtcctggacaccgggtccgcggcgtggggacgacagacggaggcgaacgccatcggtagccggtccgcgagccatcgttcggggcgcagtcctctccccggctggccctcctttctccggggcattcgccaccgcttccctgggctgagacgaccggttcgtcgcctccttgcccgtgaccgtcgctagaactcagttgtgcgttgcggccagtcgccactgctcagcgtctcttcactgacgtccttctccatgccggaaataggaccttcccttgccaccgggcagtgctggctgcatgcagtcgctactttgaggccatgttcagtggtggcctgaaagagagccaggacagtgaggtcaactttgacaattccatccacccagaagtcttggagctgctgcttgactatgcgtactcctcccgggtcatcatcaatgaagaaaatgcagaatcgctcctggaagctggtgacatgctggagtttcaagacatccgggatgcatgtgcagagttcctggaaaagaacctgcatcccaccaactgcctgggcatgctgctgctgtctgatgcacaccagtgcaccaagctgtacgaactatcttggagaatgtgtctcagcaacttccaaaccatcaggaagaatgaagatttcctccagctgccccaggacatggtagtgcaactcttgtccagtgaagagctggagacagaggatgaaaggcttgtgtacgagtctgcaattaactggatcagctatgacctgaagaagcgctattgctacctcccagaactgttgcagacagtaaggctggcacttctgccagccatctatctcatggagaatgtggccatggaggaactcatcaccaagcagagaaagagtaaggaaattgtggaagaggccatcaggtgcaaactgaaaatcctgcagaatgacggtgtggtaaccagcctctgtgcccgacctcggaaaactggccatgccctcttccttctgggaggacagactttcatgtgtgacaagttgtatctggtagaccagaaggccaaagaaatcattcccaaggctgacattcccagcccaagaaaagagtttagtgcatgtgcgattggctgcaaagtgtacattactggggggcgggggtctgaaaatggggtctcaaaagatgtctgggtttatgataccctgcacgaggagtggtccaaggctgcccccatgctggtggccaggtttggccatggctctgctgaactgaagcactgcctgtatgtggttggggggcacacggccgcaactggctgcctcccggcctccccctcagtctctctaaagcaggtagaacattatgaccccacaatcaacaaatggaccatggtggccccactccgagaaggcgttagcaacgccgcagtagtgagtgccaaacttaagttatttgctttcggaggtaccagtgtcagtcatgacaagctccccaaagttcagtgttacgatcagtgtgaaaacaggtggactgtaccggccacctgtccccagccctggcgttacacagcagcagctgtgctggggaaccagatttttattatggggggtgatacagaattctctgcctgctctgcttataaattcaacagtgagacttaccagtggaccaaggtgggagatgtgacagcaaagcgcatgagctgccatgctgtggcctctggaaacaaactctacgtggttggaggatactttggcattcagcgatgcaagactttggactgctacgatccaacattagacgtgtggaacagcatcaccactgtcccgtactcgctgattcctactgcatttgtcagcacctggaaacatctgccttcttaaatgcagtacattctaaagagagtgagcatgagctcactccatcactcgatgagataatatgagatttctacttcggagaggccaagtctaatgaagagaaaaaaaggaaaagaagttgcaagactcgaataaaatctgctgcaccttgtaaatgctctaactggacatgaaggaaaggggcgagggaggggggtgggatttttggtgcaagtagcacatggtttaaatatgaatgaacaaacctgtgatctagtccttgtcttgtaattgtggattaatgtcaatgttaatcagcccctcaaagggagagaaaagctggaccttttcccttgctgtaccatattcagcatttgatttccatgggccccaccatttatgtgtagaatttgaaatggttgtcacctctctctgaggacagagcttgaagcctccacaccagctgctgctggagattcaaagcccaactgtgggtccgagagggaagctggctgggctggctgaagaatgaagaccactggactctccgttaatctctaaggggtctgctccccaggaacgtttctgaacaatggggactttgttggtagccatttggtagatgttcttttctatttataagtgactttaaactttcccttggctgttaagaagtttgttatagatttagctatttattgttcgatgcctgcatgctgaaacaatgcctacagctgtcttcacatgtatggacgtgtgtgaatggttgtacgttttgcacattttgtggctgttgagatgtgctttgctgcacaaacatgaaaatttttgagttacaatttggagcataactggagggtgggttggggaggggtggatttttaaaatgtcaagacagggaaggatgacaaaatggaaatttaaatgacatcctagaggtagagaaaccgtggagatcgcttttctcagactcaccaacttttaatgggatttcatggggtttggttgtgctgatagggtaaggggaggctgctttctgcccttctccccactcccatctgatttacttaattcagtctcagctgctgaaatttggaaaggaccaaattgctttacagtttttttctttgtgtagtatcttgaaatcctggaaaattctatggaatagttctgtatatagggcacaagtaaaggcattgtccaaagtttatttatttatttattaccctaagaatgctttgccataaccacatttaatgggaaaaacggcagtatcacagatgtaaattaactcaccagatttactgggcctgaactcattctcttcttgctatatgatttagcaagttctagaaggtctccaagacaataattacattggcacaatgtatacttcagtgctcacccgtaggcaaatctctttttaaaaaactctttggtgcacaagtaacacatttggccacaaaacaccaaagaattgtaggcagtggcccctattgagaagttttccggtagagttggaaatcagttgtgaatacattctttgctagttggagtgcttgtttactaagcatgtgccgtcgtaggtattagtgctagtctcagataggtgcttcccctgaggtgcaggggaagaccaaagtttgcaactcgaactgctttcgtccatgtttctcacattgctgtattttagaaaataggggttaagactgataacaaccttttacattgtgactgtgtttgcattgtctaatgacagataaatccttaacatttctctccaccttagtactttagactaattgtgtttgtccgtccatgccatgaatgagtgggctgtagttgggcctaaataaatgagctgttggaagaaaagaatcacagtactttccagcagtcagtccctggttcctagatgtgttctaagcaatgcaaatgtctaattgtcccccagtgggcatagtcagtgtcgtttatattgtagcagttacagctctgtagtttatgatgcaaatctgccaagagagatgtatgtgtcactgcatggcttctgaaagcaggatgaattttctgcagctgtttcaaagttggggtctgttcttgaatcctctattaattactgtgtgtgagccagagggagctgtggtaagggttgggcccccagcctgtagggaactttctggactcccactctttgaatcgatataggcatttggtctcactacttgaccattctcaccctgtgaaacgtcccacactttgaagcaaatacaattcacagcacagtacacacaaaaaccttggcataagacagagaaggttcttcttattttgtgggctggttgctgtagaaacacataacaaagggcagccctccacttctggtataattgtgtagccccttttctttgggcttgacacctgtcttgaataagagtgattagagctgcataatgtccctctcttggctattgaccatgtggttcacgtacaaaactctgtataagttgaaggaaaatgttcatgttcatatgtacttgtttgctatgactacattttgaggttttgtaaaactgttatttttttttttttcacaatgtgaaactgaaggtcaataaattattagagattttctcttca

SEQ ID NO: 6553 - DNA, 571 bp, Homo sapiens
  source 1..571: mol_type = unassigned DNA
aacagcacacttagttgggtgttagtccagaactgactatatttgcacagaagagccataaaaattgctaccagggtggtggtacataaaaaatgacaatgggcaggctggctggaatccttggaacaagctcactccatcactcgatgagataatatgagatttctacttcggagaggccaagtctaatgaagagaaaaaaaggaaaagaagttgcaagactcgaataaaatctgctgcaccttgtaaatgctctaactggacatgaaggaaaggggcgagggaggggggtgggatttttggtgcaagtagcacatggtttaaatatgaatgaacaaacctgtgatctagtccttgtcttgtaattgtggattaatgtcaatgttaatcagcccctcaaagggagagaaaagctggaccttttcccttgctgtaccatattcagcatttgatttccatgggccccaccatttatgtgtagaatttgaaatggttgtcacctctctctgaggacagagcttgaagcctccacaccagctgctgctggagattcaaagcccaactgtgggtc

SEQ ID NO: 6554 - DNA, 1405 bp, Homo sapiens
  source 1..1405: mol_type = unassigned DNA
agagtccagccgggggtgccgcacccactggggagtggggagggaggacacataggaaatgcctggggctggagtctctttggctctctgccagcaagaaacttaaacgtcctggcttgctcaacccgagtgtccctaaactgtccagacttttgcccgtccattgccactatctctccccactctgggtgtcctacccaaggcgctgtctatgcgtgcccagggcctgtcctgcggatacccagctcgccccttgcagccctttttagagcatctcgcgggctctggcatcaccaagcgcacagccccgggctgcgctcccctaaggtgggtccctcagatccggggctgtccattaaccaggctggcccaaagaggcgcagacactcgaacccgggaaaacttattttattctcggttcccggggttgcagctgccagcggctgagacagtgcgtccgctttgtctctctgcactccccgcagcccccctctcccgcttcctctcccgattaactcccccgacacgctcttctctagctcctctcctcctcccactccttctcctcctcttcctcctcctacaccacaggccgcgctaatgcgcttcctccctcccccggtgtcggtctctttgcatacgcgccccctcccctccccgccgcgccacttatagcggggcgcacggcggcggggcgcagactgctctggcagccggagaggaggcggtgcggcggtggcgctgcggagacccggtccagacgcctggcggccgccggcacacaaggcgctttctagctccctcccccgagcgcacagcccgcctccttccgcggcgcctgcagtggcaggcttgctctgccctaccgtgacgcgctccggagacgctctgcgggtcctggacaccgggtccgcggcgtggggacgacagacggaggcgaacgccatcggtagccggtccgcgagccatcgttcggggcgcagtcctctccccggctggccctcctttctccggggcattcgccaccgcttccctgggctgagacgaccggttcgtcgcctccttgcccgtgaccgtcgctagaactcagttgtgcgttgcggccagtcgccactgctctggttttccaagaattgatataaagcgggaagaacagaaaacagcagtcataagtatgctactcaaaatattcttctttttatgtgccaaatcctcacattggaagctgtcccgagcaagacaggagtggaaacaaaatgtcagtcagtgtgcatgagaaccgcaagtccagggccagcagcggctccattaacatctatctgtttcacaagtcctcctacgctgacagcgtcctcactcacctgaatcttttacgccagcagcgtctcttcactgacgtccttct

SEQ ID NO: 6555 - DNA, 584 bp, Homo sapiens
  source 1..584: mol_type = unassigned DNA
gcagactgctctggcagccggagaggaggcggtgcggcggtggcgctgcggagacccggtccagacgcctggcggccgccggcacacaaggcgctttctagctccctcccccgagcgcacagcccgcctccttccgcggcgcctgcagtggcaggcttgctctgccctaccgtgacgcgctccggagacgctctgcgggtcctggacaccgggtccgcggcgtggggacgacagacggaggcgaacgccatcggtagccggtccgcgagccatcgttcggggcgcagtcctctccccggctggccctcctttctccggggcattcgccaccgcttccctgggctgagacgaccggttcgtcgcctccttgcccgtgaccgtcgctagaactcagttgtgcgttgcggccagtcgccactgctgtgtcagcatttgcaggtatacaggaacagtcctagtgatgcactatttaatcaaaagacggatggatcttttgttcttgcagctggttttccaagaattgatataaagcgggaagaacagaaaacagcagtcataagagtggaaacaaaatgtcagtcagt

SEQ ID NO: 6556 - DNA, 2024 bp, Homo sapiens
  source 1..2024: mol_type = unassigned DNA
cggcacacaaggcgctttctagctggccctcctttctccggggcattcgccaccgcttccctgggctgagacgaccggttcgtcgcctccttgcccgtgaccgtcgctagaactcagttgtgcgttgcggccagtcgccactgctgagtggaaacaaaatgtcagtcagtgtgcatgagaaccgcaagtccagggccagcagcggctccattaacatctatctgtttcacaagtcctcctacgctgacagcgtcctcactcacctgaatcttttacgccagcagcgtctcttcactgacgtccttctccatgccggaaataggaccttcccttgccaccgggcagtgctggctgcatgcagtcgctactttgaggccatgttcagtggtggcctgaaagagagccaggacagtgaggtcaactttgacaattccatccacccagaagtcttggagctgctgcttgactatgcgtactcctcccgggtcatcatcaatgaagaaaatgcagaatcgctcctggaagctggtgacatgctggagtttcaagacatccgggatgcatgtgcagagttcctggaaaagaacctgcatcccaccaactgcctgggcatgctgctgctgtctgatgcacaccagtgcaccaagctgtacgaactatcttggagaatgtgtctcagcaacttccaaaccatcaggaagaatgaagatttcctccagctgccccaggacatggtagtgcaactcttgtccagtgaagagctggagacagaggatgaaaggcttgtgtacgagtctgcaattaactggatcagctatgacctgaagaagcgctattgctacctcccagaactgttgcagacagtaaggctggcacttctgccagccatctatctcatggagaatgtggccatggaggaactcatcaccaagcagagaaagagtaaggaaattgtggaagaggccatcaggtgcaaactgaaaatcctgcagaatgacggtgtggtaaccagcctctgtgcccgacctcggaaaactggccatgccctcttccttctgggaggacagactttcatgtgtgacaagttgtatctggtagaccagaaggccaaagaaatcattcccaaggctgacattcccagcccaagaaaagagtttagtgcatgtgcgattggctgcaaagtgtacattactggggggcgggggtctgaaaatggggtctcaaaagatgtctgggtttatgataccctgcacgaggagtggtccaaggctgcccccatgctggtggccaggtttggccatggctctgctgaactgaagcactgcctgtatgtggttggggggcacacggccgcaactggctgcctcccggcctccccctcagtctctctaaagcaggtagaacattatgaccccacaatcaacaaatggaccatggtggccccactccgagaaggcgttagcaacgccgcagtagtgagtgccaaacttaagttatttgctttcggaggtaccagtgtcagtcatgacaagctccccaaagttcagtgttacgatcagtgtgaaaacaggtggactgtaccggccacctgtccccagccctggcgttacacagcagcagctgtgctggggaaccagatttttattatggggggtgatacagaattctctgcctgctctgcttataaattcaacagtgagacttaccagtggaccaaggtgggagatgtgacagcaaagcgcatgagctgccatgctgtggcctctggaaacaaactctacgtggttggaggatactttggcattcagcgatgcaagactttggactgctacgatccaacattagacgtgtggaacagcatcaccactgtcccgtactcgctgattcctactgcatttgtcagcacctggaaacatctgccttcttaaatgcagtacattctaaagagagtgagcatgagctcactccatcactcgatgagataatatgagatttctacttcggagaggccaagtctaatgaag

SEQ ID NO: 6557 - DNA, 5657 bp, Homo sapiens
  source 1..5657: mol_type = unassigned DNA
agagtccagccgggggtgccgcacccactggggagtggggagggaggacacataggaaatgcctggggctggagtctctttggctctctgccagcaagaaacttaaacgtcctggcttgctcaacccgagtgtccctaaactgtccagacttttgcccgtccattgccactatctctccccactctgggtgtcctacccaaggcgctgtctatgcgtgcccagggcctgtcctgcggatacccagctcgccccttgcagccctttttagagcatctcgcgggctctggcatcaccaagcgcacagccccgggctgcgctcccctaaggtgggtccctcagatccggggctgtccattaaccaggctggcccaaagaggcgcagacactcgaacccgggaaaacttattttattctcggttcccggggttgcagctgccagcggctgagacagtgcgtccgctttgtctctctgcactccccgcagcccccctctcccgcttcctctcccgattaactcccccgacacgctcttctctagctcctctcctcctcccactccttctcctcctcttcctcctcctacaccacaggccgcgctaatgcgcttcctccctcccccggtgtcggtctctttgcatacgcgccccctcccctccccgccgcgccacttatagcggggcgcacggcggcggggcgcagactgctctggcagccggagaggaggcggtgcggcggtggcgctgcggagacccggtccagacgcctggcggccgccggcacacaaggcgctttctagctccctcccccgagcgcacagcccgcctccttccgcggcgcctgcagtggcaggcttgctctgccctaccgtgacgcgctccggagacgctctgcgggtcctggacaccgggtccgcggcgtggggacgacagacggaggcgaacgccatcggtagccggtccgcgagccatcgttcggggcgcagtcctctccccggctggccctcctttctccggggcattcgccaccgcttccctgggctgagacgaccggttcgtcgcctccttgcccgtgaccgtcgctagaactcagttgtgcgttgcggccagtcgccactgctgtgtcagcatttgcaggtatacaggaacagtcctagtgatgcactatttaatcaaaagacggatggatcttttgttcttgcagctggttttccaagaattgatataaagcgggaagaacagaaaacagcagtcataagagtggaaacaaaatgtcagtcagtgtgcatgagaaccgcaagtccagggccagcagcggctccattaacatctatctgtttcacaagtcctcctacgctgacagcgtcctcactcacctgaatcttttacgccagcagcgtctcttcactgacgtccttctccatgccggaaataggaccttcccttgccaccgggcagtgctggctgcatgcagtcgctactttgaggccatgttcagtggtggcctgaaagagagccaggacagtgaggtcaactttgacaattccatccacccagaagtcttggagctgctgcttgactatgcgtactcctcccgggtcatcatcaatgaagaaaatgcagaatcgctcctggaagctggtgacatgctggagtttcaagacatccgggatgcatgtgcagagttcctggaaaagaacctgcatcccaccaactgcctgggcatgctgctgctgtctgatgcacaccagtgcaccaagctgtacgaactatcttggagaatgtgtctcagcaacttccaaaccatcaggaagaatgaagatttcctccagctgccccaggacatggtagtgcaactcttgtccagtgaagagctggagacagaggatgaaaggcttgtgtacgagtctgcaattaactggatcagctatgacctgaagaagcgctattgctacctcccagaactgttgcagacagtaaggctggcacttctgccagccatctatctcatggagaatgtggccatggaggaactcatcaccaagcagagaaagagtaaggaaattgtggaagaggccatcaggtgcaaactgaaaatcctgcagaatgacggtgtggtaaccagcctctgtgcccgacctcggaaaactggccatgccctcttccttctgggaggacagactttcatgtgtgacaagttgtatctggtagaccagaaggccaaagaaatcattcccaaggctgacattcccagcccaagaaaagagtttagtgcatgtgcgattggctgcaaagtgtacattactggggggcgggggtctgaaaatggggtctcaaaagatgtctgggtttatgataccctgcacgaggagtggtccaaggctgcccccatgctggtggccaggtttggccatggctctgctgaactgaagcactgcctgtatgtggttggggggcacacggccgcaactggctgcctcccggcctccccctcagtctctctaaagcaggtagaacattatgaccccacaatcaacaaatggaccatggtggccccactccgagaaggcgttagcaacgccgcagtagtgagtgccaaacttaagttatttgctttcggaggtaccagtgtcagtcatgacaagctccccaaagttcagtgttacgatcagtgtgaaaacaggtggactgtaccggccacctgtccccagccctggcgttacacagcagcagctgtgctggggaaccagatttttattatggggggtgatacagaattctctgcctgctctgcttataaattcaacagtgagacttaccagtggaccaaggtgggagatgtgacagcaaagcgcatgagctgccatgctgtggcctctggaaacaaactctacgtggttggaggatactttggcattcagcgatgcaagactttggactgctacgatccaacattagacgtgtggaacagcatcaccactgtcccgtactcgctgattcctactgcatttgtcagcacctggaaacatctgccttcttaaatgcagtacattctaaagagagtgagcatgagctcactccatcactcgatgagataatatgagatttctacttcggagaggccaagtctaatgaagagaaaaaaaggaaaagaagttgcaagactcgaataaaatctgctgcaccttgtaaatgctctaactggacatgaaggaaaggggcgagggaggggggtgggatttttggtgcaagtagcacatggtttaaatatgaatgaacaaacctgtgatctagtccttgtcttgtaattgtggattaatgtcaatgttaatcagcccctcaaagggagagaaaagctggaccttttcccttgctgtaccatattcagcatttgatttccatgggccccaccatttatgtgtagaatttgaaatggttgtcacctctctctgaggacagagcttgaagcctccacaccagctgctgctggagattcaaagcccaactgtgggtccgagagggaagctggctgggctggctgaagaatgaagaccactggactctccgttaatctctaaggggtctgctccccaggaacgtttctgaacaatggggactttgttggtagccatttggtagatgttcttttctatttataagtgactttaaactttcccttggctgttaagaagtttgttatagatttagctatttattgttcgatgcctgcatgctgaaacaatgcctacagctgtcttcacatgtatggacgtgtgtgaatggttgtacgttttgcacattttgtggctgttgagatgtgctttgctgcacaaacatgaaaatttttgagttacaatttggagcataactggagggtgggttggggaggggtggatttttaaaatgtcaagacagggaaggatgacaaaatggaaatttaaatgacatcctagaggtagagaaaccgtggagatcgcttttctcagactcaccaacttttaatgggatttcatggggtttggttgtgctgatagggtaaggggaggctgctttctgcccttctccccactcccatctgatttacttaattcagtctcagctgctgaaatttggaaaggaccaaattgctttacagtttttttctttgtgtagtatcttgaaatcctggaaaattctatggaatagttctgtatatagggcacaagtaaaggcattgtccaaagtttatttatttatttattaccctaagaatgctttgccataaccacatttaatgggaaaaacggcagtatcacagatgtaaattaactcaccagatttactgggcctgaactcattctcttcttgctatatgatttagcaagttctagaaggtctccaagacaataattacattggcacaatgtatacttcagtgctcacccgtaggcaaatctctttttaaaaaactctttggtgcacaagtaacacatttggccacaaaacaccaaagaattgtaggcagtggcccctattgagaagttttccggtagagttggaaatcagttgtgaatacattctttgctagttggagtgcttgtttactaagcatgtgccgtcgtaggtattagtgctagtctcagataggtgcttcccctgaggtgcaggggaagaccaaagtttgcaactcgaactgctttcgtccatgtttctcacattgctgtattttagaaaataggggttaagactgataacaaccttttacattgtgactgtgtttgcattgtctaatgacagataaatccttaacatttctctccaccttagtactttagactaattgtgtttgtccgtccatgccatgaatgagtgggctgtagttgggcctaaataaatgagctgttggaagaaaagaatcacagtactttccagcagtcagtccctggttcctagatgtgttctaagcaatgcaaatgtctaattgtcccccagtgggcatagtcagtgtcgtttatattgtagcagttacagctctgtagtttatgatgcaaatctgccaagagagatgtatgtgtcactgcatggcttctgaaagcaggatgaattttctgcagctgtttcaaagttggggtctgttcttgaatcctctattaattactgtgtgtgagccagagggagctgtggtaagggttgggcccccagcctgtagggaactttctggactcccactctttgaatcgatataggcatttggtctcactacttgaccattctcaccctgtgaaacgtcccacactttgaagcaaatacaattcacagcacagtacacacaaaaaccttggcataagacagagaaggttcttcttattttgtgggctggttgctgtagaaacacataacaaagggcagccctccacttctggtataattgtgtagccccttttctttgggcttgacacctgtcttgaataagagtgattagagctgcataatgtccctctcttggctattgaccatgtggttcacgtacaaaactctgtataagttgaaggaaaatgttcatgttcatatgtacttgtttgctatgactacattttgaggttttgtaaaactgttatttttttttttttcacaatgtgaaactgaaggtcaataaattattagagattttctcttcatta

SEQ ID NO: 6558 - DNA, 2982 bp, Homo sapiens
  source 1..2982: mol_type = unassigned DNA
gcagatccccgctctcccgggcgccgctactcacacaggcttccagccgccacggggcgtcctctgtctgctgcagcggcggcggcagcagagggaacggcgactgcagcccggccgcgtctcccagctccgtgcccgggacagagtccgggagaagcaaaggaggaggaggacgccgaggctaggaggagccgcgccgcgcccggcgccccactccgcgcagcgggttgcctccgctccccatacggcggccccaggtcctttgctgccagcatgatgtcgtatttataatatgtggaggagagagagctcaccatgctcaggtaaagggatggtatgtgcaccacaaataacaagcagaagcctctgatatgtcagaaccatgctgtcttccatgagacttcctttgtgaagagcatccatttaaaagacttttatgaatacatggtttcaatcaagtccccagagaacacatttgtcttctgagctgctggcagttttgagaatctgatgacctccgaggggaccctgcactcagccatcaaagtgttcctgcccctctggacactcataattcaatggtagatgcaggtggagttgagaacatcacccagcttccccaggagcttcctcagatgatggctgcagcagccgatggtttggggagtatagcgatagacacgacccagctcaacatgtccgtgacagatcccacagcctgggctacagccatgaataacctgggcatggttcccgtagggttgcctggacagcagctcgtgtctgactcaatctgtgtcccaggctttgatccaagcctcaacatgatgactggaatcacccccattaacccaatgataccaggccttggactggtacctcccccaccaccaacagaagtggctgttgtcaaagaaataatccactgcaaaagctgtactctttttcctcaaaatccaaatcttccacctccttccacaagagaacgacctcctgggtgtaagaccgtgtttgtcggaggattaccagaaaatgctactgaggaaattattcaagaagtctttgaacagtgcggtgatattacagcaattcggaaaagcaagaagaatttttgtcacattcgctttgcagaggaattcatggttgataaagccatttacctttctggttataggatgcgattagggtctagcaccgacaaaaaggattcaggccgccttcatgtggactttgcccaggccagggatgacttctatgagtgggaatgcaagcagaggatgcgtgcccgggaggagcggcaccggcgcaagctggaggaggaccggctcaggcccccatccccgcctgccataatgcactactcggagcacgaagccgctctgctggctgaaaagctgaaagatgatagcaagttttcagaggctatcacagtgctgctttcctggattgaacgaggggaagtgaatcggcgctctgcaaaccagttctattccatggtgcagtcggccaacagccacgtccgccggctaatgaatgaaaaagccacccatgagcaagagatggaggaagccaaggagaattttaaaaatgccttaactgggattctcactcaatttgagcagattgtggccgttttcaacgcttctaccagacaaaaagcttgggaccatttctcgaaagcccagcgcaagaacatagacatttggcgaaagcattctgaggagctccggaatgctcaaagtgagcagctcatgggcatccgccgcgaagaagaaatggaaatgtctgatgatgagaactgtgacagccctacaaagaaaatgagagtcgatgaatcagccctggctgcccaggcctacgctctgaaagaggagaatgacagtctccgctggcagctggatgcctacaggaatgaggtggagctgctgaaacaagaaaaagaacagcttttccgaacagaagaaaacctcaccaaggaccagcaactgcagtttctgcagcaaaccatgcaaggcatgcagcagcaattgctaaccatccaggaggagttaaacaacaaaaagtcagaattggaacaagcaaaggaagagcagtcccatacacaagcgttactaaaagtcctgcaggaacaattaaaaggtaccaaggaattggtcgagaccaatggccacagccatgaggattcaaatgaaatcaatgtgttgacagttgcattagtcaaccaagaccgagagaacaatattgagaaaagaagccaaggcttaaaatcagagaaagaagctctgctaataggtatcatatcaacgtttcttcacgtccatccttttggagccaacatagaatatctttggtcatacatgcagcagctggactccaagatatctgcaaatgaaatagaaatgcttttgatgaggctgccacgcatgttcaaacaggaattcacgggtgtgggagccacgctggaaaaaagatggaagctgtgtgcctttgaaggaattaaaactacctaactgcgaagagcaaagcatctctggaaatgaaaccatgtgaacctggccagggcggtgcgacggggaagcaggaggtgtggggttggtccagcacgcaacctttgtggagccatcgaagcctgcctttagttatatctgtggcgttctcttgtaagtggaaatgtaattgtgtaccagtttcttaaaataaacaaagcttcatactgtgacagatctgtttcctatgaaaaccaaacaatgattccacagtcataatgatggcaaaatcttaaaatgtgctacatttgagaatagctcaccaagcaaaatatttaaagttaatgatggtgtagcaatgattgttgctaggctacagagttgtatatgtaatgtatagctgaaatcattaaatgacattttcctgaaagtctttctgttttagtaaaaaaaaaaaaaaaaaaaaaaagaaaaagaaaaagaaaaaaagaaaaaa

SEQ ID NO: 6559 - DNA, 413 bp, Homo sapiens
  source 1..413: mol_type = unassigned DNA
tggtacctcccccaccaccaacagaagtggctgttgtcaaagaaataatccactgcaaaagctgtactctttttcctcaaaatccaaatcttccacctccttccacaagagaacgacctcctgggtgtaagaccgtgtttgtcggaggattaccagaaaatgctactgaggaaattattcaagaagtctttgaacagtgcggtgatattacagcaattcggaaaagcaagaagaatttttgtcacattcgctttgcagaggaattcatggttgataaagccatttacctttctggtactttgcattacataaggagttttctaggcattttgttatgttttgtgatgttaatatgagcttattccctttggccttcatgcaaaataaagtcttcatagtttggggctggaaaa

SEQ ID NO: 6560 - DNA, 732 bp, Homo sapiens
  source 1..732: mol_type = unassigned DNA
ccggagcggccggggccacgatggagcgcgacggctgcgcggggggcgggagccgcggcggcgagggcgggcgcgctccccgggagggcccggcggggaacggccgcgatcggggccgcagccacgctgccgaggcgcccggggacccgcaggcggccgcgtccttgctggcccctatggacgtgggggaggagccgctggagaaggcggcgcgcgcccgcactgccaaggaccccaacacctataaagtactctcgctggtattgtcagtatgtgtgttaacaacaatacttggttgtatatttgggttgaaaccaagctgtgccaaagaagttaaaagttgcaaaggtcgctgtttcgagagaacatttgggaactgtcgctgtgatgctgcctgtgttgagcttggaaactgctgtttagattaccaggagacgtgcatagaaccagaacatatatggacttgcaacaaattcaggtgtggtgagaaaaggttgaccagaagcctctgtgcctgttcagatgactgcaaggacaagggcgactgctgcatcaactacagttctgtgtgtcaaggtcaggtgctcgttgggctctgcagcagcctggtatcttccagcgtcttagcggggctttacataggtgttatcttttatattaggagtcatggctattggccaactatattagctgaaaaaaataattttaaaactttttattaaagaaactttt

SEQ ID NO: 6561 - DNA, 7442 bp, Homo sapiens
  source 1..7442: mol_type = unassigned DNA
ccggagcggccggggccacgatggagcgcgacggctgcgcggggggcgggagccgcggcggcgagggcgggcgcgctccccgggagggcccggcggggaacggccgcgatcggggccgcagccacgctgccgaggcgcccggggacccgcaggcggccgcgtccttgctggcccctatggacgtgggggaggagccgctggagaaggcggcgcgcgcccgcactgccaaggaccccaacacctataaagtactctcgctggtattgtcagtatgtgtgttaacaacaatacttggttgtatatttgggttgaaaccaagctgtgccaaagaagttaaaagttgcaaaggtcgctgtttcgagagaacatttgggaactgtcgctgtgatgctgcctgtgttgagcttggaaactgctgtttagattaccaggagacgtgcatagaaccagaacatatatggacttgcaacaaattcaggtgtggtgagaaaaggttgaccagaagcctctgtgcctgttcagatgactgcaaggacaagggcgactgctgcatcaactacagttctgtgtgtcaaggtgagaaaagttgggtagaagaaccatgtgagagcattaatgagccacagtgcccagcagggtttgaaacgcctcctaccctcttattttctttggatggattcagggcagaatatttacacacttggggtggacttcttcctgttattagcaaactaaaaaaatgtggaacatatactaaaaacatgagaccggtatatccaacaaaaactttccccaatcactacagcattgtcaccggattgtatccagaatctcatggcataatcgacaataaaatgtatgatcccaaaatgaatgcttccttttcacttaaaagtaaagagaaatttaatcctgagtggtacaaaggagaaccaatttgggtcacagctaagtatcaaggcctcaagtctggcacatttttctggccaggatcagatgtggaaattaacggaattttcccagacatctataaaatgtataatggttcagtaccatttgaagaaaggattttagctgttcttcagtggctacagcttcctaaagatgaaagaccacacttttacactctgtatttagaagaaccagattcttcaggtcattcatatggaccagtcagcagtgaagtcatcaaagccttgcagagggttgatggtatggttggtatgctgatggatggtctgaaagagctgaacttgcacagatgcctgaacctcatccttatttcagatcatggcatggaacaaggcagttgtaagaaatacatatatctgaataaatatttgggggatgttaaaaatattaaagttatctatggacctgcagctcgattgagaccctctgatgtcccagataaatactattcatttaactatgaaggcattgcccgaaatctttcttgccgggaaccaaaccagcacttcaaaccttacctgaaacatttcttacctaagcgtttgcactttgctaagagtgatagaattgagcccttgacattctatttggaccctcagtggcaacttgcattgaatccctcagaaaggaaatattgtggaagtggatttcatggctctgacaatgtattttcaaatatgcaagccctctttgttggctatggacctggattcaagcatggcattgaggctgacacctttgaaaacattgaagtctataacttaatgtgtgatttactgaatttgacaccggctcctaataacggaactcatggaagtcttaaccaccttctaaagaatcctgtttatacgccaaagcatcccaaagaagtgcaccccctggtacagtgccccttcacaagaaaccccagagataaccttggctgctcatgtaacccttcgattttgccgattgaggattttcaaacacagttcaatctgactgtggcagaagagaagattattaagcatgaaactttaccctatggaagacctagagttctccagaaggaaaacaccatctgtcttctttcccagcaccagtttatgagtggatacagccaagacatcttaatgcccctttggacatcctataccgtggacagaaatgacagtttctctacggaagacttctccaactgtctgtaccaggactttagaattcctcttagtcctgtccataaatgttcattttataaaaataacaccaaagtgagttacgggttcctctccccaccacaactaaataaaaattcaagtggaatatattctgaagctttgcttactacaaatatagtgccaatgtaccagagttttcaagttatatggcgctactttcatgacaccctactgcgaaagtatgctgaagaaagaaatggtgtcaatgtcgtcagtggtcctgtgtttgactttgattatgatggacgttgtgattccttagagaatctgaggcaaaaaagaagagtcatccgtaaccaagaaattttgattccaactcacttctttattgtgctaacaagctgtaaagatacatctcagacgcctttgcactgtgaaaacctagacaccttagctttcattttgcctcacaggactgataacagcgagagctgtgtgcatgggaagcatgactcctcatgggttgaagaattgttaatgttacacagagcacggatcacagatgttgagcacatcactggactcagcttctatcaacaaagaaaagagccagtttcagacattttaaagttgaaaacacatttgccaacctttagccaagaagactgatatgttttttatccccaaacaccatgaatctttttgagagaaccttatattttatatagtcctctagctacactattgcattgttcagaaactgtcgaccagagttagaacggagccctcggtgatgcggacatctcagggaaacttgcgtactcagcacagcagtggagagtgttcctgttgaatcttgcacatatttgaatgtgtaagcattgtatacattgatcaagttcgggggaataaagacagaccacacctaaaactgcctttctgcttctcttaaaggagaagtagctgtgaacattgtctggataccagatatttgaatctttcttactattggtaataaaccttgatggcattgggcaaacagtagacttatagtagggttggggtagcccatgttatgtgactatctttatgagaattttaaagtggttctggatatcttttaacttggagtttcatttcttttcattgtaatcaaaaaaaaaattaacagaagccaaaatacttctgagaccttgtttcaatctttgctgtatatcccctcaaaatccaagttattaatcttatgtgttttctttttaattttttgattggatttctttagatttaatggttcaaatgagttcaactttgagggacgatctttgaatatacttacctattataaaatcttactttgtatttgtatttaaaaaagaaaaatattcctatcctgctcactggtaattaacataggtttaaaatggcttcaaatgtggccctatagacggttaaaattgtaccttatcttggcaaaacttcagagcaccagtcagtgcatgcaaggtgccattttttattgagatgcttagaatgtttctttctgtgcacaagacttaccctaccagcagcagagccattctctgttgagtggttcattttgaagttccacagattgaagagaacatgccaccaatcacctcacatcttcttggtggacatgataaatgacacaatgaacttgatttctttactaccttgactgtagctttttatccctacctgtgaaccttcaaagactgcattaacttttaggctacataggtccaattgaggtataatatcagtacaccaaagatttttatatgtccttcgtgtgaccattcttcaacggcctaagggccagctgcaaagacttttggaaaatacaatttacaactcaaaattatttaataatttaggaagttgctttttttttttttttttttcagtcctgcagtttcctgaagctctgtatatgatatttttttcagcctgcttctctctgttgttcagattaggtaattttattcttctgtctcgaagctcactgattctttattctgtctaatctgttctgctgttgagcccatttattcctgatttttatattttagttattgtatgttttatttctaaaatttccattcagtttttctttatatcttctatttgctgagaatttctgtctctttgctgagactttctacgttttcatttgtttcaagtgcatttatacttgcttgttgaagaatttttatgatggctgctgtaaaatccttatcagataattccaacatctgtcacctcattgtttgcatctactgatggtcttttttccattcggaaacattttcctgtttcttggtgtgtggaatgattttttattgaaacctggatatttttaggtattatgttatgagactatgggtcttatttaaaccttctgctttagccaactttctcagataccaccacagcaggggaattgggagcactgcttcattattaccaggtgtggctaggagtccaggttccccagtcagcctccctttatactgagtaacagggtcccctcattactactgggcaaggtgagaattcagtttcccattaggtctttattgattcttccctggctggaatgtgcagcggcaccttttggtgcaccctgggaatctccactaatgctatgggacagagtgaccaggaagagcttcattacaccaggtgggaatgaaattcccagtagcctacacagccttctccgacaccactctggagttgtattcttccagcacacaaacatacacaatttaactcaaagcatcttagcagagcttaattaaatggatagatgcctgttccctttgctggataccaagaatacaaaagtcagggagttggggcacctctttacagcttggtgagagtgtaagtctggactccccactcagcatttgctggtatgggtggggccatggtgtttttccatggtgtttggttggagtacagccttttttacccttgcttggctacccttttctggtcctttggcaggagagagcaggactctcttagggcttttttttcccctgcatttattgacatttccaggttgctgactttttcagctccaagttggaaatatatgagctgaaaagaaaatgtagggaactcatcacagtgttgttacttgggccccaatgttcctagcctattttctgtctactattcagagtcttgctgtgttttaatataatatccaggatttttatatgcatttagcagaaggatgtctactctgcctttgtagaagtgtctcactgatttttacatatttttccagcacacaaacatacacaatttaactcaaagcatcttagcagagcttaattaaatggatagatgtctgttccctttgctggacgccaagaatacaaaaaagaacaagtgacaattttctctgtcttagggagaagagacagcagaagtgtaaatgatccctaaagagtgatagatgttatcatgaagccacaggaggggtgccaggctgcacaaaagagacactggatgcttcttggtagtagaggcagtggcttcccagccttggggctaaggcttgtagggtgaattggaacttttcagatgagcaaggcaaagaagggaccttctaacattccttggatggaacatttttgacattttcccatttacagctacttatattttctacaagtgtcactgtgaccaacttatgtacacatactttttcttgcttagttataataatctgttcttaaagaaaatgtcagtctctacattctatgctgactgttaaggaaagagcacccacatctgctcctacttagctttttttctgtggttcttacacagtattcctttttttcttttcttgaaagagactcctcctttcttttcttttcttgaaagagttttaaacagataagatggcaaaagtgactgatctctactcccccagtttgaatggtaaatttgaatggtaaattcccatgaacatatatggaaatgtctttatcctactttctccaataaaggctgttcttagcttttcaaatgcaaagtgaaacctttatttatcttgatttcttttttttttttttttttttttttttttttgagatgctctgtcacccaggctggagtgcagtggcaagatcttggctcactgcaagctccgcctcccaggttcacgccattctcctggctcagcctcccgagtaactgggactacaggcacctgccgtcacgcctggctaattttttgtatttttagtagagaatggagtttcaccgtgttagccaggatggtctcgatctcctgaccttgtgatctgcccgcctcggcctcccaaagtgctgggattacaggctcgagccactgcctccagcctatcctgatttctactgtcatgcctcacatcagtccttttttttttttttgagacagagtctcgctctgtggcccaggctagactgcagtggcatgatctcggctcactgcaacctccacctccggggttctagcaattctcctgcctcagcctcctgagtagctgggattataggcgcatgccacacctggctttttgtattttagtggagatggggtttcactgtgttgctcaggctggtcttgatctcctgagctcagacaatccccccgccttggcctcccaaagtgctaggattataggcgagagctgctgtgtgcttcttaagtgaggtaagtaacttccatagaaaatttccatcagttcattcatgaaagaacaaagaacctggcaaaacttaaaaaaacgtttccaagaatcagataaaagaggacaaaccttagggagaagaaggcagctgctcatttccagcaggggaagtagctgcatagagtacaaggactggtaggcctgttggctgttcctgtttaaggagacaagatgggcatggaacagggaccaccccctcctctgggagaagctgttacccccttcacttttcctcctctgtcattacccacaatcactctccttctttgcgctatggtaggtgtttacccatcataggaatgggcatttgaactttgaaactgaatgtggtgattacacttcatgctgaagcttttcacatgagtgctttcataagcattaagtaaaattttataatgactgcagtccaaggacattttccctggtttttggccagtctaaatattgtaagagagagagaagaaaagtgtacggaatataattgtctctaagctaagaaatgtggatgttcaaataaaacatacgtacagaa

SEQ ID NO: 6562 - DNA, 3107 bp, Homo sapiens
  source 1..3107: mol_type = unassigned DNA
cgatggagcgcgacggctgcgcggggggcgggagccgcggcggcgagggcgggcgcgctccccgggagggcccggcggggaacggccgcgatcggggccgcagccacgctgccgaggcgcccggggacccgcaggcggccgcgtccttgctggcccctatggacgtgggggaggagccgctggagaaggcggcgcgcgcccgcactgccaaggaccccaacacctataaagtactctcgctggtattgtcagtatgtgtgttaacaacaatacttggttgtatatttgggttgaaaccaagctgtgccaaagaagttaaaagttgcaaaggtcgctgtttcgagagaacatttgggaactgtcgctgtgatgctgcctgtgttgagcttggaaactgctgtttagattaccaggagacgtgcatagaaccagaacatatatggacttgcaacaaattcaggtgtggtgagaaaaggttgaccagaagcctctgtgcctgttcagatgactgcaaggacaagggcgactgctgcatcaactacagttctgtgtgtcaaggtgagaaaagttgggtagaagaaccatgtgagagcattaatgagccacagtgcccagcagggtttgaaacgcctcctaccctcttattttctttggatggattcagggcagaatatttacacacttggggtggacttcttcctgttattagcaaactaaaaaaatgtggaacatatactaaaaacatgagaccggtatatccaacaaaaactttccccaatcactacagcattgtcaccggattgtatccagaatctcatggcataatcgacaataaaatgtatgatcccaaaatgaatgcttccttttcacttaaaagtaaagagaaatttaatcctgagtggtacaaaggagaaccaatttgggtcacagctaagtatcaaggcctcaagtctggcacatttttctggccaggatcagatgtggaaattaacggaattttcccagacatctataaaatgtataatggttcagtaccatttgaagaaaggattttagctgttcttcagtggctacagcttcctaaagatgaaagaagaaccagattcttcaggtcattcatatggaccagtcagcagtgaagtcatcaaagccttgcagagggttgatggtatggttggtatgctgatggatggtctgaaagagctgaacttgcacagatgcctgaacctcatccttatttcagatcatggcatggaacaaggcagttgtaagaaatacatatatctgaataaatatttgggggatgttaaaaatattaaagttatctatggacctgcagctcgattgagaccctctgatgtcccagataaatactattcatttaactatgaaggcattgcccgaaatctttcttgccgggaaccaaaccagcacttcaaaccttacctgaaacatttcttacctaagcgtttgcactttgctaagagtgatagaattgagcccttgacattctatttggaccctcagtggcaacttgcattgaatccctcagaaaggaaatattgtggaagtggatttcatggctctgacaatgtattttcaaatatgcaagccctctttgttggctatggacctggattcaagcatggcattgaggctgacacctttgaaaacattgaagtctataacttaatgtgtgatttactgaatttgacaccggctcctaataacggaactcatggaagtcttaaccaccttctaaagaatcctgtttatacgccaaagcatcccaaagaagtgcaccccctggtacagtgccccttcacaagaaaccccagagataaccttggctgctcatgtaacccttcgattttgccgattgaggattttcaaacacagttcaatctgactgtggcagaagagaagattattaagcatgaaactttaccctatggaagacctagagttctccagaaggaaaacaccatctgtcttctttcccagcaccagtttatgagtggatacagccaagacatcttaatgcccctttggacatcctataccgtggacagaaatgacagtttctctacggaagacttctccaactgtctgtaccaggactttagaattcctcttagtcctgtccataaatgttcattttataaaaataacaccaaagtgagttacgggttcctctccccaccacaactaaataaaaattcaagtggaatatattctgaagctttgcttactacaaatatagtgccaatgtaccagagttttcaagttatatggcgctactttcatgacaccctactgcgaaagtatgctgaagaaagaaatggtgtcaatgtcgtcagtggtcctgtgtttgactttgattatgatggacgttgtgattccttagagaatctgaggcaaaaaagaagagtcatccgtaaccaagaaattttgattccaactcacttctttattgtgctaacaagctgtaaagatacatctcagacgcctttgcactgtgaaaacctagacaccttagctttcattttgcctcacaggactgataacagcgagagctgtgtgcatgggaagcatgactcctcatgggttgaagaattgttaatgttacacagagcacggatcacagatgttgagcacatcactggactcagcttctatcaacaaagaaaagagccagtttcagacattttaaagttgaaaacacatttgccaacctttagccaagaagactgatatgttttttatccccaaacaccatgaatctttttgagagaaccttatattttatatagtcctctagctacactattgcattgttcagaaactgtcgaccagagttagaacggagccctcggtgatgcggacatctcagggaaacttgcgtactcagcacagcagtggagagtgttcctgttgaatcttgcacatatttgaatgtgtaagcattgtatacattgatcaagttcgggggaataaagacagaccacacctaaaactgcctttctgcttctcttaaaggagaagtagctgtgaacattgtctggataccagatatttgaatctttcttactattggtaataaacct

SEQ ID NO: 6563 - DNA, 1633 bp, Homo sapiens
  source 1..1633: mol_type = unassigned DNA
aagtatcaaggcctcaagtctggcacatttttctggccaggatcagatgtggaaattaacggaattttcccagacatctataaaatgtataatggttcagtaccatttgaagaaaggattttagctgttcttcagtggctacagcttcctaaagatgaaagaagaaccagattcttcaggtcattcatatggaccagtcagcagtgaagtcatcaaagccttgcagagggttgatggtatggttggtatgctgatggatggtctgaaagagctgaacttgcacagatgcctgaacctcatccttatttcagatcatggcatggaacaaggcagttgtaagaaatacatatatctgaataaatatttgggggatgttaaaaatattaaagttatctatggacctgcagctcgattgagaccctctgatgtcccagataaatactattcatttaactatgaaggcattgcccgaaatctttcttgccgggaaccaaaccagcacttcaaaccttacctgaaacatttcttacctaagcgtttgcactttgctaagagtgatagaattgagcccttgacattctatttggaccctcagtggcaacttgcattgaatccctcagaaaggaaatattgtggaagtggatttcatggctctgacaatgtattttcaaatatgcaagccctctttgttggctatggacctggattcaagcatggcattgaggctgacacctttgaaaacattgaagtctataacttaatgtgtgatttactgaatttgacaccggctcctaataacggaactcatggaagtcttaaccaccttctaaagaatcctgtttatacgccaaagcatcccaaagaagtgcaccccctggtacagtgccccttcacaagaaaccccagagataaccttggctgctcatgtaacccttcggtaagtatcgtcaagaagtttggtccagtatgtatggtttgatagcaccctctgcatagcatgtgctgtaaaaatacttaataatcaaattagaatttaggagtgggggtaggtaaacatatgttttaattctagggggcgcatgtagatcttttgtgatatatcttttctctttctagtttttgcattttccactctatttttaattccttggagctgtgacttgacttgggtgcaggtgtggtgaagtctagttagttgacttgggtacgggtgtggagaagtctagttcagttcttgagcatcctgaattagggaatctgtgctgttaactctagcagtgaggtgatgagcacatagtaaaccaatcacaatgtacctttttaaaaatacaattcagattgtttaaatgtagggagaaaaaagatttcttggtatgaaatgaatatattacactgtccttttttacttccatgttaatatgtcattattataaaaagataaaaatactagacaagttatgaacaaaattgataacatccatgagggcacctgtaatcccagctacttgggaggctgaggcaggagaattgtttgaacctgggaggcggaggttgcagtgagccaagatcacaccatcgcattccagcctgggcaacagggcaagaccctttctcaaaaaaaaaaaaaaaaaaa

SEQ ID NO: 6564 - DNA, 3233 bp, Homo sapiens
  source 1..3233: mol_type = unassigned DNA
cgtgaaggcaaagagaacacgctgcaaaaggctttccaagaatcctcgacatggcaaggaggagctcgttccagtcgtgtcagataatatccctgttcacttttgccgttggagtcaatatctgcttaggattcactgcacatcgaattaagagagcagaaggatgggaggaaggtcctcctacagtgctatcagactccccctggaccaacatctccggatcttgcaagggcaggtgctttgaacttcaagaggctggacctcctgattgtcgctgtgacaacttgtgtaagagctataccagttgctgccatgactttgatgagctgtgtttgaagacagcccgtggctgggagtgtactaaggacagatgtggagaagtcagaaatgaagaaaatgcctgtcactgctcagaggactgcttggccaggggagactgctgtaccaattaccaagtggtttgcaaaggagagtcgcattgggttgatgatgactgtgaggaaataaaggccgcagaatgccctgcagggtttgttcgccctccattaatcatcttctccgtggatggcttccgtgcatcatacatgaagaaaggcagcaaagtcatgcctaatattgaaaaactaaggtcttgtggcacacactctccctacatgaggccggtgtacccaactaaaacctttcctaacttatacactttggccactgggctatatccagaatcacatggaattgttggcaattcaatgtatgatcctgtatttgatgccacttttcatctgcgagggcgagagaaatttaatcatagatggtggggaggtcaaccgctatggattacagccaccaagcaaggggtgaaagctggaacattcttttggtctgttgtcatccctcacgagcggagaatattaaccatattgcagtggctcaccctgccagatcatgagaggccttcggtctatgccttctattctgagcaacctgatttctctggacacaaatatggccctttcggccctgaggagagtagttatggctcaccttttactccggctaagagacctaagaggaaagttgcccctaagaggagacaggaaagaccagttgctcctccaaagaaaagaagaagaaaaatacataggatggatcattatgctgcggaaactcgtcaggacaaaatgacaaatcctctgagggaaatcgacaaaattgtggggcaattaatggatggactgaaacaactaaaactgcatcggtgtgtcaacgtcatctttgtcggagaccatggaatggaagatgtcacatgtgatagaactgagttcttgagtaattacctaactaatgtggatgatattactttagtgcctggaactctaggaagaattcgatccaaatttagcaacaatgctaaatatgaccccaaagccattattgccaatctcacgtgtaaaaaaccagatcagcactttaagccttacttgaaacagcaccttcccaaacgtttgcactatgccaacaacagaagaattgaggatatccatttattggtggaacgcagatggcatgttgcaaggaaacctttggatgtttataagaaaccatcaggaaaatgctttttccagggagaccacggatttgataacaaggtcaacagcatgcagactgtttttgtaggttatggctcaacatttaagtacaagactaaagtgcctccatttgaaaacattgaactttacaatgttatgtgtgatctcctgggattgaagccagctcctaataatgggacccatggaagtttgaatcatctcctgcgcactaataccttcaggccaaccatgccagaggaagttaccagacccaattatccagggattatgtaccttcagtctgattttgacctgggctgcacttgtgatgataaggtagagccaaagaacaagttggatgaactcaacaaacggcttcatacaaaagggtctacagaagagagacacctcctctatgggcgacctgcagtgctttatcggactagatatgatatcttatatcacactgactttgaaagtggttatagtgaaatattcctaatgccactctggacatcatatactgtttccaaacaggctgaggtttccagcgttcctgaccatctgaccagttgcgtccggcctgatgtccgtgtttctccgagtttcagtcagaactgtttggcctacaaaaatgataagcagatgtcctacggattcctctttcctccttatctgagctcttcaccagaggctaaatatgatgcattccttgtaaccaatatggttccaatgtatcctgctttcaaacgggtctggaattatttccaaagggtattggtgaagaaatatgcttcggaaagaaatggagttaacgtgataagtggaccaatcttcgactatgactatgatggcttacatgacacagaagacaaaataaaacagtacgtggaaggcagttccattcctgttccaactcactactacagcatcatcaccagctgtctggatttcactcagcctgccgacaagtgtgacggccctctctctgtgtcctccttcatcctgcctcaccggcctgacaacgaggagagctgcaatagctcagaggacgaatcaaaatgggtagaagaactcatgaagatgcacacagctagggtgcgtgacattgaacatctcaccagcctggacttcttccgaaagaccagccgcagctacccagaaatcctgacactcaagacatacctgcatacatatgagagcgagatttaactttctgagcatctgcagtacagtcttatcaactggttgtatatttttatattgtttttgtatttattaatttgaaaccaggacattaaaaatgttagtattttaatcctgtaccaaatctgacatattatgcctgaatgactccactgtttttctctaatgcttgatttaggtagccttgtgttctgagtagagcttgtaataaatactgcagcttgagtttttagtggaagcttctaaatggtgctgcagatttgatatttgcattgaggaaatattaattttccaatgcacagttgccacatttagtcctgtactgtatggaaacactgattttgtaaagttgcctttatttgctgttaactgttaactatgacagatatatttaagccttataaaccaatcttaaacataataaatcacacattcagtttt

SEQ ID NO: 6565 - DNA, 3271 bp, Homo sapiens
  source 1..3271: mol_type = unassigned DNA
gtcccccgggacagcggccccctgactacatctgcactggagaaatcccaaaagcaaacggccagtgcaaacaagagcagtccgcagcagccgtcccgagcacagctcccaggtcgcggggctgcagcccaggccgcgtccgcagcgcccgggcaggaacagacgccgagactcccgcagcatgacccgccacgccgatcggataatatccctgttcacttttgccgttggagtcaatatctgcttaggattcactgcacatcgaattaagagagcagaaggatgggaggaaggtcctcctacagtgctatcagactccccctggaccaacatctccggatcttgcaagggcaggtgctttgaacttcaagaggctggacctcctgattgtcgctgtgacaacttgtgtaagagctataccagttgctgccatgactttgatgagctgtgtttgaagacagcccgtggctgggagtgtactaaggacagatgtggagaagtcagaaatgaagaaaatgcctgtcactgctcagaggactgcttggccaggggagactgctgtaccaattaccaagtggtttgcaaaggagagtcgcattgggttgatgatgactgtgaggaaataaaggccgcagaatgccctgcagggtttgttcgccctccattaatcatcttctccgtggatggcttccgtgcatcatacatgaagaaaggcagcaaagtcatgcctaatattgaaaaactaaggtcttgtggcacacactctccctacatgaggccggtgtacccaactaaaacctttcctaacttatacactttggccactgggctatatccagaatcacatggaattgttggcaattcaatgtatgatcctgtatttgatgccacttttcatctgcgagggcgagagaaatttaatcatagatggtggggaggtcaaccgctatggattacagccaccaagcaaggggtgaaagctggaacattcttttggtctgttgtcatccctcacgagcggagaatattaaccatattgcagtggctcaccctgccagatcatgagaggccttcggtctatgccttctattctgagcaacctgatttctctggacacaaatatggccctttcggccctgagatgacaaatcctctgagggaaatcgacaaaattgtggggcaattaatggatggactgaaacaactaaaactgcatcggtgtgtcaacgtcatctttgtcggagaccatggaatggaagatgtcacatgtgatagaactgagttcttgagtaattacctaactaatgtggatgatattactttagtgcctggaactctaggaagaattcgatccaaatttagcaacaatgctaaatatgaccccaaagccattattgccaatctcacgtgtaaaaaaccagatcagcactttaagccttacttgaaacagcaccttcccaaacgtttgcactatgccaacaacagaagaattgaggatatccatttattggtggaacgcagatggcatgttgcaaggaaacctttggatgtttataagaaaccatcaggaaaatgctttttccagggagaccacggatttgataacaaggtcaacagcatgcagactgtttttgtaggttatggctcaacatttaagtacaagactaaagtgcctccatttgaaaacattgaactttacaatgttatgtgtgatctcctgggattgaagccagctcctaataatgggacccatggaagtttgaatcatctcctgcgcactaataccttcaggccaaccatgccagaggaagttaccagacccaattatccagggattatgtaccttcagtctgattttgacctgggctgcacttgtgatgataaggtagagccaaagaacaagttggatgaactcaacaaacggcttcatacaaaagggtctacagaagctgaaaccaggaaattcagaggcagcagaaatgaaaacaaggaaaacattaatggaaattttgaacctagaaaagagagacacctcctctatgggcgacctgcagtgctttatcggactagatatgatatcttatatcacactgactttgaaagtggttatagtgaaatattcctaatgccactctggacatcatatactgtttccaaacaggctgaggtttccagcgttcctgaccatctgaccagttgcgtccggcctgatgtccgtgtttctccgagtttcagtcagaactgtttggcctacaaaaatgataagcagatgtcctacggattcctctttcctccttatctgagctcttcaccagaggctaaatatgatgcattccttgtaaccaatatggttccaatgtatcctgctttcaaacgggtctggaattatttccaaagggtattggtgaagaaatatgcttcggaaagaaatggagttaacgtgataagtggaccaatcttcgactatgactatgatggcttacatgacacagaagacaaaataaaacagtacgtggaaggcagttccattcctgttccaactcactactacagcatcatcaccagctgtctggatttcactcagcctgccgacaagtgtgacggccctctctctgtgtcctccttcatcctgcctcaccggcctgacaacgaggagagctgcaatagctcagaggacgaatcaaaatgggtagaagaactcatgaagatgcacacagctagggtgcgtgacattgaacatctcaccagcctggacttcttccgaaagaccagccgcagctacccagaaatcctgacactcaagacatacctgcatacatatgagagcgagatttaactttctgagcatctgcagtacagtcttatcaactggttgtatatttttatattgtttttgtatttattaatttgaaaccaggacattaaaaatgttagtattttaatcctgtaccaaatctgacatattatgcctgaatgactccactgtttttctctaatgcttgatttaggtagccttgtgttctgagtagagcttgtaataaatactgcagcttgagtttttagtggaagcttctaaatggtgctgcagatttgatatttgcattgaggaaatattaattttccaatgcacagttgccacatttagtcctgtactgtatggaaacactgattttgtaaagttgcctttatttgctgttaactgttaactatgacagatatatttaagccttataaaccaatcttaaacataataaatcacacattcagtttt

SEQ ID NO: 6566 - DNA, 3647 bp, Homo sapiens
  source 1..3647: mol_type = unassigned DNA
ttttagtagagacggggtttcactatgttggccaggctggtcttcaactcctgactcagctgatccacccgccttggcctcccaatatgttgagattacaggcgtgagccactgtgcctggccttatatatttattaaataacgtatgaagtaatcttttgtatagtttcctaaaataacctatactatagttttgcatgttgtaaaatttttaataaatgctattatactatatgtatcctgcaattattttatcattatgtttttgagacttaatgtatattagtacatgaagttttagctcacttatttttactgctaatacagtagttaatatttaattgtataaatgtaccataagaatttttttccattttcctacttgagaacatttagtaatttgcaaatgttagctcttacaacaatgttgccacagacattactggaaatgtcttcttgcacgcatatgctagggtatacagtgaagggtagagttgctgactcatgctgtttcagaattgctgagtcattacgttttagctttggtgaaaagtgatttcataaattagtttgggaatcacttcagtgtgcctagagattaatctgaaacatttaggcgctatcctaatttacttacacatatatgcccaagtcatcatcagtacccacatgggaaattggtactgtggtgactatccacagttttaaggaaggaaacagagattgaagaaggtgcttacaaacatagaactgctagaggtggagcccagaatgtcagtttgagagaaaacagttaattcctcgaaagaatgtatgatatagatggagtttagagttcgcttttgaatttagcagggtgctaagtcgacagaagggcacagagggaaagaacatttctgatttgctttcttttttcctttactggttttcacacatgaagaacaagttggatgaactcaacaaacggcttcatacaaaagggtctacagaagctgaaaccaggaaattcagaggcagcagaaatgaaaacaaggaaaacattaatggaaattttgaacctagaaaaggtttggtttgagttttgaaggaaagtctgggttgttttactgcccctaagtactactgttacgatttgctggtgttttatttgtttattatatttcatttatttaatattgtcagattatgttctaatccttaggggtgggtccccaaatttggcagcttaactaaggcttctacatttactgcaatgctggagcagccgaactacccagaacaggcttgtgttgtaatagtgtgggccgctttgtctcaaatccgcagttctatctgggagggtcttgcaaagtattctacgaagacttttctccattacttgcatagaatggtaagactttaattaaagcaacatgtatacattatttaataagtgtttttcagaactgattttctctagtagaaaaaatagtacaagaatttatttttttttaaatttatcacttaaggaattgtgaattgcctaagcctcagtctctaaatattttggtctgtagggccccacatttccaagaatctgtggaagttttgactttagcctatccaaagtgggcagatcaagctccaggtatttattgcagagtgtggaatgaagattttcatactgaactcccatctcttcttccgcaaagagtaaagcttcagacctttttttttcctaagaagagagctttcctttggaggtctgaatctgcactgggggtcttcattgagttctttggtaactgatgaacttccctcttctgtacttagaagaccctcttgaatgcccacttattttatctatacatgttcctttaagttcttacctaaagacttttcctctgtatgacaaagctgcttactttaaatgctcattactactcactttttatgctgaaggaatgcatatttgagttgctgtatgcatataatgatcaatgtgtgccttcttcttaattaaatcattggtgtacctgataagcctcttcaggggtcaaaataattaattctacagaaatccaatcctattggctttccattcagctgaatcatttcaaaatttattacataatgtttcctttatatacaaattgtaaattctttacaactaaaaaaagcattctgtaaatacagcatttacattatggttttgataactgtaaagcttgacccatggttaggtgatcagatcaaccacaaaagtgttaggaaaactagcttgattaaattaaggagaaggtgctatattaataataagtaagctagccattttaggtaacttgactcttccaacatttctttaacatttgatgtaaaatttaatatgcacctaacacagtttattttttttcttttttagagagacacctcctctatgggcgacctgcagtgctttatcggactagatatgatatcttatatcacactgactttgaaagtggttatagtgaaatattcctaatgccactctggacatcatatactgtttccaaacaggctgaggtttccagcgttcctgaccatctgaccagttgcgtccggcctgatgtccgtgtttctccgagtttcagtcagaactgtttggcctacaaaaatgataagcagatgtcctacggattcctctttcctccttatctgagctcttcaccagaggctaaatatgatgcattccttgtaaccaatatggttccaatgtatcctgctttcaaacgggtctggaattatttccaaagggtattggtgaagaaatatgcttcggaaagaaatggagttaacgtgataagtggaccaatcttcgactatgactatgatggcttacatgacacagaagacaaaataaaacagtacgtggaaggcagttccattcctgttccaactcactactacagcatcatcaccagctgtctggatttcactcagcctgccgacaagtgtgacggccctctctctgtgtcctccttcatcctgcctcaccggcctgacaacgaggagagctgcaatagctcagaggacgaatcaaaatgggtagaagaactcatgaagatgcacacagctagggtgcgtgacattgaacatctcaccagcctggacttcttccgaaagaccagccgcagctacccagaaatcctgacactcaagacatacctgcatacatatgagagcgagatttaactttctgagcatctgcagtacagtcttatcaactggttgtatatttttatattgtttttgtatttattaatttgaaaccaggacattaaaaatgttagtattttaatcctgtaccaaatctgacatattatgcctgaatgactccactgtttttctctaatgcttgatttaggtagccttgtgttctgagtagagcttgtaataaatactgcagcttgagtttttagtggaagcttctaaatggtgctgcagatttgatatttgcattgaggaaatattaattttccaatgcacagttgccacatttagtcctgtactgtatggaaacactgattttgtaaagttgcctttatttgctgttaactgttaactatgacagatatatttaagccttataaaccaatcttaaacataataaatcacacattcagttt

SEQ ID NO: 6567 - DNA, 1695 bp, Homo sapiens
  source 1..1695: mol_type = unassigned DNA
agcattggaatttggggcttctcccttctagtggagttcggaggatgaaaattggctgactctttggcagttctgttaagaatggaatggaagatgtcacatgtgatagaactgagttcttgagtaattacctaactaatgtggatgatattactttagtgcctggaactctaggaagaattcgatccaaatttagcaacaatgctaaatatgaccccaaagccattattgccaatctcacgtgtaaaaaaccagatcagcactttaagccttacttgaaacagcaccttcccaaacgtttgcactatgccaacaacagaagaattgaggatatccatttattggtggaacgcagatggcatgttgcaaggaaacctttggatgtttataagaaaccatcaggaaaatgctttttccagggagaccacggatttgataacaaggtcaacagcatgcagactgtttttgtaggttatggctcaacatttaagtacaagactaaagtgcctccatttgaaaacattgaactttacaatgttatgtgtgatctcctgggattgaagccagctcctaataatgggacccatggaagtttgaatcatctcctgcgcactaataccttcaggccaaccatgccagaggaagttaccagacccaattatccagggattatgtaccttcagtctgattttgacctgggctgcacttgtgatgataagaacaagttggatgaactcaacaaacggcttcatacaaaagggtctacagaagagagacacctcctctatgggcgacctgcagtgctttatcggactagatatgatatcttatatcacactgactttgaaagtggttatagtgaaatattcctaatgccactctggacatcatatactgtttccaaacaggctgaggtttccagcgttcctgaccatctgaccagttgcgtccggcctgatgtccgtgtttctccgagtttcagtcagaactgtttggcctacaaaaatgataagcagatgtcctacggattcctctttcctccttatctgagctcttcaccagaggctaaatatgatgcattccttgtaaccaatatggttccaatgtatcctgctttcaaacgggtctggaattatttccaaagggtattggtgaagaaatatgcttcggaaagaaatggagttaacgtgataagtggaccaatcttcgactatgactatgatggcttacatgacacagaagacaaaataaaacagtacgtggaaggcagttccattcctgttccaactcactactacagcatcatcaccagctgtctggatttcactcagcctgccgacaagtgtgacggccctctctctgtgtcctccttcatcctgcctcaccggcctgacaacgaggagagctgcaatagctcagaggacgaatcaaaatgggtagaagaactcatgaagatgcacacagctagggtgcgtgacattgaacatctcaccagcctggacttcttccgaaagaccagccgcagctacccagaaatcctgacactcaagacatacctgcatacatatgagagcgagatttaactttctgagcatctgcagtacagtcttatcaactggttgtatatttttatattgtttttgtatttattaatttgaaaccaggacattaaaaatgttagtattttaatcctgt

SEQ ID NO: 6568 - DNA, 2667 bp, Homo sapiens
  source 1..2667: mol_type = unassigned DNA
atggcaaggaggagctcgttccagtcgtgtcagataatatccctgttcacttttgccgttggagtcaatatctgcttaggattcactgcacatcgaattaagagagcagaaggatgggaggaaggtcctcctacagtgctatcagactccccctggaccaacatctccggatcttgcaagggcaggtgctttgaacttcaagaggctggacctcctgattgtcgctgtgacaacttgtgtaagagctataccagttgctgccatgactttgatgagctgtgtttgaagacagcccgtggctgggagtgtactaaggacagatgtggagaagtcagaaatgaagaaaatgcctgtcactgctcagaggactgcttggccaggggagactgctgtaccaattaccaagtggtttgcaaaggagagtcgcattgggttgatgatgactgtgaggaaataaaggccgcagaatgccctgcagggtttgttcgccctccattaatcatcttctccgtggatggcttccgtgcatcatacatgaagaaaggcagcaaagtcatgcctaatattgaaaaactaaggtcttgtggcacacactctccctacatgaggccggtgtacccaactaaaacctttcctaacttatacactttggccactgggctatatccagaatcacatggaattgttggcaattcaatgtatgatcctgtatttgatgccacttttcatctgcgagggcgagagaaatttaatcatagatggtggggaggtcaaccgctatggattacagccaccaagcaaggggtgaaagctggaacattcttttggtctgttgtcatccctcacgagcggagaatattaaccatattgcagtggctcaccctgccagatcatgagaggccttcggtctatgccttctattctgagcaacctgatttctctggacacaaatatggccctttcggccctgagatgacaaatcctctgagggaaatcgacaaaattgtggggcaattaatggatggactgaaacaactaaaactgcatcggtgtgtcaacgtcatctttgtcggagaccatggaatggaagatgtcacatgtgatagaactgagttcttgagtaattacctaactaatgtggatgatattactttagtgcctggaactctaggaagaattcgatccaaatttagcaacaatgctaaatatgaccccaaagccattattgccaatctcacgtgtaaaaaaccagatcagcactttaagccttacttgaaacagcaccttcccaaacgtttgcactatgccaacaacagaagaattgaggatatccatttattggtggaacgcagatggcatgttgcaaggaaacctttggatgtttataagaaaccatcaggaaaatgctttttccagggagaccacggatttgataacaaggtcaacagcatgcagactgtttttgtaggttatggctcaacatttaagtacaagactaaagtgcctccatttgaaaacattgaactttacaatgttatgtgtgatctcctgggattgaagccagctcctaataatgggacccatggaagtttgaatcatctcctgcgcactaataccttcaggccaaccatgccagaggaagttaccagacccaattatccagggattatgtaccttcagtctgattttgacctgggctgcacttgtgatgataaggtagagccaaagaacaagttggatgaactcaacaaacggcttcatacaaaagggtctacagaagctgaaaccaggaaattcagaggcagcagaaatgaaaacaaggaaaacattaatggaaattttgaacctagaaaagagagacacctcctctatgggcgacctgcagtgctttatcggactagatatgatatcttatatcacactgactttgaaagtggttatagtgaaatattcctaatgccactctggacatcatatactgtttccaaacaggctgaggtttccagcgttcctgaccatctgaccagttgcgtccggcctgatgtccgtgtttctccgagtttcagtcagaactgtttggcctacaaaaatgataagcagatgtcctacggattcctctttcctccttatctgagctcttcaccagaggctaaatatgatgcattccttgtaaccaatatggttccaatgtatcctgctttcaaacgggtctggaattatttccaaagggtattggtgaagaaatatgcttcggaaagaaatggagttaacgtgataagtggaccaatcttcgactatgactatgatggcttacatgacacagaagacaaaataaaacagtacgtggaaggcagttccattcctgttccaactcactactacagcatcatcaccagctgtctggatttcactcagcctgccgacaagtgtgacggccctctctctgtgtcctccttcatcctgcctcaccggcctgacaacgaggagagctgcaatagctcagaggacgaatcaaaatgggtagaagaactcatgaagatgcacacagctagggtgcgtgacattgaacatctcaccagcctggacttcttccgaaagaccagccgcagctacccagaaatcctgacactcaagacatacctgcatacatatgagagcgagatttaa

SEQ ID NO: 6569 - DNA, 2651 bp, Homo sapiens
  source 1..2651: mol_type = unassigned DNA
agtgcactccgtgaaggcaaagagaacacgctgcaaaaggctttccaagaatcctcgacatggcaaggaggagctcgttccagtcgtgtcagataatatccctgttcacttttgccgttggagtcaatatctgcttaggattcactgcacatcgaattaagagagcagaaggatgggaggaaggtcctcctacagtgctatcagactccccctggaccaacatctccggatcttgcaagggcaggtgctttgaacttcaagaggctggacctcctgattgtcgctgtgacaacttgtgtaagagctataccagttgctgccatgactttgatgagctgtgtttgaagacagcccgtggctgggagtgtactaaggacagatgtggagaagtcagaaatgaagaaaatgcctgtcactgctcagaggactgcttggccaggggagactgctgtaccaattaccaagtggtttgcaaaggagagtcgcattgggttgatgatgactgtgaggaaataaaggccgcagaatgccctgcagggtttgttcgccctccattaatcatcttctccgtggatggcttccgtgcatcatacatgaagaaaggcagcaaagtcatgcctaatattgaaaaactaaggtcttgtggcacacactctccctacatgaggccggtgtacccaactaaaacctttcctaacttatacactttggccactgggctatatccagaatcacatggaattgttggcaattcaatgtatgatcctgtatttgatgccacttttcatctgcgagggcgagagaaatttaatcatagatggtggggaggtcaaccgctatggattacagccaccaagcaaggggtgaaagctggaacattcttttggtctgttgtcatccctcacgagcggagaatattaaccatattgcagtggctcaccctgccagatcatgagaggccttcggtctatgccttctattctgagcaacctgatttctctggacacaaatatggccctttcggccctgagatgacaaatcctctgagggaaatcgacaaaattgtggggcaattaatggatggactgaaacaactaaaactgcatcggtgtgtcaacgtcatctttgtcggagaccatggaatggaagatgtcacatgtgatagaactgagttcttgagtaattacctaactaatgtggatgatattactttagtgcctggaactctaggaagaattcgatccaaatttagcaacaatgctaaatatgaccccaaagccattattgccaatctcacgtgtaaaaaaccagatcagcactttaagccttacttgaaacagcaccttcccaaacgtttgcactatgccaacaacagaagaattgaggatatccatttattggtggaacgcagatggcatgttgcaaggaaacctttggatgtttataagaaaccatcaggaaaatgctttttccagggagaccacggatttgataacaaggtcaacagcatgcagactgtttttgtaggttatggctcaacatttaagtacaagactaaagtgcctccatttgaaaacattgaactttacaatgttatgtgtgatctcctgggattgaagccagctcctaataatgggacccatggaagtttgaatcatctcctgcgcactaataccttcaggccaaccatgccagaggaagttaccagacccaattatccagggattatgtaccttcagtctgattttgacctgggctgcacttgtgatgataaggtagagccaaagaacaagttggatgaactcaacaaacggcttcatacaaaagggtctacagaagagagacacctcctctatgggcgacctgcagtgctttatcggactagatatgatatcttatatcacactgactttgaaagtggttatagtgaaatattcctaatgccactctggacatcatatactgtttccaaacaggctgaggtttccagcgttcctgaccatctgaccagttgcgtccggcctgatgtccgtgtttctccgagtttcagtcagaactgtttggcctacaaaaatgataagcagatgtcctacggattcctctttcctccttatctgagctcttcaccagaggctaaatatgatgcattccttgtaaccaatatggttccaatgtatcctgctttcaaacgggtctggaattatttccaaagggtattggtgaagaaatatgcttcggaaagaaatggagttaacgtgataagtggaccaatcttcgactatgactatgatggcttacatgacacagaagacaaaataaaacagtacgtggaaggcagttccattcctgttccaactcactactacagcatcatcaccagctgtctggatttcactcagcctgccgacaagtgtgacggccctctctctgtgtcctccttcatcctgcctcaccggcctgacaacgaggagagctgcaatagctcagaggacgaatcaaaatgggtagaagaactcatgaagatgcacacagctagggtgcgtgacattgaacatctcaccagcctggacttcttccgaaagaccagccgcagctacccagaaatcctgacactcaagacatacctgcatacatatgagagcgagatttaa

SEQ ID NO: 6570 - DNA, 666 bp, Homo sapiens
  source 1..666: mol_type = unassigned DNA
tgattcaaagtctgactgttcatggtactaaagcatttctgtctgagaaaaacattcctgcatttaatttgttggtggcagtgtccttatatgacaaaaccagtctcacaattcattataaacaataacctcagccgggcatgatccaccatgcccggcagagaaaatgaatcttaagatatctctgcccctcttgggcccctcgccctttcttcttcatgtctcttccatgagggctgaatatttgtcatacacttttgagcgtgaaaagggacactattaacaattataccagggcaacaggcataaaactgtaacatggggccagcctggtttaacttcatatgctccttaaaggactttattgatgccaccttcactccatttccagtattcatcatcctctgcattcccatcacactctgtaactatctttaatatggtgcagaccacatggcatctgttatttgtgctatgtttgtctctccctttgacttgtgagctctttgagggtaagagctctatcttaatcatctttgcccagtacctccattctacagcgcaaggtctggcacaaccaaggcgctcaatgtttgatgatgaagaataatggatacatttggaaggagataggtgacagacttggcgaagactggagaagttatt

SEQ ID NO: 6571 - DNA, 769 bp, Homo sapiens
  source 1..769: mol_type = unassigned DNA
acacgctgcaaaaggctttccaagaatcctcgacatggcaaggaggagctcgttccagtcgtgtcagataatatccctgttcacttttgccgttggagtcaatatctgcttaggattcactgcacatcgaattaagagagcagaaggatgggaggaaggtcctcctacagtgctatcagactccccctggaccaacatctccggatcttgcaagggcaggtgctttgaacttcaagaggctggacctcctgattgtcgctgtgacaacttgtcccgtggctgggagtgtactaaggacagatgtggagaagtcagaaatgaagaaaatgcctgtcactgctcagaggactgcttggccaggggagactgctgtaccaattaccaagtggtttgcaaaggagagtcgcattgggttgatgatgactgtgaggaaataaaggccgcagaatgccctgcagggtttgttcgccctccattaatcatcttctccgtggatggcttccgtgcatcatacatgaagaaaggcagcaaagtcatgcctaatattgaaaaactaaggtcttgtggcacacactctccctacatgaggccggtgtacccaactaaaacctttcctaacttatacactttggccactgggctatatccagaatcacatggaattgttggcaattcaatgtatgatcctgtatttgatgccacttttcatctgcgagggcgagagaaatttaatcatagatggtggggaggtcaaccggtaagttttgca

SEQ ID NO: 6572 - DNA, 991 bp, Homo sapiens
  source 1..991: mol_type = unassigned DNA
ggcaaagagaacacgctgcaaaaggctttccaagaatcctcgacatggcaaggaggagctcgttccagtcgtgtcagataatatccctgttcacttttgccgttggagtcaatatctgcttaggattcactgcacatcgaattaagagagcagaaggatgggaggaaggtcctcctacagtgctatcagactccccctggaccaacatctccggatcttgcaagggcaggtgctttgaacttcaagaggctggacctcctgattgtcgctgtgacaacttgtgtaagagctataccagttgctgccatgactttgatgagctgtgtttgaagacagcccgtggctgggagtgtactaaggacagatgtggagaagtcagaaatgaagaaaatgcctgtcactgctcagaggactgcttggccaggggagactgctgtaccaattaccaagtggtttgcaaaggagagtcgcattgggttgatgatgactgtgaggaaataaaggccgcagaatgccctgcaggaggcccataagaacaaaagcatctcctggggagaggatacactcatggagtatttggagaatcccaagaagcacatccccggaacaaaaatgatcttcgcaggcatgaagaacaaggcagaaagggcagccttgatagctcatctcaaaaaaagctaccaatgaataataacaggtttgttcgccctccattaatcatcttctccgtggatggcttccgtgcatcatacatgaagaaaggcagcaaagtcatgcctaatattgaaaaactaaggtcttgtggcacacactctccctacatgaggccggtgtacccaactaaaacctttcctaacttatacactttggccactgggctatatccagaatcacatggaattgttggcaattcaatgtatgatcctgtatttgatgccacttttcatctgcgagggcgagagaaatttaatcatagatggtggggaggtca

SEQ ID NO: 6573 - DNA, 4651 bp, Homo sapiens
  source 1..4651: mol_type = unassigned DNA
ggagcgccccgagcggcgcagatagggacgttggggctgtgccccgcggcgcggcgcctgccactgcgcaggcgcctcaggaagagctcggcatcgcccctcttcctccaggtcccccttccccgcaacttcccacgagtgccaggtgccgcgagcgccgagttccgcgcattggaaagaagcgaccgcggcggctggaaccctgattgctgtccttcaacgtgttcattatgaagttattagtaatacttttgttttctggacttataactggttttagaagtgactcttcctctagtttgccacctaagttactactagtatcctttgatggcttcagagctgattatctgaagaactatgaatttcctcatctccagaattttatcaaagaaggtgttttggtagagcatgttaaaaatgtttttatcacaaaaacatttccaaaccactacagtattgtgacaggcttgtatgaagaaagccatggcattgtggctaattccatgtatgatgcagtcacaaagaaacacttttctgactctaatgacaaggatcctttttggtggaatgaggcagtacctatttgggtgaccaatcagcttcaggaaaacagatcaagtgctgctgctatgtggcctggtactgatgtacccattcacgataccatctcttcctattttatgaattacaactcctcagtgtcatttgaggaaagactaaataatattactatgtggctaaacaattcgaacccaccagtcacctttgcaacactatattgggaagaaccagatgcaagtggccacaaatacggacctgaagataaagaaaacatgagcagagtgttgaaaaaaatagatgatcttatcggtgacttagtccaaagactcaagatgttagggctatgggaaaatcttaatgtgatcattacaagtgatcatgggatgacccagtgttctcaggacagactgataaacctggattcctgcatcgatcattcatactacactcttatagatttgagcccagttgctgcaatacttcccaaaataaatagaacagaggtttataacaaactgaaaaactgtagccctcatatgaatgtttatctcaaagaagacattcctaacagattttattaccaacataatgatcgaattcagcccattattttggttgccgatgaaggctggacaattgtgctaaatgaatcatcacaaaaattaggtgaccatggttatgataattctttgcctagtatgcatccatttctagctgcccacggacctgcatttcacaaaggctacaagcatagcacaattaacattgtggatatttatccaatgatgtgccacatcctgggattaaaaccacatcccaataatgggacctttggtcatactaagtgcttgttagttgaccagtggtgcattaatctcccagaagccatcgcgattgttatcggttcactcttggtgttaaccatgctaacatgcctcataataatcatgcagaatagactttctgtacctcgtccattttctcgacttcagctacaagaagatgatgatgatcctttaattgggtgacatgtgctagggcttatacaaagtgtctttgattaatcacaaaactaagaatacatccaaagaatagtgttgtaactatgaaaaagaatactttgaaagacaaagaacttagactaagcatgttaaaattattactttgttttccttgtgttttgtttcggtgcatttgctaataagataacgctgaccatagtaaaattgttagtaaatcattaggtaacatcttgtggtaggaaatcattaggtaacatcaatcctaactagaaatactaaaaatggcttttgagaaaaatacttcctctgcttgtattttgcgatgaagatgtgatacatctttaaatgaaaatataccaaaatttagtaggcatgtttttctaataaatttatatatttgtaaagaaaacaacagaaatctttatgcaatttgtgaattttgtatattagggaggaaaagcttcctatatttttatatttacctttaattagtttgtatctcaagtaccctcttgaggtaggaaatgctctgtgatggtaaataaaattggagcagacagaaaagatatagcaaatgaagaaatattttaaggaaacctatttgaaaaaaaaagcaaagaccatttgataaaagcctgagttgtcaccattatgtcttaagctgttagtcttaaagattattgttaaaaaattcagaagaaaagagagacaagtgctcttctctctatctatgcttaatgcctttatgtaagttacttagttgtttgcgtgtgcctgtgcaagtgtgtttgtgtgtggttgtgtggacattatgtgatttactatataaggaggtcagagatggactgtggccaggcttccacattcctgaagcacacagatctcaggaaaggttatttttgcacttcatatttgtttactttctcctaactcacaagttaaaatcataacttaatttcattaacttttatcatttaactctctcatgtttgttgtaacctgaggtatccaaatgctacagaaaaatttatgacccaaatacaaatctcaatttgactgggacagaatgaggaatggagatttttgtatttatctttgggactttatgccttactttttaggctatagaatagttaagaaattttaaacaaaatttagtatcttttggtctttcacaccattcatatgttaagtggcagaatagccttagtgctacctccacttttttctccagtatttgcatcacagaaataatccctctgtttaacatgtttgttcagagccaagggtttattgtgaagaactgtcatcctgcctttgctagctggtaccttctagtaatcaaaattaatatgaagaaactaggttgtgacagactagattatatttagtaggggaaaaattgggctcaagaaccattcatcagtacgtgagacaagcagttaatagtatgatctttaaagttttgacaatataaaataaacttggtaactgttttacaaatataaaagtataataaatatgcagcccagttaaatattgattatctgtgatggtaaagaacaacagtggtgccagtcatcaaacatacagtgcgtcctattgagtcactgctaatttcttgagcctggtatttgctgcctattgtatttgtggttgttgagaggcattttcaaaccctgtataaataatccatgctgttggtcataagttaactgtattaagaacagtaaaataaataaaaaccaatagtactaattttgctttaaaaaaatttctaatttttttcacataaaacaattatcctaaaggttaatagttgatcgaaacagaataatagaaaaattctactttaatttccattaaaaagcaaatagcattgacacatttaaagcttttcatttaaagtagtggatgtttttgaagtatctaaaatagtagcagaatattttatacttggtccttgcaatggtgtgagttttaatgattgcattatcgtgattggtggttatgagtttcagaaatctatacttggcatccaactcatgagtggattttatataggatggaacaggaaggtatgtcctgtcagtatcttaaccctttcaacaagacatttacctatttgtctttccttacgttctcaaaatattaactcgaattgtaaattaagcaaaaatttaaaaagtatatgttgatgggacaagaagaatagtatttatttaataaaacatatattatattgaactatgtgttaattcatttgtatcttttaaaaaattatcactgttaaagccattgactcctttagtacactgagaaaaatcttatagtaaaactagcctttcacattaaggttttggtgtgtattttgttaaataactaacatgctgctctattttctgggtgtagaaagtatttggctctaggaaacatttacttgtttgtgaaaacaataccccaaggtaataggaaaagtttgagttaagtgtttttaattcagtcagtgaattcagaataagtacattcatgtataacatagggacagttctgctgctgttatttatatgcaattcttctggtaaatagcaatagaataaaacatatttcaatgtttgtgtataggttttatattattattccactaggaatggcataagaatttatagataaattcttgtaacattaaaggattaaaatgtttttacattgtttttgggtgtctccttcttgtgcccatatctgataagctttatggattattgcatttaattccttttatttggagggttttacttccttgttaacatataaagttataaatgaaggacaaggaggagatggaaaatgtgtatttattgttaattcttaaaatagtgtgtaaataaaataacatcagtgtgctttaaagaaatgtgtatgtagtgccttaatttaaattaaaatatttttgactgttacttgagttcagaattaatgactttgttcatgatttttaaaatgtgtgtgaataaaatctaccaaaaaattcttactgtaattattaaatataaagttcagtgtca

SEQ ID NO: 6574 - DNA, 3936 bp, Homo sapiens
  source 1..3936: mol_type = unassigned DNA
aaattctgcaagtgaacttgactcaggaaggccagcggctcaaggtccagcccctggaagagagaatagctacagattctccatcctcagtctttgcaaggcgacagctgtgccagccgggctctggcaggctcctggcagcatggcagtgaagcttgggaccctcctgctggcccttgccctgggcctggcccagccagcctctgcccgccggaagctgctggtgtttctgctggatggttttcgctcagactacatcagtgatgaggcgctggagtcattgcctggtttcaaagagattgtgagcaggggagtaaaagtggattacttgactccagacttccctagtctctcgtatcccaattattataccctaatgactggccgccattgtgaagtccatcagatgatcgggaactacatgtgggaccccaccaccaacaagtcctttgacattggcgtcaacaaagacagcctaatgcctctctggtggaatggatcagaacctctgtgggtcactctgaccaaggccaaaaggaaggtctacatgtactactggccaggctgtgaggttgagattctgggtgtcagacccacctactgcctagaatataaaaatgtcccaacggatatcaattttgccaatgcagtcagcgatgctcttgactccttcaagagtggccgggccgacctggcagccatataccatgagcgcattgacgtggaaggccaccactacgggcctgcatctccgcagaggaaagatgccctcaaggctgtagacactgtcctgaagtacatgaccaagtggatccaggagcggggcctgcaggaccgcctgaacgtcattattttctcggatcacggaatgaccgacattttctggatggacaaagtgattgagctgaataagtacatcagcctgaatgacctgcagcaagtgaaggaccgcgggcctgttgtgagcctttggccggcccctgggaaacactctgagatatataacaaactgagcacagtggaacacatgactgtctacgagaaagaagccatcccaagcaggttctattacaagaaaggaaagtttgtctctcctttgactttagtggctgatgaaggctggttcataactgagaatcgagagatgcttccgttttggatgaacagcaccggcaggcgggaaggttggcagcgtggatggcacggctacgacaacgagctcatggacatgcggggcatcttcctggccttcggacctgatttcaaatccaacttcagagctgctcctatcaggtcggtggacgtctacaatgtcatgtgcaatgtggtgggcatcaccccgctgcccaacaacggatcctggtccagggtgatgtgcatgctgaagggccgcgccagcactgccccgcctgtctggcccagccactgtgccctggcactgattcttctcttcctgcttgcataactgatcatattgcttgtctcagaaaaaaacaccatcagcaaagtgggcctccaaagccagatgattttcattttatgtgtgaataatagcttcattaacacaatcaagaccatgcacattgtaaatacattattcttggataattctatacataaaagttcctacttgttaaaaaagatacaaaccttgtttttccagaaggtaggaaaatcctagctttccatttgtgcagttatatgtcattttctcctttcttttcacgttactcaggatgaactctctgagcagggacctgctcctgcagcaaccaaacttggagtggttattgcagacagacgtggctctgggcccctctctgtcccaccttgcacaaaggaccccctcagaccaggcccttgtctgtgccctgtccacacccaggagccatcctcagtgtctgtggccacaatcctgtactgttccttccatccctgataaaaggaggtctacatgaaagcaaaagctactgtctatttctgacccagctcatggaattttttcatcttatactgagctccagaaaggacgtaacttagcatggatcaccaatcaatcaaaaaataaataaatcactaaggattggagaactcatagaacaaggtgaaagacatgagtgccctcccaaagtctgagtgcacgaaaatttctctcttgccttgaggagcagaaaagcttctgatggacatgggcttctgtgagacttatcacacatagtgtatcgtggcatgaagcccggcacatagcaggccctgcatattgatggacaaatggatggcctgcctgccttccctgtccgttcacctgtgcaaaggcttcctcagacatgccactctgtggctcccaatatagggtgcagacaagagcaatccctgacatgacattatagcctgggaaagggctggctcactgatgagaatgtggaggcatcagcaaggatctcggtgggttgctcagagaggtgatgcactaagccttaatcctggacaccagtacccctgcagcatggcttgctcaacaacagtctttgagtggcatagaattccaaagaaaatggtgctgggtggagaatggagagagcatgatggagcagagtcccagtcactgaccaactaactggtcgtttgattaggaaacagtttggccaaagtaccacctttgagacctaagttcttttgatacctttgagaagagccactgagcctgagttgaaatatttttagcttagtcatctgtgtttgctataggagaaattgtaacacaagaaataactcctttttacatgatcatttatatctatatacatatatatacttgcatacactatcactgcattaaaaaatgagtttgggctgggcatggtggctcacacctataatcccaacactttcggaggccaaggagggacaaacgaacccttgaggccaggagttccagactaacttgggcaacacagggcgacccccatctctacaaaacataaaagatttttaaaaaattagccaggcatggtggcacatgcctgtggtctcagctacttgggaggctgaggcaggagaatcatttgagcccaggaggtcaaggctgcagtgagctttgatcacaccactgcactccagcctgggcaacagagcaagaccccatcctccaccccccccaaaaaatagaaagaaaaaaaaagtttgcactaattgaggtacatctgcaagtgagactttttgtcaggaaaaggcaatatatcaggtctcctcaggacgatggaggccttatatggtgtgttaccttgaaaactgaatatcaacgttcaccttgattcaggaaagctgggtgctgtctccatgccatgaatcatgagagcaaaggatcactgcttaaaaatactgaatttaccttcacaaaagatttctaaagatttatgtaatgtgttttaaaagcgccagtaaaccatcggatcaattggaaagaaggcaactcttcagcctttgttatctagctgaaaacaaatgacaactttcaaaacattggcagtagttgttgaaaaagacgtctattgttcaaagtttctttctccttaaaggacggtgttccaatgaattcagtagagcccactttcctccactgtggaggaagaatccctaagagatactcaaatgattaaattaaaattggatcatcaaactcaagagaggcataaacttagacacagtcttgcatttttgtctttcctgaactcttctgccattttcctccttcactcgtcctgaaaatctgcaagttacataataaaactttagatatttgtctgacaaagtgtaattactcaactgaataaatgactgagaacaagttacaaaaggaatcatgaatcctggtaaacaataaagaagattcagacactgagggaaaaaaataaagctttttacttaaataatgca

SEQ ID NO: 6575 - DNA, 461 bp, Homo sapiens
  source 1..461: mol_type = unassigned DNA
cagaggaaagatgccctcaaggctgtagacactgtcctgaagtacatgaccaagtggatccaggagcggggcctgcaggaccgcctgaacgtcattattttctcggatcacggaatgaccgacattttctggatggacaaagtgattgagctgaataagtacatcagcctgaatgacctgcagcaagtgaaggaccgcgggcctgttgtgagcctttggccggcccctgggaaacactctgagatatataacaaactgagcacagtggaacacatgactgtctacgagaaagaagccatcccaagcaggttctattacaagaaaggaaagtttgtctctcctttgactttagtggctgatgaaggctggttcataactgaggtaattatgaaatatgtgccaatttattctctatgcaaattctataaaacagtccaaagttaaataatagttactcaagt

SEQ ID NO: 6576 - DNA, 852 bp, Homo sapiens
  source 1..852: mol_type = unassigned DNA
ctaggttagacggttcaagacctggagactggctttgagcaaccctaggattaccttggcttgaattccatccaatacgtctctttcttcatatattggagaggagattaggacccagacgggcacagagggaagaccacatatagacacagggggaaggcggctgcctgcagaccaaggagagaggcctcagaagaaatcaaccctgatgacatcttgatctcaaactcccagcctccagaactgccgccattgtgaagtccatcagatgatcgggaactacatgtgggaccccaccaccaacaagtcctttgacattggcgtcaacaaagacagcctaatgcctctctggtggaatggatcagaacctctgtgggtcactctgaccaaggccaaaaggaaggtctacatgtactactggccaggctgtgaggttgagattctgggtgtcagacccacctactgcctagaatataaaaatgtcccaacggatatcaattttgccaatgcagtcagcgatgctcttgactccttcaagagtggccgggccgacctggcagccatataccatgagcgcattgacgtggaaggccaccactacgggcctgcatctccgcagaggaaagatgccctcaaggctgtagacactgtcctgaagtacatgaccaagtggatccaggagcggggcctgcaggaccgcctgaacgtcattattttctcggatcacggaatgaccgacattttctggatggacaaagtgattgagctgaataagtacatcagcctgaatgacctgcagcaagtgaaggaccgcgggcctgttgtgagcctttggccggcccctgggaaaca

SEQ ID NO: 6577 - DNA, 566 bp, Homo sapiens
  source 1..566: mol_type = unassigned DNA
agtgatgaggcgctggagtcattgcctggtttcaaagagattgtgagcaggggagtaaaagtggattacttgactccagacttccctagtctctcgtatcccaattattataccctaatgactggtaaaatgatacggagaagaaaaagcttgtgtcgttcaggttccccatttgtgatttgcagcatctacaaaagaccaaccagcaaaaactccacaaaacaaacaaaaacctcggctaacccagactgcctgggcttgggatagctgattttcctaaggacggccttcatctgaaattgccaggactccaaacgcgactgcatgaacctgagcctctatccgtgcgataatagaatgtgcagccctctctctgctcacagagttggattcccagtttctggtttgtttttcagctataacctttgtaaaggcagcgagaggctctcagaaagaatttagcaaactatccagggaggctgctaagaatgcactgttattgctggttatgcgggactcagctatgcactctgagcacagagagagctctgctaattatgttaaca

SEQ ID NO: 6578 - DNA, 2095 bp, Homo sapiens
  source 1..2095: mol_type = unassigned DNA
ccgcactctccgggtccacgcatcgtcctcccgcgcgcccgcccgcccatggccgggaaggtgcggtcactgctgccgccgctgctgctggccgccgcgggcctcgccggcctcctactgctgtgcgtccccacccgcgacgtccgggagccgcccgccctcaagtatggcatcgtcctggacgctggttcttcacacacgtccatgtttatctacaagtggccggcagacaaggagaacgacacaggcattgtgggccagcacagctcctgtgatgttccaggtgggggcatctccagctatgcagacaacccttctggggccagccagagtcttgttggatgcctcgaacaggcgcttcaggatgtgcccaaagagagacacgcgggcacacccctctacctgggagccacagcgggtatgcgcctgctcaacctgaccaatccagaggcctcgaccagtgtgctcatggcagtgactcacacactgacccagtacccctttgacttccggggtgcacgcatcctctcgggccaggaagagggggtgtttggctgggtgactgccaactacctgctggagaacttcatcaagtacggctgggtgggccggtggttccggccacggaaggggacactgggggccatggacctggggggtgcctctacccagatcacttttgagacaaccagtccagctgaggacagagccagcgaggtccagctgcatctctacggccagcactaccgagtctacacccacagcttcctctgctatggccgtgaccaggtcctccagaggctgctggccagcgccctccagacccacggcttccacccctgctggccgaggggcttttccacccaagtgctgctcggggatgtgtaccagtcaccatgcaccatggcccagcggccccagaacttcaacagcagtgccagggtcagcctgtcagggagcagtgacccccacctctgccgagatctggtttctgggctcttcagcttctcctcctgccccttctcccgatgctctttcaatggggtcttccagcccccagtggctgggaactttgtggccttctctgccttcttctacactgtggactttttgcggacttcgatggggctgcccgtggccaccctgcagcagctggaggcagccgcagtgaatgtctgcaaccagacctgggctcagctgcaagctcgggtgccagggcaacgggcccgcctggccgactactgcgccggggccatgttcgtgcagcagctgctgagtcgcggctacggcttcgacgagcgcgccttcggcggcgtgatcttccagaagaaggccgcggacactgcagtgggctgggcgctcggctacatgctgaacctgaccaacctgatccccgccgacccgccggggctgcgcaagggcacagacttcagctcctgggtcgtcctcctgctgctcttcgcctccgcgctcctggctgcgcttgtcctgctgctgcgtcaggtgcactccgccaagctgccaagcaccatttaggggccgacgggggcagctgccccatccctcccccaacccctgtatccccaccccgtactcccacccctcccacaacccctgtacctcccacccctgtatccccacccctccacccacccctctcccaacctctctccccgcccctgtatcctgcattcctccacccaccctctatcccccaccgctccaccccaccactgtcttctccatccttccaccccaccctcagcgtctctgcccctaaggcagcccaggaaataggaactgagactctggtacccacaggagcctgggtgggcaaagagcgctcaatccagctccttgaacccctccagcccgcttcagcctgggcatcactgcaggccccgtgctcctcctcctcctcctcagggctgggtctccagagagtggggccttggtcctgagaatcagcccttagaggctccttctgtgtagtctgggtctgtactggggagggtcacagcccacgggctggcagccagcccagcacctacttgtaaaaattttgtaataaaaagtttttcctagagacgtgaaa

SEQ ID NO: 6579 - DNA, 1427 bp, Homo sapiens
  source 1..1427: mol_type = unassigned DNA
ctggcttctgccactggttccctccatggtaccacacaagggaagatggaagtgggtctgggcaccgggagtgtgcccaccggagactccaagagaaacgtacgagtcgtcccaggaccggggtggtgagcgaggccccattttgtcctcccagggcctagtctcagacagactggggtgagggaggtggggacaggcggcgagccagcgggcagactcaggcctggagctcgtcctgttcccctggccacacaccaaggtgttgctgcctcctgctccctggtggccatgcctgctgtccctcctcactggccttccaggcatgggcgctggctggggagggatggaagcgtgccctgccgggggtgcccctcggactcggtcttgccattcgtgtccgggcctgtgtggtggtctctggcctcgcacggcccgtgtgtgtctggggaggggtgaagcacgccgccggccccctctccccgtggggccgagacctcctggtggtcgcctgcctgacggtgtcccgcccgcgtcccagctgcaagctcgggtgccagggcaacgggcccgcctggccgactactgcgccggggccatgttcgtgcagcagctgctgagtcgcggctacggcttcgacgagcgcgccttcggcggcgtgatcttccagaagaaggccgcggacactgcagtgggctgggcgctcggctacatgctgaacctgaccaacctgatccccgccgacccgccggggctgcgcaagggcacagacttcagctcctgggtcgtcctcctgctgctcttcgcctccgcgctcctggctgcgcttgtcctgctgctgcgtcaggtgcactccgccaagctgccaagcaccatttaggggccgacgggggcagctgccccatccctcccccaacccctgtatccccaccccgtactcccacccctcccacaacccctgtacctcccacccctgtatccccacccctccacccacccctctcccaacctctctccccgcccctgtatcctgcattcctccacccaccctctatcccccaccgctccaccccaccactgtcttctccatccttccaccccaccctcagcgtctctgcccctaaggcagcccaggaaataggaactgagactctggtacccacaggagcctgggtgggcaaagagcgctcaatccagctccttgaacccctccagcccgcttcagcctgggcatcactgcaggccccgtgctcctcctcctcctcctcagggctgggtctccagagagtggggccttggtcctgagaatcagcccttagaggctccttctgtgtagtctgggtctgtactggggagggtcacagcccacgggctggcagccagcccagcacctacttgtaaaaattttgtaataaaaagtttttcctaga

SEQ ID NO: 6580 - DNA, 1500 bp, Homo sapiens
  source 1..1500: mol_type = unassigned DNA
ctcccgcgcgcccgcccgcccatggccgggaaggtgcggtcactgctgccgccgctgctgctggccgccgcgggcctcgccggcctcctactgctgtgcgtccccacccgcgacgtccgggagccgcccgccctcaagtatggcatcgtcctggacgctggttcttcacacacgtccatgtttatctacaagtggccggcagacaaggagaacgacacaggcattgtgggccagcacagctcctgtgatgttccaggtgggggcatctccagctatgcagacaacccttctggggccagccagagtcttgttggatgcctcgaacaggcgcttcaggatgtgcccaaagagagacacgcgggcacacccctctacctgggagccacagcgggtatgcgcctgctcaacctgaccaatccagaggcctcgaccagtgtgctcatggcagtgactcacacactgacccagtacccctttgacttccggggtgcacgcatcctctcgggccaggaagagggggtgtttggctgggtgactgccaactacctgctggagaacttcatcaagtacggctgggtgggccggtggttccggccacggaaggggacactgggggccatggacctggggggtgcctctacccagatcacttttgagacaaccagtccagctgaggacagagccagcgaggtccagctgcatctctacggccagcactaccgagtctacacccacagcttcctctgctatggccgtgaccaggtcctccagaggctgctggccagcgccctccagacccacggcttccacccctgctggccgaggggcttttccacccaagtgctgctcggggatgtgtaccagtcaccatgcaccatggcccagcggccccagaacttcaacagcagtgccagggtcagcctgtcagggagcagtgacccccacctctgccgagatctggtttctgggctcttcagcttctcctcctgccccttctcccgatgctctttcaatggggtcttccagcccccagtggctgggaactttgtggccttctctgccttcttctacactgtggactttttgcggacttcgatggggctgcccgtggccaccctgcagcagctggaggcagccgcagtgaatgtctgcaaccagacctgggctcagcagctgctgagtcgcggctacggcttcgacgagcgcgccttcggcggcgtgatcttccagaagaaggccgcggacactgcagtgggctgggcgctcggctacatgctgaacctgaccaacctgatccccgccgacccgccggggctgcgcaagggcacagacttcagctcctgggtcgtcctcctgctgctcttcgcctccgcgctcctggctgcgcttgtcctgctgctgcgtcaggtgcactccgccaagctgccaagcaccatttaggggccgacgggggcagctgccccatccctcccccaacccctgtatccccaccccgtactc

SEQ ID NO: 6581 - DNA, 868 bp, Homo sapiens
  source 1..868: mol_type = unassigned DNA
cccatggccgggaaggtgcggtcactgctgccgccgctgctgctggccgccgcgggcctcgccggcctcctactgctgtgcgtccccacccgcgacgtccgggagccgcccgccctcaagtatggcatcgtcctggacgctggttcttcacacacgtccatgtttatctacaagtggccggcagacaaggagaacgacacaggcattgtgggccagcacagctcctgtgatgttccaggtgggggcatctccagctatgcagacaacccttctggggccagccagagtcttgttggatgcctcgaacaggcgcttcaggatgtgcccaaagagagacacgcgggcacacccctctacctgggagccacagcgggtatgcgcctgctcaatacggctgggtgggccggtggttccggccacggaaggggacactgggggccatggacctggggggtgcctctacccagatcacttttgagacaaccagtccagctgaggacagagccagcgaggtccagctgcatctctacggccagcactaccgagtctacacccacagcttcctctgctatggccgtgaccaggtcctccagaggctgctggccagcgccctccagacccacggcttccacccctgctggccgaggggcttttccacccaagtgctgctcggggatgtgtaccagtcaccatgcaccatggcccagcggccccagaacttcaacagcagtgccagggtcagcctgtcagggagcagtgacccccacctctgccgagatctggtttctgggctcttcagcttctcctcctgccccttctcccgatgctctttcaatggggtcttccagcccccagtggctgggaactt

SEQ ID NO: 6582 - DNA, 3514 bp, Homo sapiens
  source 1..3514: mol_type = unassigned DNA
cagaattgttgggcttcatcttggctctgtgctgcctggaggggagacctaggataggctcctgatctgcaaaatggggataatcccagctgccacttaagtgagacaagtgcctgactgacagaagttcttgcccccggggagctggtgtggacagaggagggagcctagacatggaggagaaggactacagtgaggccgatggcctttcggagaggaccacgcccagcaaggcccagaaatcgccccagaagattgccaagaaatacaagagtgccatctgccgggtcactctgcttgatgcctcggagtatgagtgtgaggtggagaaacatggccggggccaggtgctgtttgacctggtctgtgaacacctcaacctcctagagaaggactacttcggcctgaccttctgtgatgctgacagccagaagaactggctggacccctccaaggagatcaagaagcagatccggagtagcccctggaattttgccttcacagtcaagttctacccgcctgatcctgcccagctgacagaagacatcacaagatactacctgtgcctgcagctgcgggcagacatcatcacgggccggctgccatgctcctttgtcacgcatgccctactgggctcctacgctgtgcaggctgagctgggtgactatgatgctgaggagcatgtgggcaactatgtcagcgagctccgcttcgcccctaaccagacccgggagctggaggagaggatcatggagctgcataagacatatagggggatgaccccgggagaagcagaaatccacttcttagagaatgccaagaagctttccatgtacggagtagacctgcaccatgccaaggactctgagggcatcgacatcatgttaggcgtttgtgccaatggcctgctcatctaccgggaccggctgagaatcaaccgctttgcctggcccaagatcctcaagatctcctacaagaggagtaacttctatatcaagatccggcctggggagtatgagcaatttgagagcacaattggctttaagctcccaaaccaccggtcagccaagagactgtggaaggtctgcatcgagcatcatacattcttccggctggtgtcccctgagcccccacccaagggcttcctggtgatgggctccaagttccggtacagtgggaggacccaggcacagactcgccaggccagcgccctcattgaccggcctgcacccttctttgagcgttcttccagcaaacggtacaccatgtcccgcagccttgatggagcagagttctcccgcccagcctcggtcagcgagaaccatgatgcagggcctgacggtgacaagcgggatgaggatggcgagtctggggggcaacggtcagaggctgaggagggagaggtcaggactccaaccaagatcaaggagctaaagttcttagacaagccagaagatgtcttgctgaagcaccaggccagcatcaatgagctcaaaaggaccctgaaggagcccaacagcaaactcatccaccgggatcgagactgggaacgggagcgcaggctgccctcctcccccgcctccccctcccccaagggcacccctgagaaagccaatgagagagcagggctgagggagggctccgaggagaaagtcaaaccaccacgtccccgggccccagagagtgacacaggcgatgaggaccaggaccaggagagggacacggtgttcctgaaggacaaccacctggccattgagcgcaagtgctccagcatcacggtcagctctacgtctagcctggaggctgaggtggacttcacggtcattggtgactaccatggcagcgccttcgaagacttctcccgcagcctgcctgagctcgaccgggacaaaagcgactcggacactgagggcctgctgttctcccgggatctcaacaagggggcccccagccaggatgatgagtctgggggcattgaggacagcccggatcgaggggcctgctccaccccggatatgccccagtttgagcccgtgaaaacagaaaccatgactgtcagcagtctggccattagaaagaagattgagccggaggccgtactgcagaccagagtctccgctatggataacacccaggagaacagtctcaagtccgggaagggggcagctgccatgatcccaggcccacagacggtggccacggaaatccgttctctttctccgatcatcgggaaagatgtcctcaccagcacctacggcgccactgcggaaaccctctcaacctccaccaccacccatgtcaccaaaactgtgaaaggagggttttctgagacaaggatcgagaagcgaatcatcattactggggatgaagatgtcgatcaagaccaggccctggctttggccatcaaggaggccaaactgcagcatcctgatatgctggtaaccaaagctgtcgtatacagagaaacagacccatccccagaggagagggacaagaagccacaggaatcctgacctctgtgaagagatcctggcatttctggtccaacccaagccagagaaccattaagaaggggccttcattctggattctccgacgcaacactgacgtcccagctgcgacgtactgtcactgatgagagactgggaagggaaaagcatatatatatagatatatagagatatagatatatatacaggaaacaccgcatccttgcactgctgctggggctggcagagcagttggctgacagcaacaaccgacatctgaacacctacatttcctttgcagacaaattgaagaactggtgggatttttttcaagaaaaaaaattatataataactataatcccttgctcacccctttcccccgccaaataagaaacgcaagccagaccacgatgattgtagaagtccctcccgccctggttctgcacgttacagttagcagacgagcaattccatttgttcttctccagcatctctaaggcccacttgaatgcaaaggaaaacacttgcacagcaaagcaagagaagtcacagcagcaagacacgcacagtcaaccattttccgagaaaaaaagaaaattccccacttggaaagaaagaggaggaacactggattcttactttctggatcttgacactgggctgcaaaacctaccttcctctctcccgcctcccctcaccctcaactctcaatgtcttgctgtcattttctgtctcggctccctcctcccccttcccccttcccccaccccacacccttcaccctctgtgtcctggtccttctgagggccactgcagatgactctcctttgaaatgagaaaaagaaaagaaagcaagaacagaaaacgaagccacaggaagggaagtagacattgtatgcttatggtttctcattatgaaggtgcagcttgtaggaggtttgtacggatgtgctttgaagttatgtatattacatataacaggaaaaaatattaaaataaacagtgctggtaagtatgaagctga

SEQ ID NO: 6583 - DNA, 210 bp, Homo sapiens
  source 1..210: mol_type = unassigned DNA
ctttcagatgctatcttgggctcgctgaacacgggtgcctgactgacagaagttcttgcccccggggagctggtgtggacagaggagggagcctagacatggaggagaaggactacagtgaggccgatggcctttcggagaggaccacgcccagcaaggcccagaaatcgccccagaagattgccaagaaatacaagagtgccatctgcc

SEQ ID NO: 6584 - DNA, 652 bp, Homo sapiens
  source 1..652: mol_type = unassigned DNA
agagcaggagcgagcgcgcgagagagcggggcatttctgcgcagctctagcgcgcctcggagcccgccggggcagccgccggacaccaggaccgcgagccagacagctcccggaagccgcgccgccgccgccaggcgtgctggtcaccatgacaacagagacaggccccgactctgaggtgaagaaagctcaggaggaggccccgcagcagcccgaggctgctgccgctgtgaccacccctgtgacccctgcaggccacggccacccagaggccaactccaatgagaagcatccatcccagcaggacacgcggcctgctgaacagagcctagacatggaggagaaggactacagtgaggccgatggcctttcggagaggaccacgcccagcaaggcccagaaatcgccccagaagattgccaagaaatacaagagtgccatctgccgggtcactctgcttgatgcctcggagtatgagtgtgaggtggagaaacatggccggggccaggtgctgtttgacctggtctgtgaacacctcaacctcctagagaaggactacttcggcctgaccttctgtgatgctgacagccagaagaactggctggacccctccaaggagatcaagaagcagatccggagtagcccctggaat

SEQ ID NO: 6585 - DNA, 896 bp, Homo sapiens
  source 1..896: mol_type = unassigned DNA
cgagagagcggggcatttctgcgcagctctagcgcgcctcggagcccgccggggcagccgccggacaccaggaccgcgagccagacagctcccggaagccgcgccgccgccgccagagcctagacatggaggagaaggactacagtgaggccgatggcctttcggagaggaccacgcccagcaaggcccagaaatcgccccagaagattgccaagaaatacaagagtgccatctgccgggtcactctgcttgatgcctcggagtatgagtgtgaggtggagaaacatggccggggccaggtgctgtttgacctggtctgtgaacacctcaacctcctagagaaggactacttcggcctgaccttctgtgatgctgacagccagaagaactggctggacccctccaaggagatcaagaagcagatccggagtagcccctggaattttgccttcacagtcaagttctacccgcctgatcctgcccagctgacagaagacatcacaagatactacctgtgcctgcagctgcgggcagacatcatcacgggccggctgccatgctcctttgtcacgcatgccctactgggctcctacgctgtgcaggctgagctgggtgactatgatgctgaggagcatgtgggcaactatgtcagcgagctccgcttcgcccctaaccagacccgggagctggaggagaggatcatggagctgcataagacatatagggggatgaccccgggagaagcagaaatccacttcttagagaatgccaagaagctttccatgtacggagtagacctgcaccatgccaaggactctgagggcatcgacatcatgttaggcgtttgtgccaatggcctgctcatctaccgggaccggctgagaatcaaccgcttt

SEQ ID NO: 6586 - DNA, 3631 bp, Homo sapiens
  source 1..3631: mol_type = unassigned DNA
gcatttctgcgcagctctagcgcgcctcggagcccgccggggcagccgccggacaccaggaccgcgagccagacagctcccggaagccgcgccgccgccgccaggtgcctgactgacagaagttcttgcccccggggagctggtgtggacagaggaggggccctggaagtgaccactgggctgagtagctcatcagcttccccacactgaagcccgaggggtctcctgctggcttctgagagctgacggaacaggttccagcaaggcagaccctgacacagaagccagacctgtccagcagggaccccatacactgagcctagacatggaggagaaggactacagtgaggccgatggcctttcggagaggaccacgcccagcaaggcccagaaatcgccccagaagattgccaagaaatacaagagtgccatctgccgggtcactctgcttgatgcctcggagtatgagtgtgaggtggagaactggctggacccctccaaggagatcaagaagcagatccggagtagcccctggaattttgccttcacagtcaagttctacccgcctgatcctgcccagctgacagaagacatcacaagatactacctgtgcctgcagctgcgggcagacatcatcacgggccggctgccatgctcctttgtcacgcatgccctactgggctcctacgctgtgcaggctgagctgggtgactatgatgctgaggagcatgtgggcaactatgtcagcgagctccgcttcgcccctaaccagacccgggagctggaggagaggatcatggagctgcataagacatatagggggatgaccccgggagaagcagaaatccacttcttagagaatgccaagaagctttccatgtacggagtagacctgcaccatgccaaggactctgagggcatcgacatcatgttaggcgtttgtgccaatggcctgctcatctaccgggaccggctgagaatcaaccgctttgcctggcccaagatcctcaagatctcctacaagaggagtaacttctatatcaagatccggcctggggagtatgagcaatttgagagcacaattggctttaagctcccaaaccaccggtcagccaagagactgtggaaggtctgcatcgagcatcatacattcttccggctggtgtcccctgagcccccacccaagggcttcctggtgatgggctccaagttccggtacagtgggaggacccaggcacagactcgccaggccagcgccctcattgaccggcctgcacccttctttgagcgttcttccagcaaacggtacaccatgtcccgcagccttgatggagcagagttctcccgcccagcctcggtcagcgagaaccatgatgcagggcctgacggtgacaagcgggatgaggatggcgagtctggggggcaacggtcagaggctgaggagggagaggtcaggactccaaccaagatcaaggagctaaagttcttagacaagccagaagatgtcttgctgaagcaccaggccagcatcaatgagctcaaaaggaccctgaaggagcccaacagcaaactcatccaccgggatcgagactgggaacgggagcgcaggctgccctcctcccccgcctccccctcccccaagggcacccctgagaaagccaatgagagagcagggctgagggagggctccgaggagaaagtcaaaccaccacgtccccgggccccagagagtgacacaggcgatgaggaccaggaccaggagagggacacggtgttcctgaaggacaaccacctggccattgagcgcaagtgctccagcatcacggtcagctctacgtctagcctggaggctgaggtggacttcacggtcattggtgactaccatggcagcgccttcgaagacttctcccgcagcctgcctgagctcgaccgggacaaaagcgactcggacactgagggcctgctgttctcccgggatctcaacaagggggcccccagccaggatgatgagtctgggggcattgaggacagcccggatcgaggggcctgctccaccccggatatgccccagtttgagcccgtgaaaacagaaaccatgactgtcagcagtctggccattagaaagaagattgagccggaggccgtactgcagaccagagtctccgctatggataacacccagcaggttgatgggagtgcctcagtggggagggagttcatagcaaccactccctccatcaccacggagaccatatcgaccaccatggagaacagtctcaagtccgggaagggggcagctgccatgatcccaggcccacagacggtggccacggaaatccgttctctttctccgatcatcgggaaagatgtcctcaccagcacctacggcgccactgcggaaaccctctcaacctccaccaccacccatgtcaccaaaactgtgaaaggagggttttctgagacaaggatcgagaagcgaatcatcattactggggatgaagatgtcgatcaagaccaggccctggctttggccatcaaggaggccaaactgcagcatcctgatatgctggtaaccaaagctgtcgtatacagagaaacagacccatccccagaggagagggacaagaagccacaggaatcctgacctctgtgaagagatcctggcatttctggtccaacccaagccagagaaccattaagaaggggccttcattctggattctccgacgcaacactgacgtcccagctgcgacgtactgtcactgatgagagactgggaagggaaaagcatatatatatagatatatagagatatagatatatatacaggaaacaccgcatccttgcactgctgctggggctggcagagcagttggctgacagcaacaaccgacatctgaacacctacatttcctttgcagacaaattgaagaactggtgggatttttttcaagaaaaaaaattatataataactataatcccttgctcacccctttcccccgccaaataagaaacgcaagccagaccacgatgattgtagaagtccctcccgccctggttctgcacgttacagttagcagacgagcaattccatttgttcttctccagcatctctaaggcccacttgaatgcaaaggaaaacacttgcacagcaaagcaagagaagtcacagcagcaagacacgcacagtcaaccattttccgagaaaaaaagaaaattccccacttggaaagaaagaggaggaacactggattcttactttctggatcttgacactgggctgcaaaacctaccttcctctctcccgcctcccctcaccctcaactctcaatgtcttgctgtcattttctgtctcggctccctcctcccccttcccccttcccccaccccacacccttcaccctctgtgtcctggtccttctgagggccactgcagatgactctcctttgaaatgagaaaaagaaaagaaagcaagaacagaaaacgaagccacaggaagggaagtagacattgtatgcttatggtttctcattatgaaggtgcagcttgtaggaggtttgtacggatgtgctttgaagttatgtatattacatataacaggaaaaaatattaaaataaacagtgctggt

SEQ ID NO: 6587 - DNA, 3287 bp, Homo sapiens
  source 1..3287: mol_type = unassigned DNA
atttctgcgcagctctagcgcgcctcggagcccgccggggcagccgccggacaccaggaccgcgagccagacagctcccggaagccgcgccgccgccgccaggtgcctgactgacagaagttcttgcccccggggagctggtgtggacagaggaggggctgctgttcgtacctgcctcatggttttcttggggaggatcaatgaggtagaacctgcaaagggcttagcagagagcctagcacctactgagcgctcagtaaagagcctagacatggaggagaaggactacagtgaggccgatggcctttcggagaggaccacgcccagcaaggcccagaaatcgccccagaagattgccaagaaatacaagagtgccatctgccgggtcactctgcttgatgcctcggagtatgagtgtgaggtggagaaacatggccggggccaggtgctgtttgacctggtctgtgaacacctcaacctcctagagaaggactacttcggcctgaccttctgtgatgctgacagccagaagaactggctggacccctccaaggagatcaagaagcagatccggagtagcccctggaattttgccttcacagtcaagttctacccgcctgatcctgcccagctgacagaagacatcacaagatactacctgtgcctgcagctgcgggcagacatcatcacgggccggctgccatgctcctttgtcacgcatgccctactgggctcctacgctgtgcaggctgagctgggtgactatgatgctgaggagcatgtgggcaactatgtcagcgagctccgcttcgcccctaaccagacccgggagctggaggagaggatcatggagctgcataagacatatagggggatgaccccgggagaagcagaaatccacttcttagagaatgccaagaagctttccatgtacggagtagacctgcaccatgccaaggactctgagggcatcgacatcatgttaggcgtttgtgccaatggcctgctcatctaccgggaccggctgagaatcaaccgctttgcctggcccaagatcctcaagatctcctacaagaggagtaacttctatatcaagatccggcctggggagtatgagcaatttgagagcacaattggctttaagctcccaaaccaccggtcagccaagagactgtggaaggtctgcatcgagcatcatacattcttccggctggtgtcccctgagcccccacccaagggcttcctggtgatgggctccaagttccggtacagtgggaggacccaggcacagactcgccaggccagcgccctcattgaccggcctgcacccttctttgagcgttcttccagcaaacggtacaccatgtcccgcagccttgatggagcagagttctcccgcccagcctcggtcagcgagaaccatgatgcagggcctgacggtgacaagcgggatgaggatggcgagtctggggggcaacggtcagaggctgaggagggagaggtcaggactccaaccaagatcaaggagctaaagttcttagacaagccagaagatgtcttgctgaagcaccaggccagcatcaatgagctcaaaaggaccctgaaggagcccaacagcaaactcatccaccgggatcgagactgggaacgggagcgcaggctgccctcctcccccgcctccccctcccccaagggcacccctgagaaagccaatgagcccgtgaaaacagaaaccatgactgtcagcagtctggccattagaaagaagattgagccggaggccgtactgcagaccagagtctccgctatggataacacccagcaggttgatgggagtgcctcagtggggagggagttcatagcaaccactccctccatcaccacggagaccatatcgaccaccatggagaacagtctcaagtccgggaagggggcagctgccatgatcccaggcccacagacggtggccacggaaatccgttctctttctccgatcatcgggaaagatgtcctcaccagcacctacggcgccactgcggaaaccctctcaacctccaccaccacccatgtcaccaaaactgtgaaaggagggttttctgagacaaggatcgagaagcgaatcatcattactggggatgaagatgtcgatcaagaccaggccctggctttggccatcaaggaggccaaactgcagcatcctgatatgctggtaaccaaagctgtcgtatacagagaaacagacccatccccagaggagagggacaagaagccacaggaatcctgacctctgtgaagagatcctggcatttctggtccaacccaagccagagaaccattaagaaggggccttcattctggattctccgacgcaacactgacgtcccagctgcgacgtactgtcactgatgagagactgggaagggaaaagcatatatatatagatatatagagatatagatatatatacaggaaacaccgcatccttgcactgctgctggggctggcagagcagttggctgacagcaacaaccgacatctgaacacctacatttcctttgcagacaaattgaagaactggtgggatttttttcaagaaaaaaaattatataataactataatcccttgctcacccctttcccccgccaaataagaaacgcaagccagaccacgatgattgtagaagtccctcccgccctggttctgcacgttacagttagcagacgagcaattccatttgttcttctccagcatctctaaggcccacttgaatgcaaaggaaaacacttgcacagcaaagcaagagaagtcacagcagcaagacacgcacagtcaaccattttccgagaaaaaaagaaaattccccacttggaaagaaagaggaggaacactggattcttactttctggatcttgacactgggctgcaaaacctaccttcctctctcccgcctcccctcaccctcaactctcaatgtcttgctgtcattttctgtctcggctccctcctcccccttcccccttcccccaccccacacccttcaccctctgtgtcctggtccttctgagggccactgcagatgactctcctttgaaatgagaaaaagaaaagaaagcaagaacagaaaacgaagccacaggaagggaagtagacattgtatgcttatggtttctcattatgaaggtgcagcttgtaggaggtttgtacggatgtgctttgaagttatgtatattacatataacaggaaaaaatattaaaataaacagtgctggtaagtatgaagctgaca

SEQ ID NO: 6588 - DNA, 769 bp, Homo sapiens
  source 1..769: mol_type = unassigned DNA
cgcctcggagcccgccggggcagccgccggacaccaggaccgcgagccagacagctcccggaagccgcgccgccgccgccagccacagcacagccggacagaggaggtggattaggagttcccgggagggagcctgctcagcctttccctgacatttgggcaaatgtgtggggagatgcggagctcaaggcgtgctggtcaccatgacaacagagacaggccccgactctgaggtgaagaaagctcaggaggaggccccgcagcagcccgaggctgctgccgctgtgaccacccctgtgacccctgcaggccacggccacccagaggccaactccaatgagaagcatccatcccagcaggacacgcggcctgctgaacagagcctagacatggaggagaaggactacagtgaggccgatggcctttcggagaggaccacgcccagcaaggcccagaaatcgccccagaagattgccaagaaatacaagagtgccatctgccgggtcactctgcttgatgcctcggagtatgagtgtgaggtggagaaacatggccggggccaggtgctgtttgacctggtctgtgaacacctcaacctcctagagaaggactacttcggcctgaccttctgtgatgctgacagccagaagaactggctggacccctccaaggagatcaagaagcagatccggagtagcccctggaattttgccttcacagtcaagttctacccgcctgatcctgcccagctgacagaagacatcacaag

SEQ ID NO: 6589 - DNA, 896 bp, Homo sapiens
  source 1..896: mol_type = unassigned DNA
tccgcgtcccggggaccccgccgcgtcgggtcccgcgtgtgcgtgtggggtggccgccgagggcggcgggctcgattcccgatctttgggcactgacaggccggcgggccggctccaggagccgcgggcttcggtagctccttggatattcctttctgcaagtgatcaggcaaagataaattccattttacagatgaggaagctgaggcctgtgaagggaaagtgacctggctacacagccggaacctgaatgcaggacattctgcccctgtcgtggtggtattggagccagctaatgccaccattcgaggttgcaggagcagcacctgaccagaaatccagagcttgtttaaaggaccctgaaatttgaagactatccacacatatctactttctggatatccacggagagaccatgggctttttcatcaaggaggcctgagttcaaatccttcttctatgtctgattctctctgtgaccttgggtgcctgactgacagaagttcttgcccccggggagctggtgtggacagaggaggggcgtgctggtcaccatgacaacagagacaggccccgactctgaggtgaagaaagctcaggaggaggccccgcagcagcccgaggctgctgccgctgtgaccacccctgtgacccctgcaggccacggccacccagaggccaactccaatgagaagcatccatcccagcaggacacgcggcctgctgaacagagcctagacatggaggagaaggactacagtgaggccgatggcctttcggagaggaccacgcccagcaaggcccagaaatcgccccagaagattgccaagaaatacaagagtgccatctgccgggtcactctgcttgatgcctcggagtatgagtgtgaggtggag

SEQ ID NO: 6590 - DNA, 460 bp, Homo sapiens
  source 1..460: mol_type = unassigned DNA
tctcctgctggcttctgagagctgacggaacaggttccagcaaggcagaccctgacacagaagccagacctgtccagcagggaccccatacactgggaggcttcctgggaaactggaaggcagaagccacgcagacttctagtcctggttccactgcttactcggctgctgttcgtacctgcctcatggttttcttggggaggatcaatgaggtagaacctgcaaagggcttagcagagagcctagcacctactgagcgctcagtaaaggcgtgctggtcaccatgacaacagagacaggccccgactctgaggtgaagaaagctcaggaggaggccccgcagcagcccgaggctgctgccgctgtgaccacccctgtgacccctgcaggccacggccacccagaggccaactccaatgagaagcatccatcccagcaggacacgcggcctgctgaacag

SEQ ID NO: 6591 - DNA, 763 bp, Homo sapiens
  source 1..763: mol_type = unassigned DNA
tcggcatccatcagcgggcgggggtgtcgccgaacaggctgctccgcagagcccgccgcgaccccgcgccgccccgccccgcggcctgcctgccagaggagccgagggggccgcccctcgcccaacctgcccgacatggggaaccccgggcccagagcctagacatggaggagaaggactacagtgaggccgatggcctttcggagaggaccacgcccagcaaggcccagaaatcgccccagaagattgccaagaaatacaagagtgccatctgccgggtcactctgcttgatgcctcggagtatgagtgtgaggtggagaaacatggccggggccaggtgctgtttgacctggtctgtgaacacctcaacctcctagagaaggactacttcggcctgaccttctgtgatgctgacagccagaagaactggctggacccctccaaggagatcaagaagcagatccggagtagcccctggaattttgccttcacagtcaagttctacccgcctgatcctgcccagctgacagaagacatcacaagatactacctgtgcctgcagctgcgggcagacatcatcacgggccggctgccatgctcctttgtcacgcatgccctactgggctcctacgctgtgcaggctgagctgggtgactatgatgctgaggagcatgtgggcaactatgtcagcgagctccgcttcgcccctaaccagacccgggagctggaggagaggatcatggagctgcataagacatatag

SEQ ID NO: 6592 - DNA, 6266 bp, Homo sapiens
  source 1..6266: mol_type = unassigned DNA
catcagcgggcgggggtgtcgccgaacaggctgctccgcagagcccgccgcgaccccgcgccgccccgccccgcggcctgcctgccagaggagccgagggggccgcccctcgcccaacctgcccgacatggggaaccccgggcccaggcgtgctggtcaccatgacaacagagacaggccccgactctgaggtgaagaaagctcaggaggaggccccgcagcagcccgaggctgctgccgctgtgaccacccctgtgacccctgcaggccacggccacccagaggccaactccaatgagaagcatccatcccagcaggacacgcggcctgctgaacagagcctagacatggaggagaaggactacagtgaggccgatggcctttcggagaggaccacgcccagcaaggcccagaaatcgccccagaagattgccaagaaatacaagagtgccatctgccgggtcactctgcttgatgcctcggagtatgagtgtgaggtggagaaacatggccggggccaggtgctgtttgacctggtctgtgaacacctcaacctcctagagaaggactacttcggcctgaccttctgtgatgctgacagccagaagaactggctggacccctccaaggagatcaagaagcagatccggagtagcccctggaattttgccttcacagtcaagttctacccgcctgatcctgcccagctgacagaagacatcacaagatactacctgtgcctgcagctgcgggcagacatcatcacgggccggctgccatgctcctttgtcacgcatgccctactgggctcctacgctgtgcaggctgagctgggtgactatgatgctgaggagcatgtgggcaactatgtcagcgagctccgcttcgcccctaaccagacccgggagctggaggagaggatcatggagctgcataagacatatagggggatgaccccgggagaagcagaaatccacttcttagagaatgccaagaagctttccatgtacggagtagacctgcaccatgccaaggactctgagggcatcgacatcatgttaggcgtttgtgccaatggcctgctcatctaccgggaccggctgagaatcaaccgctttgcctggcccaagatcctcaagatctcctacaagaggagtaacttctatatcaagatccggcctggggagtatgagcaatttgagagcacaattggctttaagctcccaaaccaccggtcagccaagagactgtggaaggtctgcatcgagcatcatacattcttccggctggtgtcccctgagcccccacccaagggcttcctggtgatgggctccaagttccggtacagtgggaggacccaggcacagactcgccaggccagcgccctcattgaccggcctgcacccttctttgagcgttcttccagcaaacggtacaccatgtcccgcagccttgatggagcagagttctcccgcccagcctcggtcagcgagaaccatgatgcagggcctgacggtgacaagcgggatgaggatggcgagtctggggggcaacggtcagaggctgaggagggagaggtcaggactccaaccaagatcaaggagctaaagccggagcaggaaaccacgccgagacacaagcaggagttcttagacaagccagaagatgtcttgctgaagcaccaggccagcatcaatgagctcaaaaggaccctgaaggagcccaacagcaaactcatccaccgggatcgagactgggaacgggagcgcaggctgccctcctcccccgcctccccctcccccaagggcacccctgagaaagccaatgagagagcagggctgagggagggctccgaggagaaagtcaaaccaccacgtccccgggccccagagagtgacacaggcgatgaggaccaggaccaggagagggacacggtgttcctgaaggacaaccacctggccattgagcgcaagtgctccagcatcacggtcagctctacgtctagcctggaggctgaggtggacttcacggtcattggtgactaccatggcagcgccttcgaagacttctcccgcagcctgcctgagctcgaccgggacaaaagcgactcggacactgagggcctgctgttctcccgggatctcaacaagggggcccccagccaggatgatgagtctgggggcattgaggacagcccggatcgaggggcctgctccaccccggatatgccccagtttgagcccgtgaaaacagaaaccatgactgtcagcagtctggccattagaaagaagattgagccggaggccgtactgcagaccagagtctccgctatggataacacccagcaggttgatgggagtgcctcagtggggagggagttcatagcaaccactccctccatcaccacggagaccatatcgaccaccatggagaacagtctcaagtccgggaagggggcagctgccatgatcccaggcccacagacggtggccacggaaatccgttctctttctccgatcatcgggaaagatgtcctcaccagcacctacggcgccactgcggaaaccctctcaacctccaccaccacccatgtcaccaaaactgtgaaaggagggttttctgagacaaggatcgagaagcgaatcatcattactggggatgaagatgtcgatcaagaccaggccctggctttggccatcaaggaggccaaactgcagcatcctgatatgctggtaaccaaagctgtcgtatacagagaaacagacccatccccagaggagagggacaagaagccacaggaatcctgacctctgtgaagagatcctggcatttctggtccaacccaagccagagaaccattaagaaggggccttcattctggattctccgacgcaacactgacgtcccagctgcgacgtactgtcactgatgagagactgggaagggaaaagcatatatatatagatatatagagatatagatatatatacaggaaacaccgcatccttgcactgctgctggggctggcagagcagttggctgacagcaacaaccgacatctgaacacctacatttcctttgcagacaaattgaagaactggtgggatttttttcaagaaaaaaaattatataataactataatcccttgctcacccctttcccccgccaaataagaaacgcaagccagaccacgatgattgtagaagtccctcccgccctggttctgcacgttacagttagcagacgagcaattccatttgttcttctccagcatctctaaggcccacttgaatgcaaaggaaaacacttgcacagcaaagcaagagaagtcacagcagcaagacacgcacagtcaaccattttccgagaaaaaaagaaaattccccacttggaaagaaagaggaggaacactggattcttactttctggatcttgacactgggctgcaaaacctaccttcctctctcccgcctcccctcaccctcaactctcaatgtcttgctgtcattttctgtctcggctccctcctcccccttcccccttcccccaccccacacccttcaccctctgtgtcctggtccttctgagggccactgcagatgactctcctttgaaatgagaaaaagaaaagaaagcaagaacagaaaacgaagccacaggaagggaagtagacattgtatgcttatggtttctcattatgaaggtgcagcttgtaggaggtttgtacggatgtgctttgaagttatgtatattacatataacaggaaaaaatattaaaataaacagtgctggtaagtatgaagctgacattctaaaattataattatctgactgtgattgatgtatcctgaggttcctagatctcactgaactggcccagctaaggagacctggactctgggtgtgggttggctcacagtaggggctgacgggttcagtgtagtaatactgtgtgtggtgtttgtaattggttgattggtggggaggggtggggggccctaatggagaggtgtgggtttggcaagaaagaagcaacacagatgtcgtccccaaaatgccagttcaagacaccttctccctgcccccctggtagtaacagtcagggcctggtctgtgctcaggtactgggtcccagtctgggactctgctgctgaagttgccacagtagaggtccctggcttagtccttatctccctacggggcttgccttggttttcagtcttctctctctttctctcttttttttttttttgccacattctgcccttccctgaccccattgtaataaccaactccatatccaaagggaggtggtgctctcagccattgtagaagatggtggctttaacctgactgtctaaaaattcccagctaagccttttcctctactctcttccttgttctgaatcatttcttcttctcaggccaaagtagccatggtaaggaggcttcatggggcagaccctgaaagatcaaaactgcatttgcaaagccctcccctgtcccaggacaaagctgagactgacgggtgatgttgctcataggctccagctctgcataagaccttggcttggagacctccctctcagtcaacagctgaactctgagcttgtgcccagaaattaccccaagaccacaggaacccttcaagaagctcccatcacaagcttggcattgctctctgccacacgtgggcttcctcaggcttgtctgccacaagctacttctctgagctcagaaagtgccccttgatgagggaaaatgtcccactgcactgcgaatttctcagttccattttacctcccagtcctccttctaaaccagttaataaattcattccacaagtatttactgattacctgcttgtgccagggactattctcaggctgaagaaggtgggaggggagggcggaacctgaggagccacctgagccagctttatatttcaaccatggctggcccatctgagagcatctccccactctcgccaacctatcggggcatagcccagggatgcccccaggcggcccaggttagatgcgtccctttggcttgtcagtgatgacatacaccttagctgcttagctggtgctggcctgaggcagggcaggaaatcagaatagcatttgcttctctgggcaaatgggaagttcagcggggcagcagaatcagtggcattccccctggtgcaggccggtgggtccactccaactccccctgagtgtagcagcacactttccatacaccaggttctttctacaatcctggtggaaaagccacagaaccttcttcctgcccttcttgagagttccccctctttctgggtcaagagctggagtggtggctccatcctctctgggccacttcggtctaggaactcatctttgcaggaaccaggagtcctgagcacactgaacacacctcagagggaggatccttgttgtggattttgcacctggctttggggcaggggtgaagtgaccaggcttagcttgtggagtttatgggccaccagggtttggggaaatcaccatcccgcggatgctgtgacctcccttctacggagatgcaggcagtgccacgagggaggaggggacctgcaaagctagaatctagggcactgtttcctccccatccttctctttgtagagaatagagacgtttgtcttgtctgtcttcaacctacttttccttttctcttttttgtttctcatcctctctgtgccacctctccacccaggaggccatgtagcatagtggaaaaagtccctgagggcggttaggagttctgggtgaccatcctggctcagctcctaactcaccatgtgacatcaggctatccccattccccctcttgggcctcagtttcccgacttgcaaaataagcagaaagaaccagatgctctccagggtctttttctactttgctatctcatgggtcttcattttctcttattttgttttctctggatcttttccatctgagggtacaggaagtaccaggacctgtttcagtttttgaatcctgcaagcacattccaagactggcctgaaactgcatgagcaacatcactcgaaataattttttttttcaaaagcaccttaacaaccaattgcgatgctgtcctgttcctttttactcacacccttctctcctttctcgtccccatgctcccccacctcagtgctccgtgctgtatgcgtgtgctctctgttcttgtatactcaatataagtgaaataaatgtgtttgatgctgaaccata

SEQ ID NO: 6593 - DNA, 2652 bp, Homo sapiens
  source 1..2652: mol_type = unassigned DNA
ctggtcaccatgacaacagagacaggccccgactctgaggtgaagaaagctcaggaggaggccccgcagcagcccgaggctgctgccgctgtgaccacccctgtgacccctgcaggccacggccacccagaggccaactccaatgagaagcatccatcccagcaggacacgcggcctgctgaacagagcctagacatggaggagaaggactacagtgaggccgatggcctttcggagaggaccacgcccagcaaggcccagaaatcgccccagaagattgccaagaaatacaagagtgccatctgccgggtcactctgcttgatgcctcggagtatgagtgtgaggtggagaaacatggccggggccaggtgctgtttgacctggtctgtgaacacctcaacctcctagagaaggactacttcggcctgaccttctgtgatgctgacagccagaagaactggctggacccctccaaggagatcaagaagcagatccggagtagcccctggaattttgccttcacagtcaagttctacccgcctgatcctgcccagctgacagaagacatcacaagatactacctgtgcctgcagctgcgggcagacatcatcacgggccggctgccatgctcctttgtcacgcatgccctactgggctcctacgctgtgcaggctgagctgggtgactatgatgctgaggagcatgtgggcaactatgtcagcgagctccgcttcgcccctaaccagacccgggagctggaggagaggatcatggagctgcataagacatatagggggatgaccccgggagaagcagaaatccacttcttagagaatgccaagaagctttccatgtacggagtagacctgcaccatgccaaggactctgagggcatcgacatcatgttaggcgtttgtgccaatggcctgctcatctaccgggaccggctgagaatcaaccgctttgcctggcccaagatcctcaagatctcctacaagaggagtaacttctatatcaagatccggcctggggagtatgagcaatttgagagcacaattggctttaagctcccaaaccaccggtcagccaagagactgtggaaggtctgcatcgagcatcatacattcttccggctggtgtcccctgagcccccacccaagggcttcctggtgatgggctccaagttccggtacagtgggaggacccaggcacagactcgccaggccagcgccctcattgaccggcctgcacccttctttgagcgttcttccagcaaacggtacaccatgtcccgcagccttgatggagcagagttctcccgcccagcctcggtcagcgagaaccatgatgcagggcctgacggtgacaagcgggatgaggatggcgagtctggggggcaacggtcagaggctgaggagggagaggtcaggactccaaccaagatcaaggagctaaagccggagcaggaaaccacgccgagacacaagcaggagttcttagacaagccagaagatgtcttgctgaagcaccaggccagcatcaatgagctcaaaaggaccctgaaggagcccaacagcaaactcatccaccgggatcgagactgggaacgggagcgcaggctgccctcctcccccgcctccccctcccccaagggcacccctgagaaagccaatgagagagcagggctgagggagggctccgaggagaaagtcaaaccaccacgtccccgggccccagagagtgacacaggcgatgaggaccaggaccaggagagggacacggtgttcctgaaggacaaccacctggccattgagcgcaagtgctccagcatcacggtcagctctacgtctagcctggaggctgaggtggacttcacggtcattggtgactaccatggcagcgccttcgaagacttctcccgcagcctgcctgagctcgaccgggacaaaagcgactcggacactgagggcctgctgttctcccgggatctcaacaagggggcccccagccaggatgatgagtctgggggcattgaggacagcccggatcgaggggcctgctccaccccggatatgccccagtttgagcccgtgaaaacagaaaccatgactgtcagcagtctggccattagaaagaagattgagccggaggccgtactgcagaccagagtctccgctatggataacacccaggttgatgggagtgcctcagtggggagggagttcatagcaaccactccctccatcaccacggagaccatatcgaccaccatggagaacagtctcaagtccgggaagggggcagctgccatgatcccaggcccacagacggtggccacggaaatccgttctctttctccgatcatcgggaaagatgtcctcaccagcacctacggcgccactgcggaaaccctctcaacctccaccaccacccatgtcaccaaaactgtgaaaggagggttttctgagacaaggatcgagaagcgaatcatcattactggggatgaagatgtcgatcaagaccaggccctggctttggccatcaaggaggccaaactgcagcatcctgatatgctggtaaccaaagctgtcgtatacagagaaacagacccatccccagaggagagggacaagaagccacaggaatcctga

SEQ ID NO: 6594 - DNA, 803 bp, Homo sapiens
  source 1..803: mol_type = unassigned DNA
aacggtacaccatgtcccgcagccttgatggagcagagttctcccgcccagcctcggtcagcgagaaccatgatgcagggcctgacggtgacaagcgggatgaggatggcgagtctggggggcaacggtcagaggctgaggagggagaggtcaggactccaaccaagatcaaggagctaaagttcttagacaagccagaagatgtcttgctgaagcaccaggccagcatcaatgagctcaaaaggaccctgaaggagcccaacagcaaactcatccaccgggatcgagactgggaacgggagcgcaggctgccctcctcccccgcctccccctcccccaagggcacccctgagaaagccaatgagcccgtgaaaacagaaaccatgactgtcagcagtctggccattagaaagaagattgagccggaggccgtactgcagaccagagtctccgctatggataacacccaggttgatgggagtgcctcagtggggagggagttcatagcaaccactccctccatcaccacggagaccatatcgaccaccatggagaacagtctcaagtccgggaagggggcagctgccatgatcccaggcccacagacggtggccacggaaatccgttctctttctccgatcatcgggaaagatgtcctcaccagcacctacggcgccactgcggaaaccctctcaacctccaccaccacccatgtcaccaaaactgtgaaaggagggttttctgagacaaggatcgagaagcgaatcatcattactggggatgaagatgtcgatcaagaccag

SEQ ID NO: 6595 - DNA, 593 bp, Homo sapiens
  source 1..593: mol_type = unassigned DNA
gtcttgctgaagcaccaggccagcatcaatgagctcaaaaggaccctgaaggagcccaacagcaaactcatccaccgggatcgagactgggaacgggagcgcaggctgccctcctcccccgcctccccctcccccaagggcacccctgagaaagccaatgagcccgtgaaaacagaaaccatgactgtcagcagtctggccattagaaagaagattgagccggaggccgtactgcagaccagagtctccgctatggataacacccagcaggttgatgggagtgcctcagtggggagggagttcatagcaaccactccctccatcaccacggagaccatatcgaccaccatggagaacagtctcaagtccgggaagggggcagctgccatgatcccaggcccacagacggtggccacggaaatccgttctctttctccgatcatcgggaaagatgtcctcaccagcacctacggcgccactgcggaaaccctctcaacctccaccaccacccatgtcaccaaaactgtgaaaggagggttttctgagacaaggatcgagaagcgaatcatcattactggggatgaagatgtcga

SEQ ID NO: 6596 - DNA, 6665 bp, Homo sapiens
  source 1..6665: mol_type = unassigned DNA
gggatcgagactgggaacgggagcgcaggctgccctcctcccccgcctccccctcccccaagggcacccctgagaaagccaatgagtcccagaggacccaggacatctctcagcgggacttggtacctgagcctggagcagccgcaggcttggaagtgttcactcagaaaagcctcgcagcatctcctgagggttcagagcattgggtatttatagaaagagagtacactaggccagaagagctcggtctcctaaaagtgaccaccatgcagcaggaagaaaggcaggcaggccttgctggtatccttgccaacggcagactctccaaggtagacgttctggtggacaagttcaaagtggaagtggccacagaagaaatggtgggaaacagaagagcaaacacccagcaacaaggaaaaatgattgcaagtcctgaagactttgagtcagtgggggaggaaggcccctggatcagggaaagcccaggaggggctgccctggcttccggccgcacattggcagaaaagctcctcgagggctctgagctcagggcagacaccagagaggcaaccatcaggaaccgctgcatgtcagatggtcagccggagggccagacagagctgaggaaggggctggaggagcctcacacttgtgggagacccactgctccagggaccaggccagcagaggtggacgtcctctctccagcctccgacaagggaggactccagtcgtttctattggatccagcccacgcagaagccagagctgagttgagcaatgaaactgatacttcctttgcagagaggagcttctatttaaattatgaagaaaaagactcagaagaccaagtcctccctccacccctggaggagagaaaagggcgcctggatgcccctcccggaggtgagcccaggccgacgctgaattccttagacctgagggtttctgctgctgcttccagcaggagcaaggacgaagcccacatgacttccccaaaggaaggggcagggacccccaagaaccatggaggacctggtgacctgaagggatctcccgcaggacagacgtttgctgaaggctgggaagatgcccagtggggagtggaaggagagtttccccacctgacagccagcgcagcccgagaggaagggacccccgtgagtggagatttgctgggaaaggctgaggaaagtcccacagaggaactgaagaagcaccctcctcacagaggacagggcgtgcatcccgacccccaggcctgcgcccttcctcgggccatccctctgaatgtcaggaagccagtcaaaccagacagaggcaacttcccacccaaagagaggggagtggttcccacccagaaaggaggggctgagctgaaggaccgcgaggcttcagcatttcttcacatggaggtgatcattcccctgccagcctcccctggtcattctgaggacctggcagctctggaggaagcttctccaagcccaacctcccatgggtcaggggagccttcggagctcagggagccctttcttagacatgtccatctttcgaaagccagcccagagcccaaggaccaagtagggtttgtggtgtcccctgccacaggaggtgagcgcaggcctcctcccatcaccagcagaaagcccagagtagtccctgaagaagctgaggggcgcatacctctggggtttgggttcccttcagggaagcgaagggagatgacctctttccaggctggggaccaagagggctccctagaagatattagcaagacctcagtggccaacaaaattcggatatttgagacccacggagctgaaactcgccgaatgagtgagggtgaagcaaggtcccttccaaatgacgtatcttcagaggcacccgtgggacaagcagagcagcagcggagtacgctctcagacctgggcttcgcccaactccagcccccaggggactttgccagccccaaagccacacattccacagtgatacctctggctaccagacacttcagggaggacacttctgcatcctaccaggaagcacacacggaactagagcccgtgtcccccaattcaggctgtgaaaccacgctggcagaagctactggaactgggaacaaatccggagatgcggtcagggaagagaagcgctccaccaacttagcagccaacacccctgggaagggggggcgcctgagatttgccagcccctcgggccctcagagagcagggctgagggagggctccgaggagaaagtcaaaccaccacgtccccgggccccagagagtgacacaggcgatgaggaccaggaccaggagagggacacggtgttcctgaaggacaaccacctggccattgagcgcaagtgctccagcatcacggtcagctctacgtctagcctggaggctgaggtggacttcacggtcattggtgactaccatggcagcgccttcgaagacttctcccgcagcctgcctgagctcgaccgggacaaaagcgactcggacactgagggcctgctgttctcccgggatctcaacaagggggcccccagccaggatgatgagtctgggggcattgaggacagcccggatcgaggggcctgctccaccccggatatgccccagtttgagcccgtgaaaacagaaaccatgactgtcagcagtctggccattagaaagaagattgagccggaggccgtactgcagaccagagtctccgctatggataacacccaggttgatgggagtgcctcagtggggagggagttcatagcaaccactccctccatcaccacggagaccatatcgaccaccatggagaacagtctcaagtccgggaagggggcagctgccatgatcccaggcccacagacggtggccacggaaatccgttctctttctccgatcatcgggaaagatgtcctcaccagcacctacggcgccactgcggaaaccctctcaacctccaccaccacccatgtcaccaaaactgtgaaaggagggttttctgagacaaggatcgagaagcgaatcatcattactggggatgaagatgtcgatcaagaccaggccctggctttggccatcaaggaggccaaactgcagcatcctgatatgctggtaaccaaagctgtcgtatacagagaaacagacccatccccagaggagagggacaagaagccacaggaatcctgacctctgtgaagagatcctggcatttctggtccaacccaagccagagaaccattaagaaggggccttcattctggattctccgacgcaacactgacgtcccagctgcgacgtactgtcactgatgagagactgggaagggaaaagcatatatatatagatatatagagatatagatatatatacaggaaacaccgcatccttgcactgctgctggggctggcagagcagttggctgacagcaacaaccgacatctgaacacctacatttcctttgcagacaaattgaagaactggtgggatttttttcaagaaaaaaaattatataataactataatcccttgctcacccctttcccccgccaaataagaaacgcaagccagaccacgatgattgtagaagtccctcccgccctggttctgcacgttacagttagcagacgagcaattccatttgttcttctccagcatctctaaggcccacttgaatgcaaaggaaaacacttgcacagcaaagcaagagaagtcacagcagcaagacacgcacagtcaaccattttccgagaaaaaaagaaaattccccacttggaaagaaagaggaggaacactggattcttactttctggatcttgacactgggctgcaaaacctaccttcctctctcccgcctcccctcaccctcaactctcaatgtcttgctgtcattttctgtctcggctccctcctcccccttcccccttcccccaccccacacccttcaccctctgtgtcctggtccttctgagggccactgcagatgactctcctttgaaatgagaaaaagaaaagaaagcaagaacagaaaacgaagccacaggaagggaagtagacattgtatgcttatggtttctcattatgaaggtgcagcttgtaggaggtttgtacggatgtgctttgaagttatgtatattacatataacaggaaaaaatattaaaataaacagtgctggtaagtatgaagctgacattctaaaattataattatctgactgtgattgatgtatcctgaggttcctagatctcactgaactggcccagctaaggagacctggactctgggtgtgggttggctcacagtaggggctgacgggttcagtgtagtaatactgtgtgtggtgtttgtaattggttgattggtggggaggggtggggggccctaatggagaggtgtgggtttggcaagaaagaagcaacacagatgtcgtccccaaaatgccagttcaagacaccttctccctgcccccctggtagtaacagtcagggcctggtctgtgctcaggtactgggtcccagtctgggactctgctgctgaagttgccacagtagaggtccctggcttagtccttatctccctacggggcttgccttggttttcagtcttctctctctttctctcttttttttttttttgccacattctgcccttccctgaccccattgtaataaccaactccatatccaaagggaggtggtgctctcagccattgtagaagatggtggctttaacctgactgtctaaaaattcccagctaagccttttcctctactctcttccttgttctgaatcatttcttcttctcaggccaaagtagccatggtaaggaggcttcatggggcagaccctgaaagatcaaaactgcatttgcaaagccctcccctgtcccaggacaaagctgagactgacgggtgatgttgctcataggctccagctctgcataagaccttggcttggagacctccctctcagtcaacagctgaactctgagcttgtgcccagaaattaccccaagaccacaggaacccttcaagaagctcccatcacaagcttggcattgctctctgccacacgtgggcttcctcaggcttgtctgccacaagctacttctctgagctcagaaagtgccccttgatgagggaaaatgtcccactgcactgcgaatttctcagttccattttacctcccagtcctccttctaaaccagttaataaattcattccacaagtatttactgattacctgcttgtgccagggactattctcaggctgaagaaggtgggaggggagggcggaacctgaggagccacctgagccagctttatatttcaaccatggctggcccatctgagagcatctccccactctcgccaacctatcggggcatagcccagggatgcccccaggcggcccaggttagatgcgtccctttggcttgtcagtgatgacatacaccttagctgcttagctggtgctggcctgaggcagggcaggaaatcagaatagcatttgcttctctgggcaaatgggaagttcagcggggcagcagaatcagtggcattccccctggtgcaggccggtgggtccactccaactccccctgagtgtagcagcacactttccatacaccaggttctttctacaatcctggtggaaaagccacagaaccttcttcctgcccttcttgagagttccccctctttctgggtcaagagctggagtggtggctccatcctctctgggccacttcggtctaggaactcatctttgcaggaaccaggagtcctgagcacactgaacacacctcagagggaggatccttgttgtggattttgcacctggctttggggcaggggtgaagtgaccaggcttagcttgtggagtttatgggccaccagggtttggggaaatcaccatcccgcggatgctgtgacctcccttctacggagatgcaggcagtgccacgagggaggaggggacctgcaaagctagaatctagggcactgtttcctccccatccttctctttgtagagaatagagacgtttgtcttgtctgtcttcaacctacttttccttttctcttttttgtttctcatcctctctgtgccacctctccacccaggaggccatgtagcatagtggaaaaagtccctgagggcggttaggagttctgggtgaccatcctggctcagctcctaactcaccatgtgacatcaggctatccccattccccctcttgggcctcagtttcccgacttgcaaaataagcagaaagaaccagatgctctccagggtctttttctactttgctatctcatgggtcttcattttctcttattttgttttctctggatcttttccatctgagggtacaggaagtaccaggacctgtttcagtttttgaatcctgcaagcacattccaagactggcctgaaactgcatgagcaacatcactcgaaataattttttttttcaaaagcaccttaacaaccaattgcgatgctgtcctgttcctttttactcacacccttctctcctttctcgtccccatgctcccccacctcagtgctccgtgctgtatgcgtgtgctctctgttcttgtatactcaatataagtgaaataaatgtgtttgatgctgaaccata

SEQ ID NO: 6597 - DNA, 846 bp, Homo sapiens
  source 1..846: mol_type = unassigned DNA
aaaattcggatatttgagacccacggagctgaaactcgccgaatgagtgagggtgaagcaaggtcccttccaaatgacgtatcttcagaggcacccgtgggacaagcagagcagcagcggagtacgctctcagacctgggcttcgcccaactccagcccccaggggactttgccagccccaaagccacacattccacagtgatacctctggctaccagacacttcagggaggacacttctgcatcctaccaggaagcacacacggaactagagcccgtgtcccccaattcaggctgtgaaaccacgctggcagaagctactggaactgggagagcagggctgagggagggctccgaggagaaagtcaaaccaccacgtccccgggccccagagagtgacacaggcgatgaggaccaggaccaggagagggacacggtgttcctgaaggacaaccacctggccattgagcgcaagtgctccagcatcacggtcagctctacgtctagcctggaggctgaggtggacttcacggtcattggtgactaccatggcagcgccttcgaagacttctcccgcagcctgcctgagctcgaccgggacaaaagcgactcggacactgagggcctgctgttctcccgggatctcaacaagggggcccccagccaggatgatgagtctgggggcattgaggacagcccggatcgaggggcctgctccaccccggatatgccccagtttgagcccgtgaaaacagaaaccatgactgtcagcagtctggccattagaaagaagattgagccggaggccgtactgcagaccagagtctccgctatggataacacccag

SEQ ID NO: 6598 - DNA, 864 bp, Homo sapiens
  source 1..864: mol_type = unassigned DNA
cctcagtggggagggagttcatagcaaccactccctccatcaccacggagaccatatcgaccaccatgatcatcgggaaagatgtcctcaccagcacctacggcgccactgcggaaaccctctcaacctccaccaccacccatgtcaccaaaactgtgaaaggagggttttctgagacaaggatcgagaagcgaatcatcattactggggatgaagatgtcgatcaagaccaggccctggctttggccatcaaggaggccaaactgcagcatcctgatatgctggtaaccaaagctgtcgtatacagagaaacagacccatccccagaggagagggacaagaagccacaggaatcctgacctctgtgaagagatcctggcatttctggtccaacccaagccagagaaccattaagaaggggccttcattctggattctccgacgcaacactgacgtcccagctgcgacgtactgtcactgatgagagactgggaagggaaaagcatatatatatagatatatagagatatagatatatatacaggaaacaccgcatccttgcactgctgctggggctggcagagcagttggctgacagcaacaaccgacatctgaacacctacatttcctttgcagacaaattgaagaactggtgggatttttttcaagaaaaaaaattatataataactataatcccttgctcacccctttcccccgccaaataagaaacgcaagccagaccacgatgattgtagaagtccctcccgccctggttctgcacgttacagttagcagacgagcaattccatttgttcttctccagcatctctaaggcccacttgaatgcaaaggaaaacacttgc

SEQ ID NO: 6599 - DNA, 5967 bp, Homo sapiens
  source 1..5967: mol_type = unassigned DNA
gcatttctgcgcagctctagcgcgcctcggagcccgccggggcagccgccggacaccaggaccgcgagccagacagctcccggaagccgcgccgccgccgccaggtgcctgactgacagaagttcttgcccccggggagctggtgtggacagaggagggagcctagacatggaggagaaggactacagtgaggccgatggcctttcggagaggaccacgcccagcaaggcccagaaatcgccccagaagattgccaagaaatacaagagtgccatctgccgggtcactctgcttgatgcctcggagtatgagtgtgaggtggagaaacatggccggggccaggtgctgtttgacctggtctgtgaacacctcaacctcctagagaaggactacttcggcctgaccttctgtgatgctgacagccagaagaactggctggacccctccaaggagatcaagaagcagatccggagtagcccctggaattttgccttcacagtcaagttctacccgcctgatcctgcccagctgacagaagacatcacaagatactacctgtgcctgcagctgcgggcagacatcatcacgggccggctgccatgctcctttgtcacgcatgccctactgggctcctacgctgtgcaggctgagctgggtgactatgatgctgaggagcatgtgggcaactatgtcagcgagctccgcttcgcccctaaccagacccgggagctggaggagaggatcatggagctgcataagacatatagggggatgaccccgggagaagcagaaatccacttcttagagaatgccaagaagctttccatgtacggagtagacctgcaccatgccaaggactctgagggcatcgacatcatgttaggcgtttgtgccaatggcctgctcatctaccgggaccggctgagaatcaaccgctttgcctggcccaagatcctcaagatctcctacaagaggagtaacttctatatcaagatccggcctggggagtatgagcaatttgagagcacaattggctttaagctcccaaaccaccggtcagccaagagactgtggaaggtctgcatcgagcatcatacattcttccggctggtgtcccctgagcccccacccaagggcttcctggtgatgggctccaagttccggtacagtgggaggacccaggcacagactcgccaggccagcgccctcattgaccggcctgcacccttctttgagcgttcttccagcaaacggtacaccatgtcccgcagccttgatggagcagagttctcccgcccagcctcggtcagcgagaaccatgatgcagggcctgacggtgacaagcgggatgaggatggcgagtctggggggcaacggtcagaggctgaggagggagaggtcaggactccaaccaagatcaaggagctaaagttcttagacaagccagaagatgtcttgctgaagcaccaggccagcatcaatgagctcaaaaggaccctgaaggagcccaacagcaaactcatccaccgggatcgagactgggaacgggagcgcaggctgccctcctcccccgcctccccctcccccaagggcacccctgagaaagccaatgagagagcagggctgagggagggctccgaggagaaagtcaaaccaccacgtccccgggccccagagagtgacacaggcgatgaggaccaggaccaggagagggacacggtgttcctgaaggacaaccacctggccattgagcgcaagtgctccagcatcacggtcagctctacgtctagcctggaggctgaggtggacttcacggtcattggtgactaccatggcagcgccttcgaagacttctcccgcagcctgcctgagctcgaccgggacaaaagcgactcggacactgagggcctgctgttctcccgggatctcaacaagggggcccccagccaggatgatgagtctgggggcattgaggacagcccggatcgaggggcctgctccaccccggatatgccccagtttgagcccgtgaaaacagaaaccatgactgtcagcagtctggccattagaaagaagattgagccggaggccgtactgcagaccagagtctccgctatggataacacccaggagaacagtctcaagtccgggaagggggcagctgccatgatcccaggcccacagacggtggccacggaaatccgttctctttctccgatcatcgggaaagatgtcctcaccagcacctacggcgccactgcggaaaccctctcaacctccaccaccacccatgtcaccaaaactgtgaaaggagggttttctgagacaaggatcgagaagcgaatcatcattactggggatgaagatgtcgatcaagaccaggccctggctttggccatcaaggaggccaaactgcagcatcctgatatgctggtaaccaaagctgtcgtatacagagaaacagacccatccccagaggagagggacaagaagccacaggaatcctgacctctgtgaagagatcctggcatttctggtccaacccaagccagagaaccattaagaaggggccttcattctggattctccgacgcaacactgacgtcccagctgcgacgtactgtcactgatgagagactgggaagggaaaagcatatatatatagatatatagagatatagatatatatacaggaaacaccgcatccttgcactgctgctggggctggcagagcagttggctgacagcaacaaccgacatctgaacacctacatttcctttgcagacaaattgaagaactggtgggatttttttcaagaaaaaaaattatataataactataatcccttgctcacccctttcccccgccaaataagaaacgcaagccagaccacgatgattgtagaagtccctcccgccctggttctgcacgttacagttagcagacgagcaattccatttgttcttctccagcatctctaaggcccacttgaatgcaaaggaaaacacttgcacagcaaagcaagagaagtcacagcagcaagacacgcacagtcaaccattttccgagaaaaaaagaaaattccccacttggaaagaaagaggaggaacactggattcttactttctggatcttgacactgggctgcaaaacctaccttcctctctcccgcctcccctcaccctcaactctcaatgtcttgctgtcattttctgtctcggctccctcctcccccttcccccttcccccaccccacacccttcaccctctgtgtcctggtccttctgagggccactgcagatgactctcctttgaaatgagaaaaagaaaagaaagcaagaacagaaaacgaagccacaggaagggaagtagacattgtatgcttatggtttctcattatgaaggtgcagcttgtaggaggtttgtacggatgtgctttgaagttatgtatattacatataacaggaaaaaatattaaaataaacagtgctggtaagtatgaagctgacattctaaaattataattatctgactgtgattgatgtatcctgaggttcctagatctcactgaactggcccagctaaggagacctggactctgggtgtgggttggctcacagtaggggctgacgggttcagtgtagtaatactgtgtgtggtgtttgtaattggttgattggtggggaggggtggggggccctaatggagaggtgtgggtttggcaagaaagaagcaacacagatgtcgtccccaaaatgccagttcaagacaccttctccctgcccccctggtagtaacagtcagggcctggtctgtgctcaggtactgggtcccagtctgggactctgctgctgaagttgccacagtagaggtccctggcttagtccttatctccctacggggcttgccttggttttcagtcttctctctctttctctcttttttttttttttgccacattctgcccttccctgaccccattgtaataaccaactccatatccaaagggaggtggtgctctcagccattgtagaagatggtggctttaacctgactgtctaaaaattcccagctaagccttttcctctactctcttccttgttctgaatcatttcttcttctcaggccaaagtagccatggtaaggaggcttcatggggcagaccctgaaagatcaaaactgcatttgcaaagccctcccctgtcccaggacaaagctgagactgacgggtgatgttgctcataggctccagctctgcataagaccttggcttggagacctccctctcagtcaacagctgaactctgagcttgtgcccagaaattaccccaagaccacaggaacccttcaagaagctcccatcacaagcttggcattgctctctgccacacgtgggcttcctcaggcttgtctgccacaagctacttctctgagctcagaaagtgccccttgatgagggaaaatgtcccactgcactgcgaatttctcagttccattttacctcccagtcctccttctaaaccagttaataaattcattccacaagtatttactgattacctgcttgtgccagggactattctcaggctgaagaaggtgggaggggagggcggaacctgaggagccacctgagccagctttatatttcaaccatggctggcccatctgagagcatctccccactctcgccaacctatcggggcatagcccagggatgcccccaggcggcccaggttagatgcgtccctttggcttgtcagtgatgacatacaccttagctgcttagctggtgctggcctgaggcagggcaggaaatcagaatagcatttgcttctctgggcaaatgggaagttcagcggggcagcagaatcagtggcattccccctggtgcaggccggtgggtccactccaactccccctgagtgtagcagcacactttccatacaccaggttctttctacaatcctggtggaaaagccacagaaccttcttcctgcccttcttgagagttccccctctttctgggtcaagagctggagtggtggctccatcctctctgggccacttcggtctaggaactcatctttgcaggaaccaggagtcctgagcacactgaacacacctcagagggaggatccttgttgtggattttgcacctggctttggggcaggggtgaagtgaccaggcttagcttgtggagtttatgggccaccagggtttggggaaatcaccatcccgcggatgctgtgacctcccttctacggagatgcaggcagtgccacgagggaggaggggacctgcaaagctagaatctagggcactgtttcctccccatccttctctttgtagagaatagagacgtttgtcttgtctgtcttcaacctacttttccttttctcttttttgtttctcatcctctctgtgccacctctccacccaggaggccatgtagcatagtggaaaaagtccctgagggcggttaggagttctgggtgaccatcctggctcagctcctaactcaccatgtgacatcaggctatccccattccccctcttgggcctcagtttcccgacttgcaaaataagcagaaagaaccagatgctctccagggtctttttctactttgctatctcatgggtcttcattttctcttattttgttttctctggatcttttccatctgagggtacaggaagtaccaggacctgtttcagtttttgaatcctgcaagcacattccaagactggcctgaaactgcatgagcaacatcactcgaaataattttttttttcaaaagcaccttaacaaccaattgcgatgctgtcctgttcctttttactcacacccttctctcctttctcgtccccatgctcccccacctcagtgctccgtgctgtatgcgtgtgctctctgttcttgtatactcaatataagtgaaataaatgtgtttgatgctgaaccata

SEQ ID NO: 6600 - DNA, 6327 bp, Homo sapiens
  source 1..6327: mol_type = unassigned DNA
gcatttctgcgcagctctagcgcgcctcggagcccgccggggcagccgccggacaccaggaccgcgagccagacagctcccggaagccgcgccgccgccgccagccacagcacagccggacagaggaggtggattaggagttcccgggagggagcctgctcagcctttccctgacatttgggcaaatgtgtggggagatgcggagctcaaggcgtgctggtcaccatgacaacagagacaggccccgactctgaggtgaagaaagctcaggaggaggccccgcagcagcccgaggctgctgccgctgtgaccacccctgtgacccctgcaggccacggccacccagaggccaactccaatgagaagcatccatcccagcaggacacgcggcctgctgaacagagcctagacatggaggagaaggactacagtgaggccgatggcctttcggagaggaccacgcccagcaaggcccagaaatcgccccagaagattgccaagaaatacaagagtgccatctgccgggtcactctgcttgatgcctcggagtatgagtgtgaggtggagaaacatggccggggccaggtgctgtttgacctggtctgtgaacacctcaacctcctagagaaggactacttcggcctgaccttctgtgatgctgacagccagaagaactggctggacccctccaaggagatcaagaagcagatccggagtagcccctggaattttgccttcacagtcaagttctacccgcctgatcctgcccagctgacagaagacatcacaagatactacctgtgcctgcagctgcgggcagacatcatcacgggccggctgccatgctcctttgtcacgcatgccctactgggctcctacgctgtgcaggctgagctgggtgactatgatgctgaggagcatgtgggcaactatgtcagcgagctccgcttcgcccctaaccagacccgggagctggaggagaggatcatggagctgcataagacatatagggggatgaccccgggagaagcagaaatccacttcttagagaatgccaagaagctttccatgtacggagtagacctgcaccatgccaaggactctgagggcatcgacatcatgttaggcgtttgtgccaatggcctgctcatctaccgggaccggctgagaatcaaccgctttgcctggcccaagatcctcaagatctcctacaagaggagtaacttctatatcaagatccggcctggggagtatgagcaatttgagagcacaattggctttaagctcccaaaccaccggtcagccaagagactgtggaaggtctgcatcgagcatcatacattcttccggctggtgtcccctgagcccccacccaagggcttcctggtgatgggctccaagttccggtacagtgggaggacccaggcacagactcgccaggccagcgccctcattgaccggcctgcacccttctttgagcgttcttccagcaaacggtacaccatgtcccgcagccttgatggagcagagttctcccgcccagcctcggtcagcgagaaccatgatgcagggcctgacggtgacaagcgggatgaggatggcgagtctggggggcaacggtcagaggctgaggagggagaggtcaggactccaaccaagatcaaggagctaaagccggagcaggaaaccacgccgagacacaagcaggagttcttagacaagccagaagatgtcttgctgaagcaccaggccagcatcaatgagctcaaaaggaccctgaaggagcccaacagcaaactcatccaccgggatcgagactgggaacgggagcgcaggctgccctcctcccccgcctccccctcccccaagggcacccctgagaaagccaatgagagagcagggctgagggagggctccgaggagaaagtcaaaccaccacgtccccgggccccagagagtgacacaggcgatgaggaccaggaccaggagagggacacggtgttcctgaaggacaaccacctggccattgagcgcaagtgctccagcatcacggtcagctctacgtctagcctggaggctgaggtggacttcacggtcattggtgactaccatggcagcgccttcgaagacttctcccgcagcctgcctgagctcgaccgggacaaaagcgactcggacactgagggcctgctgttctcccgggatctcaacaagggggcccccagccaggatgatgagtctgggggcattgaggacagcccggatcgaggggcctgctccaccccggatatgccccagtttgagcccgtgaaaacagaaaccatgactgtcagcagtctggccattagaaagaagattgagccggaggccgtactgcagaccagagtctccgctatggataacacccaggttgatgggagtgcctcagtggggagggagttcatagcaaccactccctccatcaccacggagaccatatcgaccaccatggagaacagtctcaagtccgggaagggggcagctgccatgatcccaggcccacagacggtggccacggaaatccgttctctttctccgatcatcgggaaagatgtcctcaccagcacctacggcgccactgcggaaaccctctcaacctccaccaccacccatgtcaccaaaactgtgaaaggagggttttctgagacaaggatcgagaagcgaatcatcattactggggatgaagatgtcgatcaagaccaggccctggctttggccatcaaggaggccaaactgcagcatcctgatatgctggtaaccaaagctgtcgtatacagagaaacagacccatccccagaggagagggacaagaagccacaggaatcctgacctctgtgaagagatcctggcatttctggtccaacccaagccagagaaccattaagaaggggccttcattctggattctccgacgcaacactgacgtcccagctgcgacgtactgtcactgatgagagactgggaagggaaaagcatatatatatagatatatagagatatagatatatatacaggaaacaccgcatccttgcactgctgctggggctggcagagcagttggctgacagcaacaaccgacatctgaacacctacatttcctttgcagacaaattgaagaactggtgggatttttttcaagaaaaaaaattatataataactataatcccttgctcacccctttcccccgccaaataagaaacgcaagccagaccacgatgattgtagaagtccctcccgccctggttctgcacgttacagttagcagacgagcaattccatttgttcttctccagcatctctaaggcccacttgaatgcaaaggaaaacacttgcacagcaaagcaagagaagtcacagcagcaagacacgcacagtcaaccattttccgagaaaaaaagaaaattccccacttggaaagaaagaggaggaacactggattcttactttctggatcttgacactgggctgcaaaacctaccttcctctctcccgcctcccctcaccctcaactctcaatgtcttgctgtcattttctgtctcggctccctcctcccccttcccccttcccccaccccacacccttcaccctctgtgtcctggtccttctgagggccactgcagatgactctcctttgaaatgagaaaaagaaaagaaagcaagaacagaaaacgaagccacaggaagggaagtagacattgtatgcttatggtttctcattatgaaggtgcagcttgtaggaggtttgtacggatgtgctttgaagttatgtatattacatataacaggaaaaaatattaaaataaacagtgctggtaagtatgaagctgacattctaaaattataattatctgactgtgattgatgtatcctgaggttcctagatctcactgaactggcccagctaaggagacctggactctgggtgtgggttggctcacagtaggggctgacgggttcagtgtagtaatactgtgtgtggtgtttgtaattggttgattggtggggaggggtggggggccctaatggagaggtgtgggtttggcaagaaagaagcaacacagatgtcgtccccaaaatgccagttcaagacaccttctccctgcccccctggtagtaacagtcagggcctggtctgtgctcaggtactgggtcccagtctgggactctgctgctgaagttgccacagtagaggtccctggcttagtccttatctccctacggggcttgccttggttttcagtcttctctctctttctctcttttttttttttttgccacattctgcccttccctgaccccattgtaataaccaactccatatccaaagggaggtggtgctctcagccattgtagaagatggtggctttaacctgactgtctaaaaattcccagctaagccttttcctctactctcttccttgttctgaatcatttcttcttctcaggccaaagtagccatggtaaggaggcttcatggggcagaccctgaaagatcaaaactgcatttgcaaagccctcccctgtcccaggacaaagctgagactgacgggtgatgttgctcataggctccagctctgcataagaccttggcttggagacctccctctcagtcaacagctgaactctgagcttgtgcccagaaattaccccaagaccacaggaacccttcaagaagctcccatcacaagcttggcattgctctctgccacacgtgggcttcctcaggcttgtctgccacaagctacttctctgagctcagaaagtgccccttgatgagggaaaatgtcccactgcactgcgaatttctcagttccattttacctcccagtcctccttctaaaccagttaataaattcattccacaagtatttactgattacctgcttgtgccagggactattctcaggctgaagaaggtgggaggggagggcggaacctgaggagccacctgagccagctttatatttcaaccatggctggcccatctgagagcatctccccactctcgccaacctatcggggcatagcccagggatgcccccaggcggcccaggttagatgcgtccctttggcttgtcagtgatgacatacaccttagctgcttagctggtgctggcctgaggcagggcaggaaatcagaatagcatttgcttctctgggcaaatgggaagttcagcggggcagcagaatcagtggcattccccctggtgcaggccggtgggtccactccaactccccctgagtgtagcagcacactttccatacaccaggttctttctacaatcctggtggaaaagccacagaaccttcttcctgcccttcttgagagttccccctctttctgggtcaagagctggagtggtggctccatcctctctgggccacttcggtctaggaactcatctttgcaggaaccaggagtcctgagcacactgaacacacctcagagggaggatccttgttgtggattttgcacctggctttggggcaggggtgaagtgaccaggcttagcttgtggagtttatgggccaccagggtttggggaaatcaccatcccgcggatgctgtgacctcccttctacggagatgcaggcagtgccacgagggaggaggggacctgcaaagctagaatctagggcactgtttcctccccatccttctctttgtagagaatagagacgtttgtcttgtctgtcttcaacctacttttccttttctcttttttgtttctcatcctctctgtgccacctctccacccaggaggccatgtagcatagtggaaaaagtccctgagggcggttaggagttctgggtgaccatcctggctcagctcctaactcaccatgtgacatcaggctatccccattccccctcttgggcctcagtttcccgacttgcaaaataagcagaaagaaccagatgctctccagggtctttttctactttgctatctcatgggtcttcattttctcttattttgttttctctggatcttttccatctgagggtacaggaagtaccaggacctgtttcagtttttgaatcctgcaagcacattccaagactggcctgaaactgcatgagcaacatcactcgaaataattttttttttcaaaagcaccttaacaaccaattgcgatgctgtcctgttcctttttactcacacccttctctcctttctcgtccccatgctcccccacctcagtgctccgtgctgtatgcgtgtgctctctgttcttgtatactcaatataagtgaaataaatgtgtttgatgctgaaccata

SEQ ID NO: 6601 - DNA, 5800 bp, Homo sapiens
  source 1..5800: mol_type = unassigned DNA
ggaaaaggcgccttgggagcgggcgctcggcggggcctcctcgggccccgggcgcggcgcggcgagtgggagcgagcgcgccaggaccacgcaggcgccctgctccggctggccctcggccggcgcgcggcgcgggagcagcccgcagcccgcctcccgcgcccccggcagccccctggcagcccgcagccgcccgtccggagcagcccctcggcagcccgcgcaggccgccggcccgggagagcgcgcggcggcggcggcggcgggacggccccgagcgcgccctcccgcctgcggccactcgcagccggcgctggccgggccggcgcgccccgcaggcggctagagcgcggcctcggcctcggcgcgggcttgccccgggccgtagcccgcgagaggcggcgcgggcggccgagggcactgacggcgtcgcgggacgctcccgggcggcggcgcagcggcagcggcagcggcagcggcagcgcagggggcggaggcagggggcgcccccagccaggatgctgcggttcctgcgccggacctttggccgccgctccatgcagcgctacgcgcggggcgcggcggggcgcggggccgccgggctgggggacgagcgcgatggggggccacgggggggcccggccgccgccgcctcctcctcggcgctgcccgccgcgcccgggggcagcgtgttcccggcgggcggcgggcccctgctcaccggcggcgcggccgtgcacatctccgccgccggcgccgccaaggccaccctctactgccgcgtcttcctgctcgacgggaccgaagtgagcgtggacctgccgaaacatgccaaaggccaggatttgtttgatcagattgtgtaccacttggaccttgtggaaacagattactttggcctccagttcctcgactctgcccaggttgcgcactggctggatcatgccaaacccataaaaaagcagatgaaaattggacctgcttatgctttacactttcgagttaaatactattcttcagaaccaaacaaccttcgtgaggagtttacaaggtacctgtttgttttacaactcaggcatgacattctttctggaaaattgaaatgcccttatgaaacagctgtggaattagctgctctctgtctacaagcggagcttggggagtgcgagcttccagaacacacaccagagcttgtgtctgagtttcggttcattccaaatcagacagaagcaatggaatttgatatcttccagagatggaaagagtgcaggggaaagagccctgcccaggcggaactctcctatctgaataaagcgaagtggctggaaatgtatggggtagacatgcacgttgtcaggggaagagatggctgtgaatattctcttggactgaccccgacaggcatattaatctttgaaggagctaacaaaataggcttattcttttggcctaaaattaccaaaatggattttaaaaagagcaaattgacactcgtggtggtcgaggatgatgatcagggacgtgagcaagagcacacgtttgtgttccggttagacagtgccaggacctgcaaacacctttggaagtgtgcagttgagcaccacgcattcttccgactgcggacgccaggaaacagcaaatccaatagatccgactttatcaggctgggctctcgcttcagattcagtgggcggacagaatatcaagctacacatggctccaggttacgaagaaccagcacctttgagaggaagcctagtaaacgttatccatcccggagacattcaacgttcaaagcaagcaacccagtgatagcagcccagctctgctctaaaacaaatccagaagtccataattaccagcctcaatatcatcctaatatccatcccagccagccccggtggcatcctcactctccaaatgtcagctacccgctcccttccccagtgcttagcagctcggaccggttgccttttggcattgaggagaatgggggcacaccgttcctcaccgcagcttcaggaaggcatcaccaccagcaccagcatcagcatcagcaccagcaccactcaaactacagcctctcactgaccctggagaacaaagaggggcctctgaggtccccaaactccagcagcaagtcccttacaaaactgagtccaggaacacctgccttgttcagtgaagccgctgcccatctaaagaagctggaactggaaactgtgaaggctgctggaccctggcctcctctgcacatcaacataaacaaggctgaagaaaagaaagtctcggagaaaactcttcagactccacttttgccttcccctgttgcggatcatgtgaagtgtaacattctgaaagcccagttggaaaatgcttcccgagtgaacatccagggtggaaaggaggaatcaccgtttgtaaatatcaataagaaatccagtcttcaggacgctagtgtaagaagtcctattcctattcgtgtggaaactgcccagccagctgtggaaaagccggaaatcaagcctccccgagtgaggaagttaacaagacagtatagttttgatgaagacgacctccctccagacctggccgaggcagtgggagtgaccacatctacaaccacaaacaccacaacggccgccacacaagtctccgtgccgctgccgtcccccaaggtccagaatgtcagctcgcctcacaagtcagaaggcaaaggcctgctgtcccctggggccaagagcccctctgaccgaggaggtgcctttaccctggagccgggtgatcttctgatggatttcacagaagccactcctctggcagagcccgccagcaacccccactgtgcccactctcgctgttctcctccactctctctccccatgaaggaagagaccactggagtttgcatgtaccctccaatcaaaacgaggctgataaaaacattcccggttgatacaatgaacccgtttcctgatactttcaccacagggccacagtttactgcagacttcagagacagtaaattacagtgctgtcctggcccgacttccccgctgatcccagcagcgaccctgaggcctttgacagagaccgtctccacagtgcagaccatttacaccacccggaaacctgtttctctggcagccagtgcagagacactccggcaggaactggagagagagaagatgatgaaaagactgttgatgaccgaactgtgaaattctccccttgtcacctggaagatggcatggtgccttctgtccgtcttctttcttcgggctttgtgtgctcactctagcacagcatacaagtgtgtgctctgttcgcccaggtctccatggttagttgaagccaatttctggcttgacttttatgggaaaagttattttatgtctcctaagcattagagtttttctattactctatgtagttgagacaggatttgataagtctaggaaaagaaagatgggaaaacgggattccttttcagaagtacctgtgtgtatctgttaataaccacaggggttaatatgatgtaggatcttttactatcaatttcaaccatttgattttgtatgattgaaacttgcaccgagctttgactgtttgttaaagagtcatttttaatgaaagaataattctttattgctggtttttcatttacactgataaatacacagatcttataaagtctttaacattcatttgtattcagatgtgagtagaagaactaaaaaaagaaagttacatatcactatgactgaaggtacttcagcttaatctgaaatataatttaacttgtgaactccttggatatgatattatttggaataaacagaatttatcattgaacccaaagtaggaaatgatagcttacattgtctaaaaatccttacaaggttaagatgattcaatatcaagaagattcagaaaattatttctaaagttgatcgattcatgtcgtattgatagaatcttgaccagaagaaattttgctctttttatatagtttcaagaaatgtgtttttaaatttttattaatgcacttgaacaactttgcaggaataaagcaaccccctaaccacaaaatatccctctaaattagttccctagctttctcaatgaatacacacatatttttacatagctatgatcgttgtgtacattctcctttgttttacttctcggcctaacacttgtctcctcttgtcaacacagattctactctcaccaatttaaatgtctttatatccatgtaacatgggtaacctcacttcaccccattattagatatttgagttatatctaatttttcactcttataaatagtgctgctatgaatgtctgtaaaaaaaaaaaactgctccttcttttggattattcccttaggaatatctccaaagagggattacaaggtcaaagagcatgaagtattttatagctcttgttttatattgccagattgctttctagaaagatccaatctttgggttggaaggaccttaaaggtcatctagtttagcctccccaccccctctgaatgcttgaatcccctcgacaatttatgatgccaccagcaatgtataagcatttctgtttaccaatagctctgccagtattgggttttgccatttttatttatttttgctagtttaataggtatgtatagttgttcttgaagagttgttttatttcattaattgctagcaaggctgagcacttttccatgtgatgatttactagttgtatttccttgtgtgtaaaatgttcattcatttcttatgaccacttgttaagaggaactgatctcatatatttgtatcagaactgtatttttatgttatattgtatagtttgctctcctgcccctctccttaaaactgaatggtgccaataatttgatactaatgactacaaaaaaaggtaatgcctcatttactagtattgttgtaaaatgaggaatgtatgtgaatattcagataaccgaggattaaccctttaagtgctgaatctttaaaattttaatatatttttttttgagggaaatctttctaaaatgtattacgcacttccctgccttagtaaacagagtatactggagagtatttaaccttttcttgatgagtcatggtcatgattataaacatcagccccttttataccttggtacggtgcagtgatatcattaagagctatcaatatgtgtagggcttggcttggccttttataggatattatgctgttctcactgatggttttttactgctctctgctctgtcagtggagctatccggggcaattgtagcgtttgggtccttttacccctatgtcccccggctatacttttaaaacagctttagctgttctttatcttgtgcacatgatacaaaatatgttcccgtacaatatggggctgtcacttcttgccaacccagcaccctcttcctcttctaacctgctttctgaggcttctgctcttcacctcctgctcgctgatggaaacctccagggcaaagctgaaggtttcttggggaagccaggaaagccagtatttcctatgtgtcagatctgcttggcttccaagaagggatgcatgggctttttggccagtgtttccaggaggctctgggcttcctgcttcttccccgcttcccccagagttcacagatgttgaagtttctgaaggttgacgtcactggaagtctgaccacaaacaagttggctgttactgtatttgaaacccagtacctttggcagctcacctctaaccagtaaaataagaggattccatggtttc

SEQ ID NO: 6602 - DNA, 4006 bp, Homo sapiens
  source 1..4006: mol_type = unassigned DNA
ggaaaaggcgccttgggagcgggcgctcggcggggcctcctcgggccccgggcgcggcgcggcgagtgggagcgagcgcgccaggaccacgcaggcgccctgctccggctggccctcggccggcgcgcggcgcgggagcagcccgcagcccgcctcccgcgcccccggcagccccctggcagcccgcagccgcccgtccggagcagcccctcggcagcccgcgcaggccgccggcccgggagagcgcgcggcggcggcggcggcgggacggccccgagcgcgccctcccgcctgcggccactcgcagccggcgctggccgggccggcgcgccccgcaggcggctagagcgcggcctcggcctcggcgcgggcttgccccgggccgtagcccgcgagaggcggcgcgggcggccgagggcactgacggcgtcgcgggacgctcccgggcggcggcgcagcggcagcggcagcggcagcggcagcgcagggggcggaggcagggggcgcccccagccaggatgctgcggttcctgcgccggacctttggccgccgctccatgcagcgctacgcgcggggcgcggcggggcgcggggccgccgggctgggggacgagcgcgatggggggccacgggggggcccggccgccgccgcctcctcctcggcgctgcccgccgcgcccgggggcagcgtgttcccggcgggcggcgggcccctgctcaccggcggcgcggccgtgcacatctccgccgccggcgccgccaaggccaccctctactgccgcgtcttcctgctcgacgggaccgaagtgagcgtggacctgccgaaacatgccaaaggccaggatttgtttgatcagattgtgtaccacttggaccttgtggaaacagattactttggcctccagttcctcgactctgcccaggttgcgcactggctggatcatgccaaacccataaaaaagcagatgaaaattggacctgcttatgctttacactttcgagttaaatactattcttcagaaccaaacaaccttcgtgaggagtttacaaggtacctgtttgttttacaactcaggcatgacattctttctggaaaattgaaatgcccttatgaaacagctgtggaattagctgctctctgtctacaagcggagcttggggagtgcgagcttccagaacacacaccagagcttgtgtctgagtttcggttcattccaaatcagacagaagcaatggaatttgatatcttccagagatggaaagagtgcaggggaaagagccctgcccaggcggaactctcctatctgaataaagcgaagtggctggaaatgtatggggtagacatgcacgttgtcaggggaagagatggctgtgaatattctcttggactgaccccgacaggcatattaatctttgaaggagctaacaaaataggcttattcttttggcctaaaattaccaaaatggattttaaaaagagcaaattgacactcgtggtggtcgaggatgatgatcagggacgtgagcaagagcacacgtttgtgttccggttagacagtgccaggacctgcaaacacctttggaagtgtgcagttgagcaccacgcattcttccgactgcggacgccaggaaacagcaaatccaatagatccgactttatcaggctgggctctcgcttcagattcagtgggcggacagaatatcaagctacacatggctccaggttacgaagaaccagcacctttgagaggaagcctagtaaacgttatccatcccggagacattcaacgttcaaagcaagcaacccagtgatagcagcccagctctgctctaaaacaaatccagaagtccataattaccagcctcaatatcatcctaatatccatcccagccagccccggtggcatcctcactctccaaatgtcaggccatcctttcaggatgacaggtcgcattggaaagcatcggccagtggagatgacagccattttgattatgtccacgaccagaaccagaagaacttaggagggatgcaaagtatgatgtatcgagataaactcatgactgcactttgagagactgaagcatctctcttccattcaccttcatagtttcattgcattccatgaaaagtgtcttggcctcagatggatggatgtgtttggacgagtgtctttaaggagtagtcctgaaaggtgtttttggtgtccatgtaaatatttgaagataaaaccactatagcttgtcataatttactgttgactgcattctcattaaaatgaaggtaaaggctcaggaatcatattgatgttctgattttaaaattggagtcaaagtctatgtttatcattttactatgttcctgatgttctttgttatttaattaatgggagcaaataaaaccagaagagcttgggaagattgctcagcatatattcctgtcgtagaagttgagattgctagggtccagtttccctagtgtggcctggacgagtcatttccccttcattgacctcattttccccatctgaaaagagagggttggactaagtgatctccaaggtcctttccaactctaaaattctgcaatttgttaacatttcattttgtttaggttgaggacatacattcaaactaattttatcacaaggaaaactgcaatacccacttccttgacagagttactcctttcagaagctaaataaagtatataacttattagatgttatatagatacagggggactttgaatttcacatcttaaagcagttgagctactttgaatttaagcagtcgtactaatcttaaattgcatagcatttgttttgatcgaatttgctgctcaagtatgggaataatttttaatgtcttaatgattggtgctgctaacttgcgtgatttcagaagacataattgtgaatacacactgtcagaattgggggattggtttttaccctagacttcactcttaaaaagcaacgtgcaatcaagatcatttatggctcaaatgaaagcatataaggttttcttgaagttgtgccaaagcattctgtagagtaggatgagatggttgttgccctagtctgttggtagaaccagaaatcaatatgttgtcttttaggttaaagcttgtaccaaaatatttatttcccccatttcaagccctgagtcaaacatttttttctcttaataatagacctgaaatgttttattagtatttctgtgaaatcagttgattcttgtgccatttttgtatatgtaattgtaattttgcccatgttaggccctctaaaaaatgtttgacatcctttgagatattttattactaaaatctgatcttttttggctactgcaaaaatctattcagcaagaaggtatcagctgcataccttgcacagtggagctgactacctataaactctccctaaggcatttgtttacaggtgtattccattttagcagacgttctgatgctcagtgtatgtgctgcatacaaataaatgtgttctgaatcttttcatcttattgatagcatttttacaaatgtgtttccaaggaataaagattattcttgctttttttttgactccatcttcattttttttaaattgattcttgttgctatgcagaagtctcatttgtgaatgaccttggtaacagaacagttggcttttggaagtctgaaggtgagcattcagttaggtgggtggagcaagatcatcctagaatgaggctgctcttggcaagagtggatcttataggcacagcagctgatgcctttcttcatctggggcaactctggtgaaggttgtcctgcctgtcacaggtgctgagtagagagaagtggtggcagtgggatttcctcagtaatagtcctgtaaaggtacgtgtttgtcctggctacttgtgctcttcctggcaggaaggcatccaaacccttatctgtgggctcctggaaattgtgtatgccatataataccctctaataaatacctctctgcttaaa

SEQ ID NO: 6603 - DNA, 5809 bp, Homo sapiens
  source 1..5809: mol_type = unassigned DNA
cccgctctgcttcagcgcacgctgaagacggcactaggacccagggaagtccccgagcggggttcgcggaaaggcagccagactcctccttatctccagtgtcaaacttgacatcagcctgcgagcggagcatggtaacttctccagcaatcagagcgctccccctcacatcagtggcatgcttcatggagatatgctcctctcactgccctctgcaccagcaacatggattgtcagctctccatcctcctccttctcagctgctctgttctcgacagcttcggggaactgattccgcagccttccaatgaagtcaatctactggattcaaaaacaattcaaggggagctgggctggatctcttatccatcacatgggtgggaagagatcagtggtgtggatgaacattacacacccatcaggacttaccaggtgtgcaatgtcatggaccacagtcaaaacaattggctgagaacaaactgggtccccaggaactcagctcagaagatttatgtggagctcaagttcactctacgagactgcaatagcattccattggttttaggaacttgcaaggagacattcaacctgtactacatggagtctgatgatgatcatggggtgaaatttcgagagcatcagtttacaaagattgacaccattgcagctgatgaaagtttcactcaaatggatcttggggaccgtattctgaagctcaacactgagattagagaagtaggtcctgtcaacaagaagggattttatttggcatttcaagatgttggtgcttgtgttgccttggtgtctgtgagagtatacttcaaaaagtgcccatttacagtgaagaatctggctatgtttccagacacggtacccatggactcccagtccctggtggaggttagagggtcttgtgtcaacaattctaaggaggaagatcctccaaggatgtactgcagtacagaaggcgaatggcttgtacccattggcaagtgttcctgcaatgctggctatgaagaaagaggttttatgtgccaagcttgtcgaccaggtttctacaaggcattggatggtaatatgaagtgtgctaagtgcccgcctcacagttctactcaggaagatggttcaatgaactgcaggtgtgagaataattacttccgggcagacaaagaccctccatccatggcttgtacccgacctccatcttcaccaagaaatgttatctctaatataaacgagacctcagttatcctggactggagttggcccctggacacaggaggccggaaagatgttaccttcaacatcatatgtaaaaaatgtgggtggaatataaaacagtgtgagccatgcagcccaaatgtccgcttcctccctcgacagtttggactcaccaacaccacggtgacagtgacagaccttctggcacatactaactacacctttgagattgatgccgttaatggggtgtcagagctgagctccccaccaagacagtttgctgcggtcagcatcacaactaatcaggctgctccatcacctgtcctgacgattaagaaagatcggacctccagaaatagcatctctttgtcctggcaagaacctgaacatcctaatgggatcatattggactacgaggtcaaatactatgaaaagcaggaacaagaaacaagttataccattctgagggcaagaggcacaaatgttaccatcagtagcctcaagcctgacactatatacgtattccaaatccgagcccgaacagccgctggatatgggacgaacagccgcaagtttgagtttgaaactagtccagactctttctccatctctggtgaaagtagccaagtggtcatgatcgccatttcagcggcagtagcaattattctcctcactgttgtcatctatgttttgattgggaggttctgtggctataagtcaaaacatggggcagatgaaaaaagacttcattttggcaatgggcatttaaaacttccaggtctcaggacttatgttgacccacatacatatgaagaccctacccaagctgttcatgagtttgccaaggaattggatgccaccaacatatccattgataaagttgttggagcaggtgaatttggagaggtgtgcagtggtcgcttaaaacttccttcaaaaaaagagatttcagtggccattaagaccctgaaagttggctacacagaaaagcagaggagagacttcctgggagaagcaagcattatgggacagtttgaccaccccaatatcattcgactggaaggagttgttaccaaaagtaagccagttatgattgtcacagaatacatggagaatggttccttggatagtttcctacgtaaacacgatgcccagtttactgtcattcagctagtggggatgcttcgagggatagcatctggcatgaagtacctgtcagacatgggctatgttcaccgagacctcgctgctcggaacatcttgatcaacagtaacttggtgtgtaaggtttctgatttcggactttcgcgtgtcctggaggatgacccagaagctgcttatacaacaagaggagggaagatcccaatcaggtggacatcaccagaagctatagcctaccgcaagttcacgtcagccagcgatgtatggagttatgggattgttctctgggaggtgatgtcttatggagagagaccatactgggagatgtccaatcaggatgtaattaaagctgtagatgagggctatcgactgccaccccccatggactgcccagctgccttgtatcagctgatgctggactgctggcagaaagacaggaacaacagacccaagtttgagcagattgttagtattctggacaagcttatccggaatcccggcagcctgaagatcatcaccagtgcagccgcaaggccatcaaaccttcttctggaccaaagcaatgtggatatcactaccttccgcacaacaggtgactggcttaatggtgtctggacagcacactgcaaggaaatcttcacgggtgtggagtacagttcttgtgacacaatagccaagatttccacagatgacatgaaaaaggttggtgtcaccgtggttgggccacagaagaagatcatcagtagcattaaagctctagaaacgcaatcaaagaatggcccagttcccgtgtaaagcacgggacggaagtgcttctggacggaagtggtggctgtggaaggcgtagcatcatcctgcagacagacaataattctggagatactggtggaagttccaagtccaataagacactcaaatatgagtacaaatgccttaaaatggaattgaaaaactctttattttcccctatcatttattggatgggtgggtggggtatttttttgtaattgcttttttaaatattagttaatggattaaatttaattcttcagcgtaaaatggtgaagaactagcatatagccattgatcataaactgactatcataaaatcaaaacaagtgaaataacaaaatggacatggtggctttgtttaggtagagccacaaaagaaaagacttgtaatatttttatatacagaggaaatctgtaacaggtattttgtttcttttaaagcaagcaacacagaggaatttatacctcaaactatctggccatatttactaccttatcactgcattattctcttttatctgtttaaagcatatagagatgaagtttgtagttgttttaagtactacacatttttaaattgttagcttccttaagtatatcatgtaaagaaatgtcttaatttttgaaaaaagtacatatttattttcttttgaattgtttttattgttttctatttatgccttgatgatttaatatggatttgttacagccaagtgccaaatgctctctcaaattgtcagcaatttaactagacacagataataatgggtttctttcagattttttgaaccatccacttacatatatttttaaaaaatgaaatccttttcctgttcatacactaaccaaatctctcaaatctgttatcccaatcattgttgcctctccgtttattataaactgtatgctcacaacttagtgtaatataccagcttgtatgcaatggattttcaaccagataacatacctttcctgctctggtgcttagagactatcaactccctcctttagtgaaggagccgtgttagagcttccgagaatagctccactggagagaagtggaatcctatatagaatgctgcactaattgacaacacagcctataggccaatgcatgagtaaaaaaaaaaacaattactggctcactggctttgaaaagtcacttactattgttgctgaaacttgctgagctgtttatagagaatgatgataacagaacttttcctctgtatcactggtgtttaggtgaattaattaaacattgtgatcattagtaccaggtattattatctttaagagtcttccacttcaatgcacatggtgcagttttggtgtgtaacttagaaggattgaacttctttgaatttactggacataacattttcagaatagttggtcatctagcaaccgcctcaaaatgtgtaagcaggagagaaatttctcatcacagggatttagacttactattacataaaggctaactatgagcttgctcattaattttgaaaagatgtacctggtggatatctagctagtaatatattctgaagcaacattttagctctattgatactctttctaatgctgatatgatcttgagtataagaaatgcatatgtcactagaatggataaaataatgctgcaaacttaatgttcttatgcaaaatggaacgctaatgaaacacagcttacaatcgcaaatcaaaactcacaagtgctcatctgttgtagatttagtgtaataagacttagattgtgctccttcggatatgattgtttctcaaatcttggcaatattccttagtcaaatcaggctactagaattctgtattggatatataagagcatgaaatttttaaaaatacacttgtgattataaaattaatcacaaatttcacttatacctgctatcagcagctagaaaacattttttttttaaatcaagtattttgtgtttggaatgttagaatgagatctgaatgtggtttcaatctaattttttcccagactactattttcttttttaggtactattctgagcatactcaacaaaacccatgcatttcataaactaatagaagttgaggattgttgaatctatttcacttattttggctgtggtttccatctgaaagtagaggttgtatacaccatatactgttcttcattttattaatatttttctccttgacctctcataaatttactttacacaattcttaccctgtacatatgtaaacataagtgtacgattcttaaccatggagtagaggtactagaatgcttacggccatctctttgtacaggaactgcattgactttcagtaaacataaagccacaactcctacatgatgttatgtaccatatgatctgttttgtatcttaaatttgatttacatatattatttatttctggtaactcactcagtttatgctgtgctaaatatcaatcaagccatgtataaatgtgatatgattggcaatatgtgtttactttaaacttgtcttttcaaaatattactcagtttatgttgtacaatgtagatggcctcttactaatgtaaaatgatttgtagtggaaacatttatatttttataataaacataatgaaaatattttttacagattggaa

SEQ ID NO: 6604 - DNA, 2546 bp, Homo sapiens
  source 1..2546: mol_type = unassigned DNA
cttctccagcaatcagagcgctccccctcacatcagtggcatgcttcatggagatatgctcctctcactgccctctgcaccagcaacatggattgtcagctctccatcctcctccttctcagctgctctgttctcgacagcttcggggaactgattccgcagccttccaatgaagtcaatctactggattcaaaaacaattcaaggggagctgggctggatctcttatccatcacatgggtgggaagagatcagtggtgtggatgaacattacacacccatcaggacttaccaggtgtgcaatgtcatggaccacagtcaaaacaattggctgagaacaaactgggtccccaggaactcagctcagaagatttatgtggagctcaagttcactctacgagactgcaatagcattccattggttttaggaacttgcaaggagacattcaacctgtactacatggagtctgatgatgatcatggggtgaaatttcgagagcatcagtttacaaagattgacaccattgcagctgatgaaagtttcactcaaatggatcttggggaccgtattctgaagctcaacactgagattagagaagtaggtcctgtcaacaagaagggattttatttggcatttcaagatgttggtgcttgtgttgccttggtgtctgtgagagtatacttcaaaaagtgcccatttacagtgaagaatctggctatgtttccagacacggtacccatggactcccagtccctggtggaggttagagggtcttgtgtcaacaattctaaggaggaagatcctccaaggatgtactgcagtacagaaggcgaatggcttgtacccattggcaagtgttcctgcaatgctggctatgaagaaagaggttttatgtgccaagcttgtcgaccaggtttctacaaggcattggatggtaatatgaagtgtgctaagtgcccgcctcacagttctactcaggaagatggttcaatgaactgcaggtgtgagaataattacttccgggcagacaaagaccctccatccatggcttgtacccgacctccatcttcaccaagaaatgttatctctaatataaacgagacctcagttatcctggactggagttggcccctggacacaggaggccggaaagatgttaccttcaacatcatatgtaaaaaatgtgggtggaatataaaacagtgtgagccatgcagcccaaatgtccgcttcctccctcgacagtttggactcaccaacaccacggtgacagtgacagaccttctggcacatactaactacacctttgagattgatgccgttaatggggtgtcagagctgagctccccaccaagacagtttgctgcggtcagcatcacaactaatcaggctgctccatcacctgtcctgacgattaagaaagatcggacctccagaaatagcatctctttgtcctggcaagaacctgaacatcctaatgggatcatattggactacgaggtcaaatactatgaaaagcaggaacaagaaacaagttataccattctgagggcaagaggcacaaatgttaccatcagtagcctcaagcctgacactatatacgtattccaaatccgagcccgaacagccgctggatatgggacgaacagccgcaagtttgagtttgaaactagtccagactgtatgtattatttcaatgcagtctagaggagggggcagggatcttgcaaaagatgtctgatcgtttattctcactgtttctaagttttaaacaaatgtgatacatttaaggtatattgcttgggacattgcaatttgcagagccctgtgtctgtatacagtatttgtgtttgtgtgggtgtacattttgtgtttctttttttcttgtatgcaaatcaaacatattctaatgcctgaaatgcttctgttttttttttttagccataaattgcttttgaggaacattatttaatatagtaacacacttccagtgtctgtcatttcagatattccaggttcattgcgtgattcaatgaaccacaaaaaagaaacttgctgatccatgagaatcttaattttgttttaatccttaacacattcaatagcatatcacagagagaataaggattttctaaaatgtgttttatcacttcattcacattcagaagtaatttgaatagcctgttcctttaaccccaaatttggctaaaattggcctaaaactggcaaacatttttccagtaacttttctttttttcaaatgaattttcttcatacttaaaaaagccctttgctaaaatataattttcaaaaaggtaaaattatgtctatggcactaatataaaatgagtagaagttaatgattttacttaactcatttttttctttctttctttttttttttttttttttgagacggagtcttgctctgtcacccaggctggagtacagcagagcgatctcggctcactgcaagctcctgcaagctccgcctcctggcttcacgccattctccccctcagcctcccgagtagctgggactacag

SEQ ID NO: 6605 - DNA, 3085 bp, Homo sapiens
  source 1..3085: mol_type = unassigned DNA
agagcgctccccctcacatcagtggcatgcttcatggagatatgctcctctcactgccctctgcaccagcaacatggattgtcagctctccatcctcctccttctcagctgctctgttctcgacagcttcggggaactgattccgcagccttccaatgaagtcaatctactggattcaaaaacaattcaaggggagctgggctggatctcttatccatcacatgggtgggaagagatcagtggtgtggatgaacattacacacccatcaggacttaccaggtgtgcaatgtcatggaccacagtcaaaacaattggctgagaacaaactgggtccccaggaactcagctcagaagatttatgtggagctcaagttcactctacgagactgcaatagcattccattggttttaggaacttgcaaggagacattcaacctgtactacatggagtctgatgatgatcatggggtgaaatttcgagagcatcagtttacaaagattgacaccattgcagctgatgaaagtttcactcaaatggatcttggggaccgtattctgaagctcaacactgagattagagaagtaggtcctgtcaacaagaagggattttatttggcatttcaagatgttggtgcttgtgttgccttggtgtctgtgagagtatacttcaaaaagtgcccatttacagtgaagaatctggctatgtttccagacacggtacccatggactcccagtccctggtggaggttagagggtcttgtgtcaacaattctaaggaggaagatcctccaaggatgtactgcagtacagaaggcgaatggcttgtacccattggcaagtgttcctgcaatgctggctatgaagaaagaggttttatgtgccaagcttgtcgaccaggtttctacaaggcattggatggtaatatgaagtgtgctaagtgcccgcctcacagttctactcaggaagatggttcaatgaactgcaggtgtgagaataattacttccgggcagacaaagaccctccatccatggcttgtacccgacctccatcttcaccaagaaatgttatctctaatataaacgagacctcagttatcctggactggagttggcccctggacacaggaggccggaaagatgttaccttcaacatcatatgtaaaaaatgtgggtggaatataaaacagtgtgagccatgcagcccaaatgtccgcttcctccctcgacagtttggactcaccaacaccacggtgacagtgacagaccttctggcacatactaactacacctttgagattgatgccgttaatggggtgtcagagctgagctccccaccaagacagtttgctgcggtcagcatcacaactaatcaggctgctccatcacctgtcctgacgattaagaaagatcggacctccagaaatagcatctctttgtcctggcaagaacctgaacatcctaatgggatcatattggactacgaggtcaaatactatgaaaagcaggaacaagaaacaagttataccattctgagggcaagaggcacaaatgttaccatcagtagcctcaagcctgacactatatacgtattccaaatccgagcccgaacagccgctggatatgggacgaacagccgcaagtttgagtttgaaactagtccagactctttctccatctctggtgaaagtagccaagtggtcatgatcgccatttcagcggcagtagcaattattctcctcactgttgtcatctatgttttgattgggaggttctgtggctataagtcaaaacatggggcagatgaaaaaagacttcattttggcaatgggcatttaaaacttccaggtctcaggacttatgttgacccacatacatatgaagaccctacccaagctgttcatgagtttgccaaggaattggatgccaccaacatatccattgataaagttgttggagcaggtgaatttggagaggtgtgcagtggtcgcttaaaacttccttcaaaaaaagagatttcagtggccattaagaccctgaaagttggctacacagaaaagcagaggagagacttcctgggagaagcaagcattatgggacagtttgaccaccccaatatcattcgactggaaggagttgttaccaaaagtaagccagttatgattgtcacagaatacatggagaatggttccttggatagtttcctacgtaaacacgatgcccagtttactgtcattcagctagtggggatgcttcgagggatagcatctggcatgaagtacctgtcagacatgggctatgttcaccgagacctcgctgctcggaacatcttgatcaacagtaacttggtgtgtaaggtttctgatttcggactttcgcgtgtcctggaggatgacccagaagctgcttatacaacaagaggagggaagatcccaatcaggtggacatcaccagaagctatagcctaccgcaagttcacgtcagccagcgatgtatggagttatgggattgttctctgggaggtgatgtcttatggagagagaccatactgggagatgtccaatcaggatgtaattaaagctgtagatgagggctatcgactgccaccccccatggactgcccagctgccttgtatcagctgatgctggactgctggcagaaagacaggaacaacagacccaagtttgagcagattgttagtattctggacaagcttatccggaatcccggcagcctgaagatcatcaccagtgcagccgcaaggccatcaaaccttcttctggaccaaagcaatgtggatatcactaccttccgcacaacagtgacatgaaaaaggttggtgtcaccgtggttgggccacagaagaagatcatcagtagcattaaagctctagaaacgcaatcaaagaatggcccagttcccgtgtaaagcacgggacggaagtgcttctggacggaagtggtggctgtggaaggcgtagcatcatcctgcagacagacaataattctggagatactggtggaagttccaagtccaataagacactcaaatatgagtacaaatgccttaaaatggaattgaaaaa

SEQ ID NO: 6606 - DNA, 2893 bp, Homo sapiens
  source 1..2893: mol_type = unassigned DNA
gactcagctgtggcttttagggcttggttcataccatgggggaaaaaaaagtcctaggagaaagcgacgtggctcattagtgttgcctcttcagtgctcaagccgcctggtggattcctatgacacagggggcctggaaagaaagggaaagtggatttaaaatatatatatacgtaacccaagccccataacccctaactggacaaatgaggtctgtttctttgggcctgaggctgtgccatataaagtcttattttgggactttacaaacttgtcctaactatcttgtggatagtgggctgtgacaatctggaatagagaacgttcacacttcgctcctttaaagaagcgaccccagatctgcaagggagtagattctgctatcttggcctcacagcccttcctgttgattacaaagcccgtggaagaaaacagaacacaccctcctcagttccgtctaaatgtgtttcttctgcttcaattacaccagttctggggcaaagacactgatgaaacaacacccatacctgaaaagaataaatgtgtgactttcaaatcccctttcgcagtgaaagaaacagcaaacacttaagattcagcatctgttctccagttgcactgaggaatgcactgtctcgcagcaccagctctgcagagcccttgccccagactctttgcggttttatttatatgtatttccatatttcattcctgtgtgtcactgctgcattggtgtggcagcaagtgaccaaatgctacaggtcttactatggacaccaggtcaggtgcaaccacacaaaacaaagccagttccatgagctgcctatgatatgcattgcggaagtaacattttacccagggtgtgccattgcagtgatataaatatatttttttcttagactaaatatgagctgactatctcttttgatgtgtgtacataggtgtgagtgtgtctgtatgcgtgcctgtctgtgtgcgggtgtgtgtatgtgcgtagcctcatgcttaggactacccatgaatgttgtggaatgctacacctggagagttctggttttccaccagtttcaagatgaagaactacatgatacagtggacctggagaccatccccttggaaagacaacccagagatgttcagcatcctgtatctacacgcatcctgtatctacacgtgtattttgtagctgtcacactaaccttaataagaattctacagctttggacagaggcattttcaccttaatggtgaagtaatttaaaatataaatccattcaggtgacaacccatcatcaaaattacaaattttctgattgaactcatctgaatcatcagttccttgatggagagagagaaggagatggaatgtgtctggtaaccccaaatggagtacaagtagcctttgttttcctgcataaatggacttgttgaatgcgaacgaatatatgcaattcatatacttttggagatgaacgtagatatgtgtgtcagctttgagatggtgtgtcctggattaatactttgtctcccaatatcacagaaaaatacatgccagtgactcttgaggttaaggtagttgggatgaaatggcctcaggcaatttcacattccctaattacctggaaagttctacagtaattaatatgcagctaactcctgttgccctcacaagagcatcagccttctagaatcggagctccggagtgtgaagattcagtattgatatgatatgtataccaaactccagccaacttactgccatttttcataatctgagtggctgccttgcttatcctaagctgtggttgcagaaaccgtggccatttatataagctataacatcaaatcagggaaaaatgaggaaaaaaaatagattctgaaccatttattgttgaataagtagagaaaatcatcaataaatatttattacattctgacagggtgtgtggcattgtgttctatgccagagtgacaaagttgattcacccctttttggggaccttaatatattttttaagggatgtgcctatgcattgatgcctgaaaaatatgtataaagaaatgaggttgactcttctgagcagttcatcttttccagaggtaagggtaggaggccaacttcagggtctgggtctgagcccgtgggcaagccctggccgagtgagctccaatgctaactcatgtgccgatctctagagcagtgggaaactaccccgctgcaccaaatcaagtagcttcaccttgtgtatgcaggccccaagttattttttagcaatcttacgagtgaaatgttctggtgggttgaaaaacgttcttattttaaagaaaggttgtgctcgctacactgctggtgtgtgcattctgagacctcttgtattcaatctgtgaaggatatgtgtattaatccgtacacccgtatagcctcaatatttgtctgaagacacttaaattctgacccataaaggaaagttctagaagcaatattttcacttatttaacattctccaaacaacatcaagcattgatacacactgaagagtgcgtttattttttgtatcactctaagtatgttggaatatgcaaggactgtggttcaaattagaatgtataaggcatattataatttagttcatactgaataagaaattaacagaacattgttcggttcacacgttccaaactttgagtgatttctggagttagacatagattttctattttgttttaatttgtcaaggtatttttcttcccttcatgaactttaggtacacataacttatgtcatttatttatggtcttttatacctagtttgtaaaattgtaaaatagcaaactaaatgcaaagagtttgcatttgaaaataataaagtagttgccgtatacaaccctgcaa

SEQ ID NO: 6607 - DNA, 531 bp, Homo sapiens
  source 1..531: mol_type = unassigned DNA
atgggggaaaaaaaagtcctaggagaaagcgacgtggctcattagtgttgcctcttcagtgctcaagccgcctggtggattcctatgacacagggggcctggaaagaaagggaaagtggatttaaaatatatatatacgtaacccaagccccataacccctaactggacaaatgaggtctgtttctttgggcctgaggctgtgccatataaagtcttattttgggactttacaaacttgtcctaactatcttgtggatagtgggctgtgacaatctggaatagagaacgttcacacttcgctcctttaaagaagcgaccccagatctgcaagatggggtcttgctcttttgcccaggctggtctcaaactcttgggctcaagcagtcttccctccttgggctcccaaagtgctggaattacagggagtagattctgctatcttggcctcacagcccttcctgttgattacaaagcccgtggaagaaaacagaacacaccctcctcagttccgtctaaatgtgtttcttctg

SEQ ID NO: 6608 - DNA, 3454 bp, Homo sapiens
  source 1..3454: mol_type = unassigned DNA
agaagcggcaggagcagcgttggcaccggcgaaccatggctgggattttctatttcgccctattttcgtgtctcttcgggatttgcgacgctgtcacaggttccagggtataccccgcgaatgaagttaccttattggattccagatctgttcagggagaacttgggtggatagcaagccctctggaaggagggtgggaggaagtgagtatcatggatgaaaaaaatacaccaatccgaacctaccaagtgtgcaatgtgatggaacccagccagaataactggctacgaactgattggatcacccgagaaggggctcagagggtgtatattgagattaaattcaccttgagggactgcaatagtcttccgggcgtcatggggacttgcaaggagacgtttaacctgtactactatgaatcagacaacgacaaagagcgtttcatcagagagaaccagtttgtcaaaattgacaccattgctgctgatgagagcttcacccaagtggacattggtgacagaatcatgaagctgaacaccgagatccgggatgtagggccattaagcaaaaaggggttttacctggcttttcaggatgtgggggcctgcatcgccctggtatcagtccgtgtgttctataaaaagtgtccactcacagtccgcaatctggcccagtttcctgacaccatcacaggggctgatacgtcttccctggtggaagttcgaggctcctgtgtcaacaactcagaagagaaagatgtgccaaaaatgtactgtggggcagatggtgaatggctggtacccattggcaactgcctatgcaacgctgggcatgaggagcggagcggagaatgccaagcttgcaaaattggatattacaaggctctctccacggatgccacctgtgccaagtgcccaccccacagctactctgtctgggaaggagccacctcgtgcacctgtgaccgaggctttttcagagctgacaacgatgctgcctctatgccctgcacccgtccaccatctgctcccctgaacttgatttcaaatgtcaacgagacatctgtgaacttggaatggagtagccctcagaatacaggtggccgccaggacatttcctataatgtggtatgcaagaaatgtggagctggtgaccccagcaagtgccgaccctgtggaagtggggtccactacaccccacagcagaatggcttgaagaccaccaaagtctccatcactgacctcctagctcataccaattacacctttgaaatctgggctgtgaatggagtgtccaaatataaccctaacccagaccaatcagtttctgtcactgtgaccaccaaccaagcagcaccatcatccattgctttggtccaggctaaagaagtcacaagatacagtgtggcactggcttggctggaaccagatcggcccaatggggtaatcctggaatatgaagtcaagtattatgagaaggatcagaatgagcgaagctatcgtatagttcggacagctgccaggaacacagatatcaaaggcctgaaccctctcacttcctatgttttccacgtgcgagccaggacagcagctggctatggagacttcagtgagcccttggaggttacaaccaacacagtgccttcccggatcattggagatggggctaactccacagtccttctggtctctgtctcgggcagtgtggtgctggtggtaattctcattgcagcttttgtcatcagccggagacggagtaaatacagtaaagccaaacaagaagcggatgaagagaaacatttgaatcaaggtgtaagaacatatgtggacccctttacgtacgaagatcccaaccaagcagtgcgagagtttgccaaagaaattgacgcatcctgcattaagattgaaaaagttataggagttggtgaatttggtgaggtatgcagtgggcgtctcaaagtgcctggcaagagagagatctgtgtggctatcaagactctgaaagctggttatacagacaaacagaggagagacttcctgagtgaggccagcatcatgggacagtttgaccatccgaacatcattcacttggaaggcgtggtcactaaatgtaaaccagtaatgatcataacagagtacatggagaatggctccttggatgcattcctcaggaaaaatgatggcagatttacagtcattcagctggtgggcatgcttcgtggcattgggtctgggatgaagtatttatctgatatgagctatgtgcatcgtgatctggccgcacggaacatcctggtgaacagcaacttggtctgcaaagtgtctgattttggcatgtcccgagtgcttgaggatgatccggaagcagcttacaccaccaggggtggcaagattcctatccggtggactgcgccagaagcaattgcctatcgtaaattcacatcagcaagtgatgtatggagctatggaatcgttatgtgggaagtgatgtcgtacggggagaggccctattgggatatgtccaatcaagatgtgattaaagccattgaggaaggctatcggttaccccctccaatggactgccccattgcgctccaccagctgatgctagactgctggcagaaggagaggagcgacaggcctaaatttgggcagattgtcaacatgttggacaaactcatccgcaaccccaacagcttgaagaggacagggacggagagctccagacctaacactgccttgttggatccaagctcccctgaattctctgctgtggtatcagtgggcgattggctccaggccattaaaatggaccggtataaggataacttcacagctgctggttataccacactagaggctgtggtgcacgtgaaccaggagtaagtactcaacgatgtaacacgaaaggggacctggcaagaattggtatcacagccatcacgcaccagaataagattttgagcagtgtccaggcaatgcgaacccaaatgcagcagatgcacggcagaatggttcccgtctgagccagtactgaataaactcaaaactcttgaaattagtttacctcatccatgcactttaattgaagaactgcactttttttacttcgtcttcgccctctgaaattaaagaaatgaaaaaaaaaaacaatatctgcagcgttgcttggtgcacagattgctgaaactgtggggcttacagaaatgactgccggtcatttgaatgagacctggaacaaatcgtttctcagaagtacttttctgttcatcaccagtctgtaaaatacatgtacctatagaaatagaacactgcctctgagttttgatgctgtatttgctgccagacactgagcttctgagacatccctgattctctctccatttggaattacaaccattgtattttgtttgtggcataaattacagtcatctgtctttcactggaatgaagac

SEQ ID NO: 6609 - DNA, 3363 bp, Homo sapiens
  source 1..3363: mol_type = unassigned DNA
acgcgtgctcatcttgtgtaaaagtaaaagttgctcatgtcattagctcggctctgagtttgcatgagaaaccagcgcagctctcgagccacgggagaaaacacgatctgctgcggagcccagtgacctgaaactgtagcagtgactcgagacctgtcctctcctcgacgtcgccctataaccctcccgctttatttaggatccgcttttccgagagcagccactcaggcaacccccggaagaagcggcaggagcagcgttggcaccggcgaaccatggctgggattttctatttcgccctattttcgtgtctcttcgggatttgcgacgctgtcacaggttccagggtataccccgcgaatgaagttaccttattggattccagatctgttcagggagaacttgggtggatagcaagccctctggaaggagggtgggaggaagtgagtatcatggatgaaaaaaatacaccaatccgaacctaccaagtgtgcaatgtgatggaacccagccagaataactggctacgaactgattggatcacccgagaaggggctcagagggtgtatattgagattaaattcaccttgagggactgcaatagtcttccgggcgtcatggggacttgcaaggagacgtttaacctgtactactatgaatcagacaacgacaaagagcgtttcatcagagagaaccagtttgtcaaaattgacaccattgctgctgatgagagcttcacccaagtggacattggtgacagaatcatgaagctgaacaccgagatccgggatgtagggccattaagcaaaaaggggttttacctggcttttcaggatgtgggggcctgcatcgccctggtatcagtccgtgtgttctataaaaagtgtccactcacagtccgcaatctggcccagtttcctgacaccatcacaggggctgatacgtcttccctggtggaagttcgaggctcctgtgtcaacaactcagaagagaaagatgtgccaaaaatgtactgtggggcagatggtgaatggctggtacccattggcaactgcctatgcaacgctgggcatgaggagcggagcggagaatgccaagcttgcaaaattggatattacaaggctctctccacggatgccacctgtgccaagtgcccaccccacagctactctgtctgggaaggagccacctcgtgcacctgtgaccgaggctttttcagagctgacaacgatgctgcctctatgccctgcacccgtccaccatctgctcccctgaacttgatttcaaatgtcaacgagacatctgtgaacttggaatggagtagccctcagaatacaggtggccgccaggacatttcctataatgtggtatgcaagaaatgtggagctggtgaccccagcaagtgccgaccctgtggaagtggggtccactacaccccacagcagaatggcttgaagaccaccaaagtctccatcactgacctcctagctcataccaattacacctttgaaatctgggctgtgaatggagtgtccaaatataaccctaacccagaccaatcagtttctgtcactgtgaccaccaaccaagcagcaccatcatccattgctttggtccaggctaaagaagtcacaagatacagtgtggcactggcttggctggaaccagatcggcccaatggggtaatcctggaatatgaagtcaagtattatgagaaggatcagaatgagcgaagctatcgtatagttcggacagctgccaggaacacagatatcaaaggcctgaaccctctcacttcctatgttttccacgtgcgagccaggacagcagctggctatggagacttcagtgagcccttggaggttacaaccaacacagtgccttcccggatcattggagatggggctaactccacagtccttctggtctctgtctcgggcagtgtggtgctggtggtaattctcattgcagcttttgtcatcagccggagacggagtaaatacagtaaagccaaacaagaagcggatgaagagaaacatttgaatcaaggtgtaagaacatatgtggacccctttacgtacgaagatcccaaccaagcagtgcgagagtttgccaaagaaattgacgcatcctgcattaagattgaaaaagttataggagttggtgaatttggtgaggtatgcagtgggcgtctcaaagtgcctggcaagagagagatctgtgtggctatcaagactctgaaagctggttatacagacaaacagaggagagacttcctgagtgaggccagcatcatgggacagtttgaccatccgaacatcattcacttggaaggcgtggtcactaaatgtaaaccagtaatgatcataacagagtacatggagaatggctccttggatgcattcctcaggaaaaatgatggcagatttacagtcattcagctggtgggcatgcttcgtggcattgggtctgggatgaagtatttatctgatatgagctatgtgcatcgtgatctggccgcacggaacatcctggtgaacagcaacttggtctgcaaagtgtctgattttggcatgtcccgagtgcttgaggatgatccggaagcagcttacaccaccaggggtggcaagattcctatccggtggactgcgccagaagcaattgcctatcgtaaattcacatcagcaagtgatgtatggagctatggaatcgttatgtgggaagtgatgtcgtacggggagaggccctattgggatatgtccaatcaagatgtgattaaagccattgaggaaggctatcggttaccccctccaatggactgccccattgcgctccaccagctgatgctagactgctggcagaaggagaggagcgacaggcctaaatttgggcagattgtcaacatgttggacaaactcatccgcaaccccaacagcttgaagaggacagggacggagagctccagacctaacactgccttgttggatccaagctcccctgaattctctgctgtggtatcagtgggcgattggctccaggccattaaaatggaccggtataaggataacttcacagctgctggttataccacactagaggctgtggtgcacgtgaaccaggaggacctggcaagaattggtatcacagccatcacgcaccagaataagattttgagcagtgtccaggcaatgcgaacccaaatgcagcagatgcacggcagaatggttcccgtctgagccagtactgaataaactcaaaactcttgaaattagtttacctcatccatgcactttaattgaagaactgcactttttttacttcgtcttcgccctctgaaattaaagaaatgaaaaaaaaaaacaa

SEQ ID NO: 6610 - DNA, 492 bp, Homo sapiens
  source 1..492: mol_type = unassigned DNA
gcctatcgtaaattcacatcagcaagtgatgtatggagctatggaatcgttatgtgggaagtgatgtcgtacggggagaggccctattgggatatgtccaatcaagatacctaacactgccttgttggatccaagctcccctgaattctctgctgtggtatcagtgggcgattggctccaggccattaaaatggaccggtataaggataacttcacagctgctggttataccacactagaggctgtggtgcacgtgaaccaggaggacctggcaagaattggtatcacagccatcacgcaccagaataagattttgagcagtgtccaggcaatgcgaacccaaatgcagcagatgcacggcagaatggttcccgtctgagccagtactgaataaactcaaaactcttgaaattagtttacctcatccatgcactttaattgaagaactgcactttttttacttcgtcttcgccctctgaaattaaagaaatg

SEQ ID NO: 6611 - DNA, 588 bp, Homo sapiens
  source 1..588: mol_type = unassigned DNA
gaggacaaaataaattaattatcctaaagattatttctgcattgaaacaggcctccccatttatcattttccccttttgcttgagagagcaattatccattcatatgctccctggataccagaggccactttagttaaagaccttgtcaacaagccacccaaaggtttaactatccagatggaatttaaacctactcgtccttttaatatttcattcctagctccccacagctgaggcataagcttggcttgttttaattaaattagatcacacaagacaggtatcttggcagtaaaattgtgcgcagcccatttttatctcattaagtgcagcgctcatcaaaggtttgtgtttttctttctgaaaactctaggtaaaccagtaatgatcataacagagtacatggagaatggctccttggatgcattcctcaggaaaaatgatggcagatttacagtcattcagctggtgggcatgcttcgtggcattgggtctgggatgaagtatttatctgatatgagctatgtgcatcgtgatctggccgcacggaacatcctggtgaacagcaacttggtctgcaaagtgtc

SEQ ID NO: 6612 - DNA, 584 bp, Homo sapiens
  source 1..584: mol_type = unassigned DNA
atttattccactgggatagaagcggcaggagcagcgttggcaccggcgaaccatggctgggattttctatttcgccctattttcgtgtctcttcgggatttgcgacgctgtcacaggttccagggtataccccgcgaatgaaggtccaccatctgctcccctgaacttgatttcaaatgtcaacgagacatctgtgaacttggaatggagtagccctcagaatacaggtggccgccaggacatttcctataatgtggtatgcaagaaatgtggagctggtgaccccagcaagtgccgaccctgtggaagtggggtccactacaccccacagcagaatggcttgaagaccaccaaagtctccatcactgacctcctagctcataccaattacacctttgaaatctgggctgtgaatggagtgtccaaatataaccctaacccagaccaatcagtttctgtcactgtgaccaccaaccaagcagcaccatcatccattgctttggtccaggctaaagaagtcacaagatacagtgtggcactggcttggctggaaccagatcggcccaatggggtaatcctggaat

SEQ ID NO: 6613 - DNA, 565 bp, Homo sapiens
  source 1..565: mol_type = unassigned DNA
agtttcatggatctctttctagtactcatttcacttgcaaaattggatattacaaggctctctccacggatgccacctgtgccaagtgcccaccccacagctactctgtctgggaaggagccacctcgtgcacctgtgaccgaggctttttcagagctgacaacgatgctgcctctatgccctgcacccgtccaccatctgctcccctgaacttgatttcaaatgtcaacgagacatctgtgaacttggaatggagtagccctcagaatacaggtggccgccaggacatttcctataatgtggtatgcaagaaatgtggagctggtgaccccagcaagtgccgaccctgtggaagtggggtccactacaccccacagcagaatggcttgaagaccaccaaagtctccatcactgacctcctagctcataccaattacacctttgaaatctgggctgtgaatggagtgtccaaatataaccctaacccagaccaatcagtttctgtcactgtgaccaccaaccaagcagcaccatcatccattgctttggtccaggctaaagaagt

SEQ ID NO: 6614 - DNA, 579 bp, Homo sapiens
  source 1..579: mol_type = unassigned DNA
gactatactcaatgaatgcttttggttgcatgacctgcatttcaagccacatgatcgctaatgattagcaagaacgtctcccttcttctgaaacaaggaggtggctttgcatttttgctttggtctatttgcagtggtttctatttgtttgtttttttcttcttccctgcagcttgcaaaattggatattacaaggctctctccacggatgccacctgtgccaagtgcccaccccacagctactctgtctgggaaggagccacctcgtgcacctgtgaccgaggctttttcagagctgacaacgatgctgcctctatgccctgcacccgtccaccatctgctcccctgaacttgatttcaaatgtcaacgagacatctgtgaacttggaatggagtagccctcagaatacaggtggccgccaggacatttcctataatgtggtatgcaagaaatgtggagctggtgaccccagcaagtgccgaccctgtggaagtggggtccactacaccccacagcagaatggcttgaagaccaccaaagtctccatcactgacctcctagctcataccaattacacc

SEQ ID NO: 6615 - DNA, 545 bp, Homo sapiens
  source 1..545: mol_type = unassigned DNA
atttattccactgggatagaagcggcaggagcagcgttggcaccggcgaaccatggctgggattttctatttcgccctattttcgtgtctcttcgggatttgcgacgctgtcacaggttccagggtataccccgcgaatgaagtgggaggaagtgagtatcatggatgaaaaaaatacaccaatccgaacctaccaagtgtgcaatgtgatggaacccagccagaataactggctacgaactgattggatcacccgagaaggggctcagagggtgtatattgagattaaattcaccttgagggactgcaatagtcttccgggcgtcatggggacttgcaaggagacgtttaacctgtactactatgaatcagacaacgacaaagagcgtttcatcagagagaaccagtttgtcaaaattgacaccattgctgctgatgagagcttcacccaagtggacattggtgacagaatcatgaagctgaacaccgagatccgggatgtagggccattaagcaaaaaggggttttacctggcttttcaggat

SEQ ID NO: 6616 - DNA, 552 bp, Homo sapiens
  source 1..552: mol_type = unassigned DNA
aaaattcaagccagtgatttcctacgggtggaagacgagtctctgattgtcccccaacacatcttgagaaagagagaatactttcgttaccttattggattccagatctgttcagggagaacttgggtggatagcaagccctctggaaggagggtgggaggaagtgagtatcatggatgaaaaaaatacaccaatccgaacctaccaagtgtgcaatgtgatggaacccagccagaataactggctacgaactgattggatcacccgagaaggggctcagagggtgtatattgagattaaattcaccttgagggactgcaatagtcttccgggcgtcatggggacttgcaaggagacgtttaacctgtactactatgaatcagacaacgacaaagagcgtttcatcagagagaaccagtttgtcaaaattgacaccattgctgctgatgagagcttcacccaagtggacattggtgacagaatcatgaagctgaacaccgagatccgggatgtagggccattaagcaaaaaggggttttacctggcttttca

SEQ ID NO: 6617 - DNA, 558 bp, Homo sapiens
  source 1..558: mol_type = unassigned DNA
accggccgggcccgcccccttggcaatgtcttcagcccgctgctctcctaacttaagcatttattccactgggatagaagcggcaggagcagcgttggcaccggcgaaccatggctgggattttctatttcgccctattttcgtgtctcttcgggatttgcgacgctgtcacaggttccagggtataccccgcgaatgaagttaccttattggattccagatctgttcagggagaacttgggtggatagcaagccctctggaaggagggtgggaggaagtgagtatcatggatgaaaaaaatacaccaatccgaacctaccaagtgtgcaatgtgatggaacccagccagaataactggctacgaactgattggatcacccgagaaggggctcagagggtgtatattgagattaaattcaccttgagggactgcaatagtcttccgggcgtcatggggacttgcaaggagacgtttaacctgtactactatgaatcagacaacgacaaagagcgtttcatcagagagaaccagtttgtcaaaattgacaccattgctg

SEQ ID NO: 6618 - DNA, 617 bp, Homo sapiens
  source 1..617: mol_type = unassigned DNA
agctcggctctgagtttgcatgagaaaccagcgcagctctcgagccacgggagaaaacacgatctgctgcggagcccagtgacctgaaactgtagcagtgactcgagacctgtcctctcctcgacgtcgccctataaccctcccgctttatttaggatccgcttttccgagagcagccactcaggcaacccccggaaggtttgttaggagtttctccttgaaacgctttccgattccatcttttgaaatccagcaggcgagagtcacgacagactccaggacctcttgagcgctgtccgcagccccacgaagcggcaggagcagcgttggcaccggcgaaccatggctgggattttctatttcgccctattttcgtgtctcttcgggatttgcgacgctgtcacaggttccagggtataccccgcgaatgaagttaccttattggattccagatctgttcagggagaacttgggtggatagcaagccctctggaaggagggtgggaggaagtgagtatcatggatgaaaaaaatacaccaatccgaacctaccaagtgtgcaatgtgatggaacccagccagaataactggctacgaactgattggatcacccgaga

SEQ ID NO: 6619 - DNA, 6346 bp, Homo sapiens
  source 1..6346: mol_type = unassigned DNA; mol_type = unassigned DNA
ctgggatagaagcggcaggagcagcgttggcaccggcgaaccatggctgggattttctatttcgccctattttcgtgtctcttcgggatttgcgacgctgtcacaggttccagggtataccccgcgaatgaagttaccttattggattccagatctgttcagggagaacttgggtggatagcaagccctctggaaggagggtgggaggaagtgagtatcatggatgaaaaaaatacaccaatccgaacctaccaagtgtgcaatgtgatggaacccagccagaataactggctacgaactgattggatcacccgagaaggggctcagagggtgtatattgagattaaattcaccttgagggactgcaatagtcttccgggcgtcatggggacttgcaaggagacgtttaacctgtactactatgaatcagacaacgacaaagagcgtttcatcagagagaaccagtttgtcaaaattgacaccattgctgctgatgagagcttcacccaagtggacattggtgacagaatcatgaagctgaacaccgagatccgggatgtagggccattaagcaaaaaggggttttacctggcttttcaggatgtgggggcctgcatcgccctggtatcagtccgtgtgttctataaaaagtgtccactcacagtccgcaatctggcccagtttcctgacaccatcacaggggctgatacgtcttccctggtggaagttcgaggctcctgtgtcaacaactcagaagagaaagatgtgccaaaaatgtactgtggggcagatggtgaatggctggtacccattggcaactgcctatgcaacgctgggcatgaggagcggagcggagaatgccaagcttgcaaaattggatattacaaggctctctccacggatgccacctgtgccaagtgcccaccccacagctactctgtctgggaaggagccacctcgtgcacctgtgaccgaggctttttcagagctgacaacgatgctgcctctatgccctgcacccgtccaccatctgctcccctgaacttgatttcaaatgtcaacgagacatctgtgaacttggaatggagtagccctcagaatacaggtggccgccaggacatttcctataatgtggtatgcaagaaatgtggagctggtgaccccagcaagtgccgaccctgtggaagtggggtccactacaccccacagcagaatggcttgaagaccaccaaagtctccatcactgacctcctagctcataccaattacacctttgaaatctgggctgtgaatggagtgtccaaatataaccctaacccagaccaatcagtttctgtcactgtgaccaccaaccaagcagcaccatcatccattgctttggtccaggctaaagaagtcacaagatacagtgtggcactggcttggctggaaccagatcggcccaatggggtaatcctggaatatgaagtcaagtattatgagaaggatcagaatgagcgaagctatcgtatagttcggacagctgccaggaacacagatatcaaaggcctgaaccctctcacttcctatgttttccacgtgcgagccaggacagcagctggctatggagacttcagtgagcccttggaggttacaaccaacacagtgccttcccggatcattggagatggggctaactccacagtccttctggtctctgtctcgggcagtgtggtgctggtggtaattctcattgcagcttttgtcatcagccggagacggagtaaatacagtaaagccaaacaagaagcggatgaagagaaacatttgaatcaaggtgtaagaacatatgtggacccctttacgtacgaagatcccaaccaagcagtgcgagagtttgccaaagaaattgacgcatcctgcattaagattgaaaaagttataggagttggtgaatttggtgaggtatgcagtgggcgtctcaaagtgcctggcaagagagagatctgtgtggctatcaagactctgaaagctggttatacagacaaacagaggagagacttcctgagtgaggccagcatcatgggacagtttgaccatccgaacatcattcacttggaaggcgtggtcactaaatgtaaaccagtaatgatcataacagagtacatggagaatggctccttggatgcattcctcaggaaaaatgatggcagatttacagtcattcagctggtgggcatgcttcgtggcattgggtctgggatgaagtatttatctgatatgagctatgtgcatcgtgatctggccgcacggaacatcctggtgaacagcaacttggtctgcaaagtgtctgattttggcatgtcccgagtgcttgaggatgatccggaagcagcttacaccaccaggggtggcaagattcctatccggtggactgcgccagaagcaattgcctatcgtaaattcacatcagcaagtgatgtatggagctatggaatcgttatgtgggaagtgatgtcgtacggggagaggccctattgggatatgtccaatcaagatgtgattaaagccattgaggaaggctatcggttaccccctccaatggactgccccattgcgctccaccagctgatgctagactgctggcagaaggagaggagcgacaggcctaaatttgggcagattgtcaacatgttggacaaactcatccgcaaccccaacagcttgaagaggacagggacggagagctccagacctaacactgccttgttggatccaagctcccctgaattctctgctgtggtatcagtgggcgattggctccaggccattaaaatggaccggtataaggataacttcacagctgctggttataccacactagaggctgtggtgcacgtgaaccaggaggacctggcaagaattggtatcacagccatcacgcaccagaataagattttgagcagtgtccaggcaatgcgaacccaaatgcagcagatgcacggcagaatggttcccgtctgagccagtactgaataaactcaaaactcttgaaattagtttacctcatccatgcactttaattgaagaactgcactttttttacttcgtcttcgccctctgaaattaaagaaatgaaaaaaaaaaacaatatctgcagcgttgcttggtgcacagattgctgaaactgtggggcttacagaaatgactgccggtcatttgaatgagacctggaacaaatcgtttctcagaagtacttttctgttcatcaccagtctgtaaaatacatgtacctatagaaatagaacactgcctctgagttttgatgctgtatttgctgccagacactgagcttctgagacatccctgattctctctccatttggaattacaaccattgtattttgtttgtggcataaattacagtcatctgtctttcactggaatgaagaccatgcctaggaacattttttaaggactcagctgtggcttttagggcttggttcataccatgggggaaaaaaaagtcctaggagaaagcgacgtggctcattagtgttgcctcttcagtgctcaagccgcctggtggattcctatgacacagggggcctggaaagaaagggaaagtggatttaaaatatatatatacgtaacccaagccccataacccctaactggacaaatgaggtctgtttctttgggcctgaggctgtgccatataaagtcttattttgggactttacaaacttgtcctaactatcttgtggatagtgggctgtgacaatctggaatagagaacgttcacacttcgctcctttaaagaagcgaccccagatctgcaagggagtagattctgctatcttggcctcacagcccttcctgttgattacaaagcccgtggaagaaaacagaacacaccctcctcagttccgtctaaatgtgtttcttctgcttcaattacaccagttctggggcaaagacactgatgaaacaacacccatacctgaaaagaataaatgtgtgactttcaaatcccctttcgcagtgaaagaaacagcaaacacttaagattcagcatctgttctccagttgcactgaggaatgcactgtctcgcagcaccagctctgcagagcccttgccccagactctttgcggttttatttatatgtatttccatatttcattcctgtgtgtcactgctgcattggtgtggcagcaagtgaccaaatgctacaggtcttactatggacaccaggtcaggtgcaaccacacaaaacaaagccagttccatgagctgcctatgatatgcattgcggaagtaacattttacccagggtgtgccattgcagtgatataaatatatttttttcttagactaaatatgagctgactatctcttttgatgtgtgtacataggtgtgagtgtgtctgtatgcgtgcctgtctgtgtgcgggtgtgtgtatgtgcgtagcctcatgcttaggactacccatgaatgttgtggaatgctacacctggagagttctggttttccaccagtttcaagatgaagaactacatgatacagtggacctggagaccatccccttggaaagacaacccagagatgttcagcatcctgtatctacacgcatcctgtatctacacgtgtattttgtagctgtcacactaaccttaataagaattctacagctttggacagaggcattttcaccttaatggtgaagtaatttaaaatataaatccattcaggtgacaacccatcatcaaaattacaaattttctgattgaactcatctgaatcatcagttccttgatggagagagagaaggagatggaatgtgtctggtaaccccaaatggagtacaagtagcctttgttttcctgcataaatggacttgttgaatgcgaacgaatatatgcaattcatatacttttggagatgaacgtagatatgtgtgtcagctttgagatggtgtgtcctggattaatactttgtctcccaatatcacagaaaaatacatgccagtgactcttgaggttaaggtagttgggatgaaatggcctcaggcaatttcacattccctaattacctggaaagttctacagtaattaatatgcagctaactcctgttgccctcacaagagcatcagccttctagaatcggagctccggagtgtgaagattcagtattgatatgatatgtataccaaactccagccaacttactgccatttttcataatctgagtggctgccttgcttatcctaagctgtggttgcagaaaccgtggccatttatataagctataacatcaaatcagggaaaaatgaggaaaaaaaatagattctgaaccatttattgttgaataagtagagaaaatcatcaataaatatttattacattctgacagggtgtgtggcattgtgttctatgccagagtgacaaagttgattcacccctttttggggaccttaatatattttttaagggatgtgcctatgcattgatgcctgaaaaatatgtataaagaaatgaggttgactcttctgagcagttcatcttttccagaggtaagggtaggaggccaacttcagggtctgggtctgagcccgtgggcaagccctggccgagtgagctccaatgctaactcatgtgccgatctctagagcagtgggaaactaccccgctgcaccaaatcaagtagcttcaccttgtgtatgcaggccccaagttattttttagcaatcttacgagtgaaatgttctggtgggttgaaaaacgttcttattttaaagaaaggttgtgctcgctacactgctggtgtgtgcattctgagacctcttgtattcaatctgtgaaggatatgtgtattaatccgtacacccgtatagcctcaatatttgtctgaagacacttaaattctgacccataaaggaaagttctagaagcaatattttcacttatttaacattctccaaacaacatcaagcattgatacacactgaagagtgcgtttattttttgtatcactctaagtatgttggaatatgcaaggactgtggttcaaattagaatgtataaggcatattataatttagttcatactgaataagaaattaacagaacattgttcggttcacacgttccaaactttgagtgatttctggagttagacatagattttctattttgttttaatttgtcaaggtatttttcttcccttcatgaactttaggtacacataacttatgtcatttatttatggtcttttatacctagtttgtaaaattgtaaaatagcaaactaaatgcaaagagtttgcatttgaaaataataaagtagttgccgtatacaaccctgc

SEQ ID NO: 6620 - DNA, 2058 bp, Homo sapiens
  source 1..2058: mol_type = unassigned DNA
ggcccaagtgaatagtcctcgcgcaagcgggacactgtggtggatgcaattcccctcgcctccagccgcgaggagctccccggcgccgcaggcagcgtcctcctccgaagcagctgcacctgcaactgggcagcctggaccctcgtgccctgttcccgggacctcgcgcagggggcgccccgggacaccccctgcgggccgggtggaggaggaagaggaggaggaggaagaagacgtggacaaggacccccatcctacccagaacacctgcctgcgctgccgccacttctctttaagggagaggaaaagagagcctaggagaaccatggggggctgcgaagtccgggaatttcttttgcaatttggtttcttcttgcctctgctgacagcgtggccaggcgactgcagtcacgtctccaacaaccaagttgtgttgcttgatacaacaactgtactgggagagctaggatggaaaacatatccattaaatgggtgggatgccatcactgaaatggatgaacataataggcccattcacacataccaggtatgtaatgtaatggaaccaaaccaaaacaactggcttcgtacaaactggatctcccgtgatgcagctcagaaaatttatgtggaaatgaaattcacactaagggattgtaacagcatcccatgggtcttggggacttgcaaagaaacatttaatctgttttatatggaatcagatgagtcccacggaattaaattcaagccaaaccagtatacaaagatcgacacaattgctgctgatgagagttttacccagatggatttgggtgatcgcatcctcaaactcaacactgaaattcgtgaggtggggcctatagaaaggaaaggattttatctggcttttcaagacattggggcgtgcattgccctggtttcagtccgtgttttctacaagaaatgccccttcactgttcgtaacttggccatgtttcctgataccattccaagggttgattcctcctctttggttgaagtacggggttcttgtgtgaagagtgctgaagagcgtgacactcctaaactgtattgtggagctgatggagattggctggttcctcttggaaggtgcatctgcagtacaggatatgaagaaattgagggttcttgccatgcttgcagaccaggattctataaagcttttgctgggaacacaaaatgttctaaatgtcctccacacagtttaacatacatggaagcaacttctgtctgtcagtgtgaaaagggttatttccgagctgaaaaagacccaccttctatggcatgtaccaggccaccttcagctcctaggaatgtggtttttaacatcaatgaaacagcccttattttggaatggagcccaccaagtgacacaggagggagaaaagatctcacatacagtgtaatctgtaagaaatgtggcttagacaccagccagtgtgaggactgtggtggaggactccgcttcatcccaagacatacaggcctgatcaacaattccgtgatagtacttgactttgtgtctcacgtgaattacacctttgaaatagaagcaatgaatggagtttctgagttgagtttttctcccaagccattcacagctattacagtgaccacggatcaagatggtaagttccactgctgttctctcaaaacagacccataatttcttttgatgcataaatatccctcatgggcatgtatttattgcaggtgctatgcagtcatatacgttatacactgcagaggtaatgcactggttgttgttcttgttctttcctaaaactcagaaagatatttttatattacttctcagcagtatgaataataagatgaaatgcttccctccactgtttatgtactcatgtattttgtataatcatataacaatatatcttaatgagtaagtccatattacttaccaatagaagtcagaaatcaataaaatgttattaaatgaattgaatttcaattgccccacttatgctgccatcctttttgcatgtcaaataaagcaaatagtaagaatttttaaaa

SEQ ID NO: 6621 - DNA, 3971 bp, Homo sapiens
  source 1..3971: mol_type = unassigned DNA
aagtgaatagtcctcgcgcaagcgggacactgtggtggatgcaattcccctcgcctccagccgcgaggagctccccggcgccgcaggcagcgtcctcctccgaagcagctgcacctgcaactgggcagcctggaccctcgtgccctgttcccgggacctcgcgcagggggcgccccgggacaccccctgcgggccgggtggaggaggaagaggaggaggaggaagaagacgtggacaaggacccccatcctacccagaacacctgcctgcgctgccgccacttctctttaagggagaggaaaagagagcctaggagaaccatggggggctgcgaagtccgggaatttcttttgcaatttggtttcttcttgcctctgctgacagcgtggccaggcgactgcagtcacgtctccaacaaccaagttgtgttgcttgatacaacaactgtactgggagagctaggatggaaaacatatccattaaatgggtgggatgccatcactgaaatggatgaacataataggcccattcacacataccaggtatgtaatgtaatggaaccaaaccaaaacaactggcttcgtacaaactggatctcccgtgatgcagctcagaaaatttatgtggaaatgaaattcacactaagggattgtaacagcatcccatgggtcttggggacttgcaaagaaacatttaatctgttttatatggaatcagatgagtcccacggaattaaattcaagccaaaccagtatacaaagatcgacacaattgctgctgatgagagttttacccagatggatttgggtgatcgcatcctcaaactcaacactgaaattcgtgaggtggggcctatagaaaggaaaggattttatctggcttttcaagacattggggcgtgcattgccctggtttcagtccgtgttttctacaagaaatgccccttcactgttcgtaacttggccatgtttcctgataccattccaagggttgattcctcctctttggttgaagtacggggttcttgtgtgaagagtgctgaagagcgtgacactcctaaactgtattgtggagctgatggagattggctggttcctcttggaaggtgcatctgcagtacaggatatgaagaaattgagggttcttgccatgcttgcagaccaggattctataaagcttttgctgggaacacaaaatgttctaaatgtcctccacacagtttaacatacatggaagcaacttctgtctgtcagtgtgaaaagggttatttccgagctgaaaaagacccaccttctatggcatgtaccaggccaccttcagctcctaggaatgtggtttttaacatcaatgaaacagcccttattttggaatggagcccaccaagtgacacaggagggagaaaagatctcacatacagtgtaatctgtaagaaatgtggcttagacaccagccagtgtgaggactgtggtggaggactccgcttcatcccaagacatacaggcctgatcaacaattccgtgatagtacttgactttgtgtctcacgtgaattacacctttgaaatagaagcaatgaatggagtttctgagttgagtttttctcccaagccattcacagctattacagtgaccacggatcaagatgcaccttccctgataggtgtggtaaggaaggactgggcatcccaaaatagcattgccctatcatggcaagcacctgctttttccaatggagccattctggactacgagatcaagtactatgagaaagaacatgagcagctgacctactcttccacaaggtccaaagcccccagtgtcatcatcacaggtcttaagccagccaccaaatatgtatttcacatccgagtgagaactgcgacaggatacagtggctacagtcagaaatttgaatttgaaacaggagatgaaacttctgacatggcagcagaacaaggacagattctcgtgatagccaccgccgctgttggcggattcactctcctcgtcatcctcactttattcttcttgatcactgggagatgtcagtggtacataaaagccaagatgaagtcagaagagaagagaagaaaccacttacagaatgggcatttgcgcttcccgggaattaaaacttacattgatccagatacatatgaagacccatccctagcagtccatgaatttgcaaaggagattgatccctcaagaattcgtattgagagagtcattggggcaggtgaatttggagaagtctgtagtgggcgtttgaagacaccagggaaaagagagatcccagttgccattaaaactttgaaaggtggccacatggatcggcaaagaagagattttctaagagaagctagtatcatgggccagtttgaccatccaaacatcattcgcctagaaggggttgtcaccaaaagatccttcccggccattggggtggaggcgttttgccccagcttcctgagggcagggtttttaaatagcatccaggccccgcatccagtgccagggggaggatctttgccccccaggattcctgctggcagaccagtaatgattgtggtggaatatatggagaatggatccctagactcctttttgcggaagcatgatggccacttcacagtcatccagttggtcggaatgctccgaggcattgcatcaggcatgaagtatctttctgatatgggttatgttcatcgagacctagcggctcggaatatactggtcaatagcaacttagtatgcaaagtttctgattttggtctctccagagtgctggaagatgatccagaagctgcttatacaacaactggtggaaaaatccccataaggtggacagccccagaagccatcgcctacagaaaattctcctcagcaagcgatgcatggagctatggcattgtcatgtgggaggtcatgtcctatggagagagaccttattgggaaatgtctaaccaagatgtcattctgtccattgaagaagggtacagacttccagctcccatgggctgtccagcatctctacaccagctgatgctccactgctggcagaaggagagaaatcacagaccaaaatttactgacattgtcagcttccttgacaaactgatccgaaatcccagtgcccttcacaccctggtggaggacatccttgtaatgccagagtcccctggtgaagttccggaatatcctttgtttgtcacagttggtgactggctagattctataaagatggggcaatacaagaataacttcgtggcagcagggtttacaacatttgacctgatttcaagaatgagcattgatgacattagaagaattggagtcatacttattggacaccagagacgaatagtcagcagcatacagactttacgtttacacatgatgcacatacaggagaagggatttcatgtatgaaagtaccacaagcacctgtgttttgtgcctcagcatttctaaaatgaacgatatcctctctactactctctcttctgattctccaaacatcacttcacaaactgcagtcttctgttcagactataggcacacaccttatgtttatgcttccaaccaggattttaaaatcatgctacataaatccgttctgaataacctgcaactaaaaccctggcccactgcagattattgctacgcaatggtaaataactcagcatggatgtgtaattttgtataagccgtatatgggaagtgttcacggacttaacctaaaaaaatttatccaggtggggcttccttagtgatgtatgtagagtgtgatggtagatgagaaagaactagttgacctttctttcatgttttgtgatcaagtagcttccaaactgacagaaatgtttcatttttagataattatattcagctctattggttgtattattactttattttttaatactttaactgttggtgcctgatattgttagaattatttgcagaaat

SEQ ID NO: 6622 - DNA, 1078 bp, Homo sapiens
  source 1..1078: mol_type = unassigned DNA
ggaagaggaggaggaggaagaagacgtggacaaggacccccatcctacccagaacacctgcctgcgctgccgccacttctctttaagggagaggaaaagagagcctaggagaaccatggggggctgcgaagtccgggaatttcttttgcaatttggtttcttcttgcctctgctgacagcgtggccaggcgactgcagtcacgtctccaacaaccaagttgtgttgcttgatacaacaactgtactgggagagctaggatggaaaacatatccattaaatgggtgggatgccatcactgaaatggatgaacataataggcccattcacacataccaggtatgtaatgtaatggaaccaaaccaaaacaactggcttcgtacaaactggatctcccgtgatgcagctcagaaaatttatgtggaaatgaaattcacactaagggattgtaacagcatcccatgggtcttggggacttgcaaagaaacatttaatctgttttatatggaatcagatgagtcccacggaattaaattcaagccaaaccagtatacaaagatcgacacaattgctgctgatgagagttttacccagatggatttgggtgatcgcatcctcaaactcaacactgaaattcgtgaggtggggcctatagaaaggaaaggattttatctggcttttcaagacattggggcgtgcattgccctggtttcagtccgtgttttctacaagaaatgccccttcactgttcgtaacttggccatgtttcctgataccattccaagggttgattcctcctctttggttgaagtacggggttcttgtgtgaagagtgctgaagagcgtgacactcctaaactgtattgtggagctgatggagattggctggttcctcttggaaggtgcatctgcagtacaggatatgaagaaattgagggttcttgccatggagcctccaaaggccgctgcttctagttggccatcttggccccaccccgaaacagtaacctttgaagaataaaagaaaaagcaaaagagtagcattactaaaatattaaacggttacatttacagccaaaa

SEQ ID NO: 6623 - DNA, 1413 bp, Homo sapiens
  source 1..1413: mol_type = unassigned DNA
agagtggaacttcccagcctcagaaaggcagaaaccaggaaagctaagacaaacaaaactacaatggaagaagaaaacgtcctcaactagacatctgccaaaaatgaacatgagcagctgacctactcttccacaaggtccaaagcccccagtgtcatcatcacaggtcttaagccagccaccaaatatgtatttcacatccgagtgagaactgcgacaggatacagtggctacagtcagaaatttgaatttgaaacaggagatgaaagactctccatttcaagtgacaaaactgtactggcttaatgaaaagtgggactttattgcctcagcttctgacatggcagcagaacaaggacagattctcgtgatagccaccgccgctgttggcggattcactctcctcgtcatcctcactttattcttcttgatcactgggagatgtcagtggtacataaaagccaagatgaagtcagaagagaagagaagaaaccacttacagaatgggcatttgcgcttcccgggaattaaaacttacattgatccagatacatatgaagacccatccctagcagtccatgaatttgcaaaggagattgatccctcaagaattcgtattgagagagtcattggggcaggtgaatttggagaagtctgtagtgggcgtttgaagacaccagggaaaagagagatcccagttgccattaaaactttgaaaggtggccacatggatcggcaaagaagagattttctaagagaagctagtatcatgggccagtttgaccatccaaacatcattcgcctagaaggggttgtcaccaaaaagccactggaaatgatgacatatatcctcagggcaaaaggggaagcaggctttctaaagaagtaaatcaaggcacactagccacatttccagtgctcaatagccacatatggctggtggctactgtattggacaacacaaacatagaatattttcatcattgctgaaaattggagtgaacagctttgatcttggtgatatggatgaagacccagagaggggttatgactcctctgtgctgtcgtatagctggctcagaagagaccaactttcctgagctgtgaaaaatgacagttccttaaggaagagatgccacaatagatgaaagacctttttacccatggatccttcccggccattggggtggaggcgttttgccccagcttcctgagggcagggtttttaaatagcatccaggccccgcatccagtgccagggggaggatctttgccccccaggattcctgctgtgcccttcctactatacaccccatgagagcagagatcttgtattgattgacgatatgtctccagaactcagaagagtacttgctacctagcagaccagtaatgattgtggtggaatatatg

SEQ ID NO: 6624 - DNA, 1690 bp, Homo sapiens
  source 1..1690: mol_type = unassigned DNA; mol_type = unassigned DNA
agagtggaacttcccagcctcagaaaggcagaaaccaggaaagctaagacaaacaaaactacaatggaagaagaaaacgtcctcaactagacatctgccaaaaatgaacatgagcagctgacctactcttccacaaggtccaaagcccccagtgtcatcatcacaggtcttaagccagccaccaaatatgtatttcacatccgagtgagaactgcgacaggatacagtggctacagtcagaaatttgaatttgaaacaggagatgaaacttctgacatggcagcagaacaaggacagattctcgtgatagccaccgccgctgttggcggattcactctcctcgtcatcctcactttattcttcttgatcactgggagatgtcagtggtacataaaagccaagatgaagtcagaagagaagagaagaaaccacttacagaatgggcatttgcgcttcccgggaattaaaacttacattgatccagatacatatgaagacccatccctagcagtccatgaatttgcaaaggagattgatccctcaagaattcgtattgagagagtcattggggcaggtgaatttggagaagtctgtagtgggcgtttgaagacaccagggaaaagagagatcccagttgccattaaaactttgaaaggtggccacatggatcggcaaagaagagattttctaagagaagctagtatcatgggccagtttgaccatccaaacatcattcgcctagaaggggttgtcaccaaaagcagaccagtaatgattgtggtggaatatatggagaatggatccctagactcctttttgcggaagcatgatggccacttcacagtcatccagttggtcggaatgctccgaggcattgcatcaggcatgaagtatctttctgatatgggttatgttcatcgagacctagcggctcggaatatactggtcaatagcaacttagtatgcaaagtttctgattttggtctctccagagtgctggaagatgatccagaagctgcttatacaacaactggtggaaaaatccccataaggtggacagccccagaagccatcgcctacagaaaattctcctcagcaagcgatgcatggagctatggcattgtcatgtgggaggtcatgtcctatggagagagaccttattgggaaatgtctaaccaagatgtcattctgtccattgaagaagggtacagacttccagctcccatgggctgtccagcatctctacaccagctgatgctccactgctggcagaaggagagaaatcacagaccaaaatttactgacattgtcagcttccttgacaaactgatccgaaatcccagtgcccttcacaccctggtggaggacatccttgtgtcaaatcatgaatcattttgatgttaattaaaatgaaacagcccacaatcaaaataacgttgcaatatgtagtacaggaaaaaagaatgcagcttaacagcctccaaataggaaatgcaatagaattgagtagtgttaaaaaggacagaagtcactgtatggataaccagacccaatattgactacagtgtaatcaatcacaagaatgccagagtcccctggtgaagttccggaatatcctttgtttgtcacagttggtgactggctagattctataaagatggggcaatacaagaataacttcgtggcagca

SEQ ID NO: 6625 - DNA, 1682 bp, Homo sapiens
  source 1..1682: mol_type = unassigned DNA; mol_type = unassigned DNA
cagaaaggcagaaaccaggaaagctaagacaaacaaaactacaatggaagaagaaaacgtcctcaactagacatctgccaaaaatgaacatgagcagctgacctactcttccacaaggtccaaagcccccagtgtcatcatcacaggtcttaagccagccaccaaatatgtatttcacatccgagtgagaactgcgacaggatacagtggctacagtcagaaatttgaatttgaaacaggagatgaaagactctccatttcaagtgacaaaactgtactggcttaatgaaaagtgggactttattgcctcagcttctgacatggcagcagaacaaggacagattctcgtgatagccaccgccgctgttggcggattcactctcctcgtcatcctcactttattcttcttgatcactgggagatgtcagtggtacataaaagccaagatgaagtcagaagagaagagaagaaaccacttacagaatgggcatttgcgcttcccgggaattaaaacttacattgatccagatacatatgaagacccatccctagcagtccatgaatttgcaaaggagattgatccctcaagaattcgtattgagagagtcattggggcaggtgaatttggagaagtctgtagtgggcgtttgaagacaccagggaaaagagagatcccagttgccattaaaactttgaaaggtggccacatggatcggcaaagaagagattttctaagagaagctagtatcatgggccagtttgaccatccaaacatcattcgcctagaaggggttgtcaccaaaagatccttcccggccattggggtggaggcgttttgccccagcttcctgagggcagggtttttaaatagcatccaggccccgcatccagtgccagggggaggatctttgccccccaggattcctgctggcagaccagtaatgattgtggtggaatatatggagaatggatccctagactcctttttgcggaagcatgatggccacttcacagtcatccagttggtcggaatgctccgaggcattgcatcaggcatgaagtatctttctgatatgggttatgttcatcgagacctagcggctcggaatatactggtcaatagcaacttagtatgcaaagtttctgattttggtctctccagagtgctggaagatgatccagaagctgcttatacaacaactagacccacaaatcacaacaaagagcaatcagaactggttaaagaagatggtctggaaagcttgtgtgagcagtgcgagtccagctctggttatggtactggactggtcctcatgtggaagagaaacagaagggccatgggagccagtggccagaccagaaagcaatgtgacaagagagataaccctccaacagacctcttccaaactctaacacttaacctctgctattctgcataaattctgagaaaagccaaattttctgtcggtctaagaagacatagcctacacccaactggagataattataaaaaataatgaagcagcatgaggggaaggtatttaatgtgtattttaaagttgggagagattctccttcacctaatttaggtgtttgtgaattggcttgactttttgaagttaatttttaagccttgaacatgtccaactttaagaactttaagaataaatattttaacacaa

SEQ ID NO: 6626 - DNA, 1189 bp, Homo sapiens
  source 1..1189: mol_type = unassigned DNA; mol_type = unassigned DNA
acaaacaaaactacaatggaagaagaaaacgtcctcaactagacatctgccaaaaatgaacatgagcagctgacctactcttccacaaggtccaaagcccccagtgtcatcatcacaggtcttaagccagccaccaaatatgtatttcacatccgagtgagaactgcgacaggatacagtggctacagtcagaaatttgaatttgaaacaggagatgaaacttctgacatggcagcagaacaaggacagattctcgtgatagccaccgccgctgttggcggattcactctcctcgtcatcctcactttattcttcttgatcactgggagatgtcagtggtacataaaagccaagatgaagtcagaagagaagagaagaaaccacttacagaatgggcatttgcgcttcccgggaattaaaacttacattgatccagatacatatgaagacccatccctagcagtccatgaatttgcaaaggagattgatccctcaagaattcgtattgagagagtcattggggcaggtgaatttggagaagtctgtagtgggcgtttgaagacaccagggaaaagagagatcccagttgccattaaaactttgaaaggtggccacatggatcggcaaagaagagattttctaagagaagctagtatcatgggccagtttgaccatccaaacatcattcgcctagaaggggttgtcaccaaaagatccttcccggccattggggtggaggcgttttgccccagcttcctgagggcagggtttttaaatagcatccaggccccgcatccagtgccagggggaggatctttgccccccaggattcctgctggcagaccagtaatgattgtggtggaatatatggagaatggatccctagactcctttttgcggctgtatcctaaagcagaatataatggcaaacagtgtagcagatattcaatctaaattgctgctaaaaatggatcaaatgactaccacaagcaaataagaagcatgatggccacttcacagtcatccagttggtcggaatgctccgaggcattgcatcaggcatgaagtatctttctgatatgggttatgttcatcgagacctagcggctcggaatatactggtcaatagcaacttagtatgcaaagtttctgattttggtctctccagagtgctggaagatgatccaga

SEQ ID NO: 6627 - DNA, 1582 bp, Homo sapiens
  source 1..1582: mol_type = unassigned DNA; mol_type = unassigned DNA
acaaacaaaactacaatggaagaagaaaacgtcctcaactagacatctgccaaaaatatcatccagaatgccctggcaagttcacttccatttagtgaagtgagataatttggcaattcacgcaagagactgagaaccaagcctcaagccctgcctctgattctgcaggtatggaacatgagcagctgacctactcttccacaaggtccaaagcccccagtgtcatcatcacaggtcttaagccagccaccaaatatgtatttcacatccgagtgagaactgcgacaggatacagtggctacagtcagaaatttgaatttgaaacaggagatgaaagactctccatttcaagtgacaaaactgtactggcttaatgaaaagtgggactttattgcctcagcttctgacatggcagcagaacaaggacagattctcgtgatagccaccgccgctgttggcggattcactctcctcgtcatcctcactttattcttcttgatcactgggagatgtcagtggtacataaaagccaagatgaagtcagaagagaagagaagaaaccacttacagaatgggcatttgcgcttcccgggaattaaaacttacattgatccagatacatatgaagacccatccctagcagtccatgaatttgcaaaggagattgatccctcaagaattcgtattgagagagtcattggggcaggtgaatttggagaagtctgtagtgggcgtttgaagacaccagggaaaagagagatcccagttgccattaaaactttgaaaggtggccacatggatcggcaaagaagagattttctaagagaagctagtatcatgggccagtttgaccatccaaacatcattcgcctagaaggggttgtcaccaaaagatccttcccggccattggggtggaggcgttttgccccagcttcctgagggcagggtttttaaatagcatccaggccccgcatccagtgccagggggaggatctttgccccccaggattcctgctggcagaccagtaatgattgtggtggaatatatggagaatggatccctagactcctttttgcggaagcatgatggccacttcacagtcatccagttggtcggaatgctccgaggcattgcatcaggcatgaagtatctttctgatatgggttatgttcatcgagacctagcggctcggaatatactggtcaatagcaacttagtatgcaaagtttctgattttggtctctccagagtgctggaagatgatccagaagctgcttatacaacaactgacctcttccaaactctaacacttaacctctgctattctgcataaattctgagaaaagccaaattttctgtcggtctaagaagacatagcctacacccaactggagataattataaaaaataatgaagcagcatgaggggaaggtatttaatgtgtattttaaagttgggagagattctccttcacctaatttaggtgtttgtgaattggcttgactttttgaagttaatttttaagccttgaacatgtccaactttaagaactttaagaataaatattttaacacaagtga

SEQ ID NO: 6628 - DNA, 681 bp, Homo sapiens
  source 1..681: mol_type = unassigned DNA; mol_type = unassigned DNA
ttcgtggcagcagggtttacaacatttgacctgatttcaagaatgagcattgatgacattagaagaattggagtcatacttattggacaccagagacgaatagtcagcagcatacagactttacgtttacacatgatgcacatacaggagaagggatttcatgtatgaaagtaccacaagcacctgtgttttgtgcctcagcatttctaaaatgaacgatatcctctctactactctctcttctgattctccaaacatcacttcacaaactgcagtcttctgttcagactataggcacacaccttatgtttatgcttccaaccaggattttaaaatcatgctacataaatccgttctgaataacctgcaactaaaaccctggcccactgcagattattgctacgcaatgcaacagctttaaaacctatctcagcccatgaatggaaaacaaatccaaatccgatccttgaaaagcaaaggctctaaagaagctcttcagaagagacggtaaagaatgaattcttttacttatcacccaaccacatttcttaaaaatgtgttttggtgtcttttcctaccaaatttctgctctacaaggcagtcagttaaatctctcatttcataattttcactgtgctagttctttcttttctcctcttttaataaattttctaaaacttt

SEQ ID NO: 6629 - DNA, 487 bp, Homo sapiens
  source 1..487: mol_type = unassigned DNA; mol_type = unassigned DNA
gtattgcctccagcacactgtttacattcctactgtgtctcagcatctgttctcctgggaatagaactggtccacctgaacatatgatctgtgctgctgttggtgcaggaggacaggagggaaataagctggaagccatggatgtggagagtctggcttcaagatggagcttgtttacctgcaggttgtcccccaggatgccctcacagcttgtgcgtgacaaagatgtcctccgtgtacacataaggtagcgctgagaagccacgagaaagcacctagtgattttaacataaacatttccacagcattttcaagttctgcgaaaaagcccggtgatagatcagcctcgcggtgtgcagcgccggcagctccgcacttcggacacctgggggcgcccgtgccattccgccggcgactgggactcgtcgcccgggaaacaaagatggggatttaaagaaaagccttcaaaatgcaactccgaatgtct

SEQ ID NO: 6630 - DNA, 581 bp, Homo sapiens
  source 1..581: mol_type = unassigned DNA; mol_type = unassigned DNA
acattcctactgtgtctcagcatctgttctcctgggaatagaactggtccacctgaacatatgatctgtgctgctgttggtgcaggaggacaggagggaaataagctggaagccatggatgtggagagtctggcttcaagatggagcttgtttacctgcagggccccatgcagaacctcatgagacgtgacttcagaggcctcctctctgaaggtgagggaggcgtcagctgttcagagagagaggctgccttgcctggggacacacagctagccagtggccggagcagcagtggatgcagttgtcctgatgcatagttcaagaagctttttttttttttttttttttcacgtgtgaaaacatctattgggaaaatggaaaaatcatttgacctcatattcctcatagctgacatgtctccttgttcccaccccactgaccactgaattgctgcttgaattgccaggaacttcctggtgtggcagaaggaagactaagaaccaggaagtggctgacaagaaagggagctgcattctgcaactggagttagtatttgctctgacctaacactttgggtgatt

SEQ ID NO: 6631 - DNA, 569 bp, Homo sapiens
  source 1..569: mol_type = unassigned DNA; mol_type = unassigned DNA
aacatatgatctgtgctgctgttggtgcaggaggacaggagggaaataagctggaagccatggatgtggagagtctggcttcaagatggagcttgtttacctgcagggccccatgcagaacctcatgagacgtgacttcagaggcctcctctctgaaggtgagggaggcgtcagctgttcagagagagaggctgccttgcctggggacacacagctagccagtggccggagcagcagtggatgcagttgtcctgatgcatagttcaagaagctttttttttttttttttttttcacgtgtgaaaacatctattgggaaaatggaaaaatcatttgacctcatattcctcatagctgacatgcctggctcctttctgtggagaagatcctgagaggaaccacaacttgacaaaaccaaaatgtggtggtgagccaacttcaattttgcagaaactgacttggaaagaactgattacctgaaggaccgtgaggatcaaagttgtcccactgaccaggctgtaaactttggaactgataagtgagagagataaggtaaacttctttaccttt

SEQ ID NO: 6632 - DNA, 564 bp, Homo sapiens
  source 1..564: mol_type = unassigned DNA; mol_type = unassigned DNA
ttttttcacgtgtgaaaacatctattgggaaaatggaaaaatcatttgacctcatattcctcatagctgacatgacaaaaccaaaatgtggtggtgagccaacttcaattttgcagaaactgacttggaaagaactgattacctgaaggaccgtgaggatcaaagttgtcccactgaccaggctgtaaactttggaactgataagtgagagagataagaaacgttaatggacaccagaacggctactgcagagctgggctggacggccaatcctgcgtccgggtgggaagaagtcagtggctacgatgaaaacctgaacaccatccgcacctaccaggtgtgcaatgtcttcgagcccaaccagaacaattggctgctcaccaccttcatcaaccggcggggggcccatcgcatctacacagagatgcgcttcactgtgagagactgcagcagcctccctaatgtcccaggatcctgcaaggagaccttcaacttgtattactatgagactgactctgtcattgccaccaagaagtcagccttctggtctgaggccccctacct

SEQ ID NO: 6633 - DNA, 1496 bp, Homo sapiens
  source 1..1496: mol_type = unassigned DNA; mol_type = unassigned DNA
tctggccggctccgtcctcccgtaggctccgctgtagctagcaatgtgacaccaggacgcactcgctctcgcgcgctctcccaggctcgttctccctcgccctctctctctcacacacgcacgcacacacccacctctcccataaacacacacacacacatgcacacccacacccacgcgcgcccgcaccgccccacgcgcacacactcctgcccacgcccacgcagcgctccgggaagtccggtccgggcgagagcgcgaaaggataccgagaagccacccgcggagagcgcagcggcgccctgggacgcggcgctctcccggcgctgctgcctcggcttggtctcggcctgcgggccgtcggccggcgatggccctggattatctactactgctcctcctggcatccgcagtggctgcgatggaagaaacgttaatggacaccagaacggctactgcagagctgggctggacggccaatcctgcgtccgggtgggaagaagtcagtggctacgatgaaaacctgaacaccatccgcacctaccaggtgtgcaatgtcttcgagcccaaccagaacaattggctgctcaccaccttcatcaaccggcggggggcccatcgcatctacacagagatgcgcttcactgtgagagactgcagcagcctccctaatgtcccaggatcctgcaaggagaccttcaacttgtattactatgagactgactctgtcattgccaccaagaagtcagccttctggtctgaggccccctacctcaaagtagacaccattgctgcagatgagagcttctcccaggtggactttgggggaaggctgatgaaggtaaacacagaagtcaggagctttgggcctcttactcggaatggtttttacctcgcttttcaggattatggagcctgtatgtctcttctttctgtccgtgtcttcttcaaaaagtgtcccagcattgtgcaaaattttgcagtgtttccagagactatgacaggggcagagagcacatctctggtgattgctcggggcacatgcatccccaacgcagaggaagtggacgtgcccatcaaactctactgcaacggggatggggaatggatggtgcctattgggcgatgcacctgcaagcctggctatgagcctgagaacagcgtggcatgcaaggtgtccaggcctttttggaggatccttagacagcaggattgacattggaggagcctggtatttctgccacactcacacagcctcctctgcatccaccccctctgaggaagcagcttgccctgcagggacattcaaggccagccaggaagctgaaggctgctcccactgcccctccaacagccgctcccctgcagaggcgtctcccatctgcacctgtcggaccggttattaccgagcggactttgaccctccagaagtggcatgcactagcgtcccatcaggtccccgcaatgttatctccatcgtcaatgagacgtccatc

SEQ ID NO: 6634 - DNA, 4672 bp, Homo sapiens
  source 1..4672: mol_type = unassigned DNA; mol_type = unassigned DNA
tctggccggctccgtcctcccgtaggctccgctgtagctagcaatgtgacaccaggacgcactcgctctcgcgcgctctcccaggctcgttctccctcgccctctctctctcacacacgcacgcacacacccacctctcccataaacacacacacacacatgcacacccacacccacgcgcgcccgcaccgccccacgcgcacacactcctgcccacgcccacgcagcgctccgggaagtccggtccgggcgagagcgcgaaaggataccgagaagccacccgcggagagcgcagcggcgccctgggacgcggcgctctcccggcgctgctgcctcggcttggtctcggcctgcgggccgtcggccggcgatggccctggattatctactactgctcctcctggcatccgcagtggctgcgatggaagaaacgttaatggacaccagaacggctactgcagagctgggctggacggccaatcctgcgtccgggtgggaagaagtcagtggctacgatgaaaacctgaacaccatccgcacctaccaggtgtgcaatgtcttcgagcccaaccagaacaattggctgctcaccaccttcatcaaccggcggggggcccatcgcatctacacagagatgcgcttcactgtgagagactgcagcagcctccctaatgtcccaggatcctgcaaggagaccttcaacttgtattactatgagactgactctgtcattgccaccaagaagtcagccttctggtctgaggccccctacctcaaagtagacaccattgctgcagatgagagcttctcccaggtggactttgggggaaggctgatgaaggtaaacacagaagtcaggagctttgggcctcttactcggaatggtttttacctcgcttttcaggattatggagcctgtatgtctcttctttctgtccgtgtcttcttcaaaaagtgtcccagcattgtgcaaaattttgcagtgtttccagagactatgacaggggcagagagcacatctctggtgattgctcggggcacatgcatccccaacgcagaggaagtggacgtgcccatcaaactctactgcaacggggatggggaatggatggtgcctattgggcgatgcacctgcaagcctggctatgagcctgagaacagcgtggcatgcaaggcttgccctgcagggacattcaaggccagccaggaagctgaaggctgctcccactgcccctccaacagccgctcccctgcagaggcgtctcccatctgcacctgtcggaccggttattaccgagcggactttgaccctccagaagtggcatgcactagcgtcccatcaggtccccgcaatgttatctccatcgtcaatgagacgtccatcattctggagtggcaccctccaagggagacaggtgggcgggatgatgtgacctacaacatcatctgcaaaaagtgccgggcagaccgccggagctgctcccgctgtgacgacaatgtggagtttgtgcccaggcagctgggcctgacggagtgccgcgtctccatcagcagcctgtgggcccacaccccctacacctttgacatccaggccatcaatggagtctccagcaagagtcccttccccccacagcacgtctctgtcaacatcaccacaaaccaagccgccccctccaccgttcccatcatgcaccaagtcagtgccactatgaggagcatcaccttgtcatggccacagccggagcagcccaatggcatcatcctggactatgagatccggtactatgagaaggaacacaatgagttcaactcctccatggccaggagtcagaccaacacagcaaggattgatgggctgcggcctggcatggtatatgtggtacaggtgcgtgcccgcactgttgctggctacggcaagttcagtggcaagatgtgcttccagactctgactgacgatgattacaagtcagagctgagggagcagctgcccctgattgctggctcggcagcggccggggtcgtgttcgttgtgtccttggtggccatctctatcgtctgtagcaggaaacgggcttatagcaaagaggctgtgtacagcgataagctccagcattacagcacaggccgaggctccccagggatgaagatctacattgaccccttcacttacgaggatcccaacgaagctgtccgggagtttgccaaggagattgatgtatcttttgtgaaaattgaagaggtcatcggagcaggggagtttggagaagtgtacaaggggcgtttgaaactgccaggcaagagggaaatctacgtggccatcaagaccctgaaggcagggtactcggagaagcagcgtcgggactttctgagtgaggcgagcatcatgggccagttcgaccatcctaacatcattcgcctggagggtgtggtcaccaagagtcggcctgtcatgatcatcacagagttcatggagaatggtgcattggattctttcctcaggcaaaatgacgggcagttcaccgtgatccagcttgtgggtatgctcaggggcatcgctgctggcatgaagtacctggctgagatgaattatgtgcatcgggacctggctgctaggaacattctggtcaacagtaacctggtgtgcaaggtgtccgactttggcctctcccgctacctccaggatgacacctcagatcccacctacaccagctccttgggagggaagatccctgtgagatggacagctccagaggccatcgcctaccgcaagttcacttcagccagcgacgtttggagctatgggatcgtcatgtgggaagtcatgtcatttggagagagaccctattgggatatgtccaaccaagatgtcatcaatgccatcgagcaggactaccggctgcccccacccatggactgtccagctgctctacaccagctcatgctggactgttggcagaaggaccggaacagccggccccggtttgcggagattgtcaacaccctagataagatgatccggaacccggcaagtctcaagactgtggcaaccatcaccgccgtgccttcccagcccctgctcgaccgctccatcccagacttcacggcctttaccaccgtggatgactggctcagcgccatcaaaatggtccagtacagggacagcttcctcactgctggcttcacctccctccagctggtcacccagatgacatcagaagacctcctgagaataggcatcaccttggcaggccatcagaagaagatcctgaacagcattcattctatgagggtccagataagtcagtcaccaacggcaatggcatgagaactcttgtttcttggggaaggagaggagggaaaaggaccagggtcaagggggaccagaggttgaccactgtggaatgtactggagagactggcttctcagctgaggaatgcatttccatcagtgaagaatcaaccggacctgttgctagcaggcaatctccatttctcagtgacagaagcatgtttgagatgccgtgggaaaccaaatatataataataaaaatataaaaaggtgatgttcaacagaagtgaagacaaaacaatatgcatcaggagaacaagagtaaacccagctcccattctcagtgggctgcagttgcccaaccacaggaagaaagggaaggaggtagagggaagaaacagaagcagtgttccattttcttcctcaccaatgacattcttttcttttctcctttcgtactcctccctgagagtcccctcccttctcccacactcgtttccctttgctcatgactcctgtagggaagtttcttcaaacaaaacccagctcctgagtctccagatgttgttctgtcagttgccaaaggactttgctgaccactgcatggggatccaaccaattcaattaatgtcttcatattgaagaagagatgtaccttcaattgaaaacctcgtttttcttttgtttgcattttctgcaaaaaggaaaaagaaaccacaaattggggaaaaaaaaagaagaaaaacctgtttccgtgtgcaaaagcacacatatgtatgtctgtgttataaaatgactgtgcttgttcgtaacagatgcaaacaagaaagaagaactgggaagtctttgtccctaggaaatccaaaggggctggaatatggtgttggtttggctttctggttggcccaatcggcctattggctcaatgggaagagaggagagggagaaaaataaaatgaaaggaaaaaaaaaagtttgcaaattcagacaggaaacaggtgagtggtttgaattggatgcagtgtgggccatcctggaatgatactgactgattaattattcctgataacatctcaagaaaaggagaaggaaagtgtttctggagaatgttctttcacatcactggaatctgcaattcaagaagtgacaagggagaattcttgctttacctatggactggcttaagccgtgtggcatccgaggaatgtttcaaatgtgtctgtgtttctctttacattccttgttgtacctcattgttcaattcacttttgtaaattccacctaacatttaattattttaaatttctccttttaccttaatctccttgctaattttatctgtctaattaaaaagagcagaagcatgtctgggtttacgtaaaa

SEQ ID NO: 6635 - DNA, 729 bp, Homo sapiens
  source 1..729: mol_type = unassigned DNA; mol_type = unassigned DNA
atggccctggattatctactactgctcctcctggcatccgcagtggctgcgatggaagaaacgttaatggacaccagaacggctactgcagagctgggctggacggccaatcctgcgtccgggtgggaagaagtcagtggctacgatgaaaacctgaacaccatccgcacctaccaggtgtgcaatgtcttcgagcccaaccagaacaattggctgctcaccaccttcatcaaccggcggggggcccatcgcatctacacagagatgcgcttcactgtgagagactgcagcagcctccctaatgtcccaggatcctgcaaggagaccttcaacttgtattactatgagactgactctgtcattgccaccaagaagtcagccttctggtctgaggccccctacctcaaagtagacaccattgctgcagatgagagcttctcccaggtggactttgggggaaggctgatgaagcttgccctgcagggacattcaaggccagccaggaagctgaaggctgctcccactgcccctccaacagccgctcccctgcagaggcgtctcccatctgcacctgtcggaccggttattaccgagcggactttgaccctccagaagtggcatgcactagcgtcccatcaggtccccgcaatgttatctccatcgtcaatgagacgtccatcattctggagtggcaccctccaagggagacaggtgggcgggatgatgtga

SEQ ID NO: 6636 - DNA, 389 bp, Homo sapiens
  source 1..389: mol_type = unassigned DNA; mol_type = unassigned DNA
cttttctccagctcgcagtccacgggctagtggactctgcttggcgtgcaagcactgcgcgcgggggccggagaagctctgccgtggtatcccgcaagtggccgccgaaggagaggggtggagttcattggccgtacccttggggaccagtctggtggtccgggcgcctgcgggactgcaggtttccagggtcagtcggggagaggtggaaacccttttcgcctcttgagccttggaacaggagtgggctgggaaacgttaatggacaccagaacggctactgcagagctgggctggacggccaatcctgcgtccgggtgggaagaagtcagtggctacgatgaaaacctgaacaccatccgcacctaccaggtgtgcaatgtcttcga

SEQ ID NO: 6637 - DNA, 511 bp, Homo sapiens
  source 1..511: mol_type = unassigned DNA; mol_type = unassigned DNA
agatgcctgcaacagcagaatgagaagaaagcagggaaatgctctgtatcggccaaataaaatcaatctggctctcagatgcattggaaacttcaaattaaagcaggacaaatagcctaaggaggcttcacaaggatggaggcagtaggatgagagattcctgaaaggaggcagggatgactacatcataaaaagaaacgttaatggacaccagaacggctactgcagagctgggctggacggccaatcctgcgtccgggtgggaagaagtcagtggctacgatgaaaacctgaacaccatccgcacctaccaggtgtgcaatgtcttcgagcccaaccagaacaattggctgctcaccaccttcatcaaccggcggggggcccatcgcatctacacagagatgcgcttcactgtgagagactgcagcagcctccctaatgtcccaggatcctgcaaggagaccttcaacttgtattactatgagactgactctgtcattgccaccaagaa

SEQ ID NO: 6638 - DNA, 554 bp, Homo sapiens
  source 1..554: mol_type = unassigned DNA; mol_type = unassigned DNA
gatttttgtaggtgcatccaactgcaacagaatacatcagcctcatcggaaggagaatggaaggcctgagaacgcacaaaaggagcatttggagaggaaacgttaatggacaccagaacggctactgcagagctgggctggacggccaatcctgcgtccgggtgggaagaagtcagtggctacgatgaaaacctgaacaccatccgcacctaccaggtgtgcaatgtcttcgagcccaaccagaacaattggctgctcaccaccttcatcaaccggcggggggcccatcgcatctacacagagatgcgcttcactgtgagagactgcagcagcctccctaatgtcccaggatcctgcaaggagaccttcaacttgtattactatgagactgactctgtcattgccaccaagaagtcagccttctggtctgaggccccctacctcaaagtagacaccattgctgcagatgagagcttctcccaggtggactttgggggaaggctgatgaaggtaaacacagaagtcaggagctttgggcctcttactcggaatgg

SEQ ID NO: 6639 - DNA, 2786 bp, Homo sapiens
  source 1..2786: mol_type = unassigned DNA; mol_type = unassigned DNA
actcccaccatccccctctaacagcacggagtcagtttccaggcagtgggcaaggagggctaagaacttgccccaggctacctgcctcccagctgaaaagggctttagttcttcccctgcctgtggagtctgcatgccagattcgcaccctcccctgagttctggccaggaggcttctgaacaagttcatattgttacaaagttcagctggagacttccttctccctgtggcattttcccagtgcctctggctgccctcctgagggatccctgtggtgccaggcaggaatttcctgcttggggaacccagtgggctcccagagcctttctcgcagcttcctctacccctgtatttcgctcggctctctaaattgactcagctccagcttgccctgcagggacattcaaggccagccaggaagctgaaggctgctcccactgcccctccaacagccgctcccctgcagaggcgtctcccatctgcacctgtcggaccggttattaccgagcggactttgaccctccagaagtggcatgcactagcgtcccatcaggtccccgcaatgttatctccatcgtcaatgagacgtccatcattctggagtggcaccctccaagggagacaggtgggcgggatgatgtgacctacaacatcatctgcaaaaagtgccgggcagaccgccggagctgctcccgctgtgacgacaatgtggagtttgtgcccaggcagctgggcctgacggagtgccgcgtctccatcagcagcctgtgggcccacaccccctacacctttgacatccaggccatcaatggagtctccagcaagagtcccttccccccacagcacgtctctgtcaacatcaccacaaaccaagccgccccctccaccgttcccatcatgcaccaagtcagtgccactatgaggagcatcaccttgtcatggccacagccggagcagcccaatggcatcatcctggactatgagatccggtactatgagaaggaacacaatgagttcaactcctccatggccaggagtcagaccaacacagcaaggattgatgggctgcggcctggcatggtatatgtggtacaggtgcgtgcccgcactgttgctggctacggcaagttcagtggcaagatgtgcttccagactctgactgacgatgattacaagtcagagctgagggagcagctgcccctgattgctggctcggcagcggccggggtcgtgttcgttgtgtccttggtggccatctctatcgtctgtagcaggaaacgggcttatagcaaagaggctgtgtacagcgataagctccagcattacagcacaggccgaggctccccagggatgaagatctacattgaccccttcacttacgaggatcccaacgaagctgtccgggagtttgccaaggagattgatgtatcttttgtgaaaattgaagaggtcatcggagcaggggagtttggagaagtgtacaaggggcgtttgaaactgccaggcaagagggaaatctacgtggccatcaagaccctgaaggcagggtactcggagaagcagcgtcgggactttctgagtgaggcgagcatcatgggccagttcgaccatcctaacatcattcgcctggagggtgtggtcaccaagagtcggcctgtcatgatcatcacagagttcatggagaatggtgcattggattctttcctcaggcaaaatgacgggcagttcaccgtgatccagcttgtgggtatgctcaggggcatcgctgctggcatgaagtacctggctgagatgaattatgtgcatcgggacctggctgctaggaacattctggtcaacagtaacctggtgtgcaaggtgtccgactttggcctctcccgctacctccaggatgacacctcagatcccacctacaccagctccttgggagggaagatccctgtgagatggacagctccagaggccatcgcctaccgcaagttcacttcagccagcgacgtttggagctatgggatcgtcatgtgggaagtcatgtcatttggagagagaccctattgggatatgtccaaccaagatgtcatcaatgccatcgagcaggactaccggctgcccccacccatggactgtccagctgctctacaccagctcatgctggactgttggcagaaggaccggaacagccggccccggtttgcggagattgtcaacaccctagataagatgatccggaacccggcaagtctcaagactgtggcaaccatcaccgccgtgccttcccagcccctgctcgaccgctccatcccagacttcacggcctttaccaccgtggatgactggctcagcgccatcaaaatggtccagtacagggacagcttcctcactgctggcttcacctccctccagctggtcacccagatgacatcagaagacctcctgagaataggcatcaccttggcaggccatcagaagaagatcctgaacagcattcattctatgagggtccagataagtcagtcaccaacggcaatggcatgagaactcttgtttcttggggaaggagaggagggaaaaggaccagggtcaagggggaccagaggttgaccactgtggaatgtactggagagactggcttctcagctgaggaatgcatttccatcagtgaagaatcaaccggacctgttgctagcaggcaatctccatttctcagtgacagaagcatgtttgagatgccgtgggaaaccaaatatataataataaaaatataaaaaggtgatgttcaacagaa

SEQ ID NO: 6640 - DNA, 509 bp, Homo sapiens
  source 1..509: mol_type = unassigned DNA; mol_type = unassigned DNA
agacaggtgggcgggatgatgtgacctacaacatcatctgcaaaaagtgccgggcagaccgccggagctgctcccgctgtgacgacaatgtggagtttgtgcccaggcagctgggcctgacggagtgccgcgtctccatcagcagcctgtgggcccacaccccctacacctttgacatccaggccatcaatggagtctccagcaagagtcccttccccccacagcacgtctctgtcaacatcaccacaaaccaagccgccccctccaccgttcccatcatgcaccaagtcagtgccactatgaggagcatcaccttgtcatggccacagccggagcagcccaatggcatcatcctggactatgagatccggtactatgagaaggtgagccagctctacctgcaagcttgcaagacccaaggccagccactgttccatggatggttgctagctgaaggcacaaaggagataggctgctgaggtggggaggattctggtgacagaggccag

SEQ ID NO: 6641 - DNA, 3789 bp, Homo sapiens
  source 1..3789: mol_type = unassigned DNA; mol_type = unassigned DNA
cgtccacccgcccagggagagtcagacctgggggggcgagggccccccaaactcagttcggatcctacccgagtgaggcggcgccatggagctccgggtgctgctctgctgggcttcgttggccgcagctttggaagagaccctgctgaacacaaaattggaaactgctgatctgaagtgggtgacattccctcaggtggacgggcagtgggaggaactgagcggcctggatgaggaacagcacagcgtgcgcacctacgaagtgtgtgacgtgcagcgtgccccgggccaggcccactggcttcgcacaggttgggtcccacggcggggcgccgtccacgtgtacgccacgctgcgcttcaccatgctcgagtgcctgtccctgcctcgggctgggcgctcctgcaaggagaccttcaccgtcttctactatgagagcgatgcggacacggccacggccctcacgccagcctggatggagaacccctacatcaaggtggacacggtggccgcggagcatctcacccggaagcgccctggggccgaggccaccgggaaggtgaatgtcaagacgctgcgtctgggaccgctcagcaaggctggcttctacctggccttccaggaccagggtgcctgcatggccctgctatccctgcacctcttctacaaaaagtgcgcccagctgactgtgaacctgactcgattcccggagactgtgcctcgggagctggttgtgcccgtggccggtagctgcgtggtggatgccgtccccgcccctggccccagccccagcctctactgccgtgaggatggccagtgggccgaacagccggtcacgggctgcagctgtgctccggggttcgaggcagctgaggggaacaccaagtgccgagcctgtgcccagggcaccttcaagcccctgtcaggagaagggtcctgccagccatgcccagccaatagccactctaacaccattggatcagccgtctgccagtgccgcgtcgggtacttccgggcacgcacagacccccggggtgcaccctgcaccacccctccttcggctccgcggagcgtggtttcccgcctgaacggctcctccctgcacctggaatggagtgcccccctggagtctggtggccgagaggacctcacctacgccctccgctgccgggagtgccgacccggaggctcctgtgcgccctgcgggggagacctgacttttgaccccggcccccgggacctggtggagccctgggtggtggttcgagggctacgtcctgacttcacctatacctttgaggtcactgcattgaacggggtatcctccttagccacggggcccgtcccatttgagcctgtcaatgtcaccactgaccgagaggtacctcctgcagtgtctgacatccgggtgacgcggtcctcacccagcagcttgagcctggcctgggctgttccccgggcacccagtggggctgtgctggactacgaggtcaaataccatgagaagggcgccgagggtcccagcagcgtgcggttcctgaagacgtcagaaaaccgggcagagctgcgggggctgaagcggggagccagctacctggtgcaggtacgggcgcgctctgaggccggctacgggcccttcggccaggaacatcacagccagacccaactggatgagagcgagggctggcgggagcagctggccctgattgcgggcacggcagtcgtgggtgtggtcctggtcctggtggtcattgtggtcgcagttctctgcctcaggaagcagagcaatgggagagaagcagaatattcggacaaacacggacagtatctcatcggacatggtactaaggtctacatcgaccccttcacttatgaagaccctaatgaggctgtgagggaatttgcaaaagagatcgatgtctcctacgtcaagattgaagaggtgattggtgcaggtgagtttggcgaggtgtgccgggggcggctcaaggccccagggaagaaggagagctgtgtggcaatcaagaccctgaagggtggctacacggagcggcagcggcgtgagtttctgagcgaggcctccatcatgggccagttcgagcaccccaatatcatccgcctggagggcgtggtcaccaacagcatgcccgtcatgattctcacagagttcatggagaacggcgccctggactccttcctgcggctaaacgacggacagttcacagtcatccagctcgtgggcatgctgcggggcatcgcctcgggcatgcggtaccttgccgagatgagctacgtccaccgagacctggctgctcgcaacatcctagtcaacagcaacctcgtctgcaaagtgtctgactttggcctttcccgattcctggaggagaactcttccgatcccacctacacgagctccctgggaggaaagattcccatccgatggactgccccggaggccattgccttccggaagttcacttccgccagtgatgcctggagttacgggattgtgatgtgggaggtgatgtcatttggggagaggccgtactgggacatgagcaatcaggacgtgatcaatgccattgaacaggactaccggctgcccccgcccccagactgtcccacctccctccaccagctcatgctggactgttggcagaaagaccggaatgcccggccccgcttcccccaggtggtcagcgccctggacaagatgatccggaaccccgccagcctcaaaatcgtggcccgggagaatggcggggacctgctccgaatcggagtcactctggcgggacaccagaagaaaatcttggccagtgtccagcacatgaagtcccaggccaagccgggaaccccgggtgggacaggaggaccggccccgcagtactgacctgcaggaactccccaccccagggacaccgcctccccattttccggggcagagtggggactcacagaggcccccagccctgtgccccgctggattgcactttgagcccgtggggtgaggagttggcaatttggagagacaggatttgggggttctgccataataggaggggaaaatcaccccccagccacctcggggaactccagaccaagggtgagggcgcctttccctcaggactgggtgtgaccagaggaaaaggaagtgcccaacatctcccagcctccccaggtgcccccctcaccttgatgggtgcgttcccgcagaccaaagagagtgtgactcccttgccagctccagagtgggggggctgtcccagggggcaagaaggggtgtcagggcccagtgacaaaatcattggggtttgtagtcccaacttgctgctgtcaccaccaaactcaatcatttttttcccttgtaaatgcccctcccccagctgctgccttcatattgaaggtttttgagttttgtttttggtcttaatttttctccccgttccctttttgtttcttcgttttgtttttctaccgtccttgtcataactttgtgttggagggaacctgtttcactatggcctcctttgcccaagttgaaacaggggcccatcatcatgtctgtttccagaacagtgccttggtcatcccacatccccggaccccgcctgggacccccaagctgtgtcctatgaaggggtgtggggtgaggtagtgaaaagggcggtagttggtggtggaacccagaaacggacgccggtgcttggaggggttcttaaattatatttaaaaaagtaactttttgtataaataaaagaaaatgggacgtgtcccagctccaggggt

SEQ ID NO: 6642 - DNA, 4329 bp, Homo sapiens
  source 1..4329: mol_type = unassigned DNA
cccggcccggcccgcccggctccgcgccgcagtctccctccctcccgctccgtccccgctcgggctcccaccatccccgcccgcgaggagagcactcggcccggcggcgcgagcagagccactccagggagggggggagaccgcgagcggccggctcagcccccgccacccggggcgggaccccgaggccccggagggaccccaactccagccacgtcttgctgcgcgcccgcccggcgcggccactgccagcacgctccgggcccgccgcccgcgcgcgcggcacagacgcggggccacacttggcgccgccgcccggtgccccgcacgctcgcatgggcccgcgctgagggccccgacgaggagtcccgcgcggagtatcggcgtccacccgcccagggagagtcagacctgggggggcgagggccccccaaactcagttcggatcctacccgagtgaggcggcgccatggagctccgggtgctgctctgctgggcttcgttggccgcagctttggaagagaccctgctgaacacaaaattggaaactgctgatctgaagtgggtgacattccctcaggtggacgggcagtgggaggaactgagcggcctggatgaggaacagcacagcgtgcgcacctacgaagtgtgtgacgtgcagcgtgccccgggccaggcccactggcttcgcacaggttgggtcccacggcggggcgccgtccacgtgtacgccacgctgcgcttcaccatgctcgagtgcctgtccctgcctcgggctgggcgctcctgcaaggagaccttcaccgtcttctactatgagagcgatgcggacacggccacggccctcacgccagcctggatggagaacccctacatcaaggtggacacggtggccgcggagcatctcacccggaagcgccctggggccgaggccaccgggaaggtgaatgtcaagacgctgcgtctgggaccgctcagcaaggctggcttctacctggccttccaggaccagggtgcctgcatggccctgctatccctgcacctcttctacaaaaagtgcgcccagctgactgtgaacctgactcgattcccggagactgtgcctcgggagctggttgtgcccgtggccggtagctgcgtggtggatgccgtccccgcccctggccccagccccagcctctactgccgtgaggatggccagtgggccgaacagccggtcacgggctgcagctgtgctccggggttcgaggcagctgaggggaacaccaagtgccgagcctgtgcccagggcaccttcaagcccctgtcaggagaagggtcctgccagccatgcccagccaatagccactctaacaccattggatcagccgtctgccagtgccgcgtcgggtacttccgggcacgcacagacccccggggtgcaccctgcaccacccctccttcggctccgcggagcgtggtttcccgcctgaacggctcctccctgcacctggaatggagtgcccccctggagtctggtggccgagaggacctcacctacgccctccgctgccgggagtgccgacccggaggctcctgtgcgccctgcgggggagacctgacttttgaccccggcccccgggacctggtggagccctgggtggtggttcgagggctacgtcctgacttcacctatacctttgaggtcactgcattgaacggggtatcctccttagccacggggcccgtcccatttgagcctgtcaatgtcaccactgaccgagaggtacctcctgcagtgtctgacatccgggtgacgcggtcctcacccagcagcttgagcctggcctgggctgttccccgggcacccagtggggctgtgctggactacgaggtcaaataccatgagaagggcgccgagggtcccagcagcgtgcggttcctgaagacgtcagaaaaccgggcagagctgcgggggctgaagcggggagccagctacctggtgcaggtacgggcgcgctctgaggccggctacgggcccttcggccaggaacatcacagccagacccaactggatgagagcgagggctggcgggagcagctggccctgattgcgggcacggcagtcgtgggtgtggtcctggtcctggtggtcattgtggtcgcagttctctgcctcaggaagcagagcaatgggagagaagcagaatattcggacaaacacggacagtatctcatcggacatggtactaaggtctacatcgaccccttcacttatgaagaccctaatgaggctgtgagggaatttgcaaaagagatcgatgtctcctacgtcaagattgaagaggtgattggtgcaggtgagtttggcgaggtgtgccgggggcggctcaaggccccagggaagaaggagagctgtgtggcaatcaagaccctgaagggtggctacacggagcggcagcggcgtgagtttctgagcgaggcctccatcatgggccagttcgagcaccccaatatcatccgcctggagggcgtggtcaccaacagcatgcccgtcatgattctcacagagttcatggagaacggcgccctggactccttcctgcggctaaacgacggacagttcacagtcatccagctcgtgggcatgctgcggggcatcgcctcgggcatgcggtaccttgccgagatgagctacgtccaccgagacctggctgctcgcaacatcctagtcaacagcaacctcgtctgcaaagtgtctgactttggcctttcccgattcctggaggagaactcttccgatcccacctacacgagctccctgggaggaaagattcccatccgatggactgccccggaggccattgccttccggaagttcacttccgccagtgatgcctggagttacgggattgtgatgtgggaggtgatgtcatttggggagaggccgtactgggacatgagcaatcaggacgtgatcaatgccattgaacaggactaccggctgcccccgcccccagactgtcccacctccctccaccagctcatgctggactgttggcagaaagaccggaatgcccggccccgcttcccccaggtggtcagcgccctggacaagatgatccggaaccccgccagcctcaaaatcgtggcccgggagaatggcggggcctcacaccctctcctggaccagcggcagcctcactactcagcttttggctctgtgggcgagtggcttcgggccatcaaaatgggaagatacgaagaaagtttcgcagccgctggctttggctccttcgagctggtcagccagatctctgctgaggacctgctccgaatcggagtcactctggcgggacaccagaagaaaatcttggccagtgtccagcacatgaagtcccaggccaagccgggaaccccgggtgggacaggaggaccggccccgcagtactgacctgcaggaactccccaccccagggacaccgcctccccattttccggggcagagtggggactcacagaggcccccagccctgtgccccgctggattgcactttgagcccgtggggtgaggagttggcaatttggagagacaggatttgggggttctgccataataggaggggaaaatcaccccccagccacctcggggaactccagaccaagggtgagggcgcctttccctcaggactgggtgtgaccagaggaaaaggaagtgcccaacatctcccagcctccccaggtgcccccctcaccttgatgggtgcgttcccgcagaccaaagagagtgtgactcccttgccagctccagagtgggggggctgtcccagggggcaagaaggggtgtcagggcccagtgacaaaatcattggggtttgtagtcccaacttgctgctgtcaccaccaaactcaatcatttttttcccttgtaaatgcccctcccccagctgctgccttcatattgaaggtttttgagttttgtttttggtcttaatttttctccccgttccctttttgtttcttcgttttgtttttctaccgtccttgtcataactttgtgttggagggaacctgtttcactatggcctcctttgcccaagttgaaacaggggcccatcatcatgtctgtttccagaacagtgccttggtcatcccacatccccggaccccgcctgggacccccaagctgtgtcctatgaaggggtgtggggtgaggtagtgaaaagggcggtagttggtggtggaacccagaaacggacgccggtgcttggaggggttcttaaattatatttaaaaaagtaactttttgtataaataaaagaaaatgggacgtgtcccagctccaggggt

SEQ ID NO: 6643 - DNA, 5058 bp, Homo sapiens
  source 1..5058: mol_type = unassigned DNA
atgcgaactgacagatcaaagcgtggctgcagctgagctgggacgcagaaagggagcctgcgcttgctctgggctgcggacagcccgaggcagagacagtgtgtaaattggagacaggaaaacactatcccggctggaacaatggagggtggagacggcagcctctatccacccccttcccagaacccgggcatcctgtccccagtgagcagggctgtctcttgccacccatggggaccttgcgcctctcacctcaggctggctggcttcccatctgacccctagctggaggacatcatttggtccccaggaagaggctgcctcacccaccctctttctcttctctcctgcagctcccatggggtgggagccaggtgttctggctcccctctccacccttcccagcgcccaatgccccccacattgccggcccccgaggggattcctgtaccctccctcctccactctccactgccaggggctgtgcagtttttcctaatccccccccttcctccagtgcctgtcccctcccccgatgatccgagccaagccaggtgtgttcacccctcccattcataccgccccccagaatctcctcccctctgccttcccataaccaaatccagatgtgaggcctcggcgggagcctgggaaccctagcatcccgacctccagtgcttcctgatcagggcactcgtggggagggaggtactgggatgggggccagggctatgccccaggcacggagcgctcccttcaaggagggaaggacggggtgtttggtctgaaagcagagaggggtcttggacagggaatgaaattgtggggtagagaggctgattctgggacttaggggaggaaacgtggaggctgagacaagaggttcccctcccacaccagcagcctctgctcgtgggggtcaggaccagggcgcagctctcattttaaccctttctgagctgccgccccttctccccgtacattttgatctccctccctcctccagggaggcctagatctggggtatcccaagggagccccatgcctaccagatgttgggggtggggttggcacttagcagaagaggccagaaatcaggcgggtgcagagggcagggcttgctcccctcttggccccccaactcctctagctcagagctaagaggatccacctgcctcggttcccagggatctggtcttcctgacctccctcccccaccccaggcactgactctgtctctctgtctgtctcagagaccctgctgaacacaaaattggaaactgctgatctgaagtgggtgacattccctcaggtggacgggcagtgggaggaactgagcggcctggatgaggaacagcacagcgtgcgcacctacgaagtgtgtgacgtgcagcgtgccccgggccaggcccactggcttcgcacaggttgggtcccacggcggggcgccgtccacgtgtacgccacgctgcgcttcaccatgctcgagtgcctgtccctgcctcgggctgggcgctcctgcaaggagaccttcaccgtcttctactatgagagcgatgcggacacggccacggccctcacgccagcctggatggagaacccctacatcaaggtggacacggtggccgcggagcatctcacccggaagcgccctggggccgaggccaccgggaaggtgaatgtcaagacgctgcgtctgggaccgctcagcaaggctggcttctacctggccttccaggaccagggtgcctgcatggccctgctatccctgcacctcttctacaaaaagtgcgcccagctgactgtgaacctgactcgattcccggagactgtgcctcgggagctggttgtgcccgtggccggtagctgcgtggtggatgccgtccccgcccctggccccagccccagcctctactgccgtgaggatggccagtgggccgaacagccggtcacgggctgcagctgtgctccggggttcgaggcagctgaggggaacaccaagtgccgagcctgtgcccagggcaccttcaagcccctgtcaggagaagggtcctgccagccatgcccagccaatagccactctaacaccattggatcagccgtctgccagtgccgcgtcgggtacttccgggcacgcacagacccccggggtgcaccctgcaccacccctccttcggctccgcggagcgtggtttcccgcctgaacggctcctccctgcacctggaatggagtgcccccctggagtctggtggccgagaggacctcacctacgccctccgctgccgggagtgccgacccggaggctcctgtgcgccctgcgggggagacctgacttttgaccccggcccccgggacctggtggagccctgggtggtggttcgagggctacgtcctgacttcacctatacctttgaggtcactgcattgaacggggtatcctccttagccacggggcccgtcccatttgagcctgtcaatgtcaccactgaccgagaggtacctcctgcagtgtctgacatccgggtgacgcggtcctcacccagcagcttgagcctggcctgggctgttccccgggcacccagtggggctgtgctggactacgaggtcaaataccatgagaagggcgccgagggtcccagcagcgtgcggttcctgaagacgtcagaaaaccgggcagagctgcgggggctgaagcggggagccagctacctggtgcaggtacgggcgcgctctgaggccggctacgggcccttcggccaggaacatcacagccagacccaactggatgagagcgagggctggcgggagcagctggccctgattgcgggcacggcagtcgtgggtgtggtcctggtcctggtggtcattgtggtcgcagttctctgcctcaggaagcagagcaatgggagagaagcagaatattcggacaaacacggacagtatctcatcggacatggtactaaggtctacatcgaccccttcacttatgaagaccctaatgaggctgtgagggaatttgcaaaagagatcgatgtctcctacgtcaagattgaagaggtgattggtgcaggtgagtttggcgaggtgtgccgggggcggctcaaggccccagggaagaaggagagctgtgtggcaatcaagaccctgaagggtggctacacggagcggcagcggcgtgagtttctgagcgaggcctccatcatgggccagttcgagcaccccaatatcatccgcctggagggcgtggtcaccaacagcatgcccgtcatgattctcacagagttcatggagaacggcgccctggactccttcctgcggctaaacgacggacagttcacagtcatccagctcgtgggcatgctgcggggcatcgcctcgggcatgcggtaccttgccgagatgagctacgtccaccgagacctggctgctcgcaacatcctagtcaacagcaacctcgtctgcaaagtgtctgactttggcctttcccgattcctggaggagaactcttccgatcccacctacacgagctccctgggaggaaagattcccatccgatggactgccccggaggccattgccttccggaagttcacttccgccagtgatgcctggagttacgggattgtgatgtgggaggtgatgtcatttggggagaggccgtactgggacatgagcaatcaggacgtgatcaatgccattgaacaggactaccggctgcccccgcccccagactgtcccacctccctccaccagctcatgctggactgttggcagaaagaccggaatgcccggccccgcttcccccaggtggtcagcgccctggacaagatgatccggaaccccgccagcctcaaaatcgtggcccgggagaatggcggggcctcacaccctctcctggaccagcggcagcctcactactcagcttttggctctgtgggcgagtggcttcgggccatcaaaatgggaagatacgaagaaagtttcgcagccgctggctttggctccttcgagctggtcagccagatctctgctgaggacctgctccgaatcggagtcactctggcgggacaccagaagaaaatcttggccagtgtccagcacatgaagtcccaggccaagccgggaaccccgggtgggacaggaggaccggccccgcagtactgacctgcaggaactccccaccccagggacaccgcctccccattttccggggcagagtggggactcacagaggcccccagccctgtgccccgctggattgcactttgagcccgtggggtgaggagttggcaatttggagagacaggatttgggggttctgccataataggaggggaaaatcaccccccagccacctcggggaactccagaccaagggtgagggcgcctttccctcaggactgggtgtgaccagaggaaaaggaagtgcccaacatctcccagcctccccaggtgcccccctcaccttgatgggtgcgttcccgcagaccaaagagagtgtgactcccttgccagctccagagtgggggggctgtcccagggggcaagaaggggtgtcagggcccagtgacaaaatcattggggtttgtagtcccaacttgctgctgtcaccaccaaactcaatcatttttttcccttgtaaatgcccctcccccagctgctgccttcatattgaaggtttttgagttttgtttttggtcttaatttttctccccgttccctttttgtttcttcgttttgtttttctaccgtccttgtcataactttgtgttggagggaacctgtttcactatggcctcctttgcccaagttgaaacaggggcccatcatcatgtctgtttccagaacagtgccttggtcatcccacatccccggaccccgcctgggacccccaagctgtgtcctatgaaggggtgtggggtgaggtagtgaaaagggcggtagttggtggtggaacccagaaacggacgccggtgcttggaggggttcttaaattatatttaaaaaagtaactttttgtataaataaaagaaaatgggacgtgtcccagctccagg

SEQ ID NO: 6644 - DNA, 812 bp, Homo sapiens
  source 1..812: mol_type = unassigned DNA
taaacgacggacagttcacagtcatccagctcgtgggcatgctgcggggcatcgcctcgggcatgcggtaccttgccgagatgagctacgtccaccgagacctggctgctcgcaacatcctagtcaacagcaacctcgtctgcaaagtgtctgactttggcctttcccgattcctggaggagaactcttccgatcccacctacacgagctccctgggaggaaagattcccatccgatggactgccccggaggccattgccttccggaagttcacttccgccagtgatgcctggagttacgggattgtgatgtgggaggtgatgtcatttggggagaggccgtactgggacatgagcaatcaggacgtaagtgtcccgtggtcctaccaagctttcctcgagtgttctctcacctgggatttggggtgaagggtgggttcccagagagtcatcactgctgggttcttgagaccatggagatgacaaaaaggagaattgatctttgtatcaaagagttgagatacagggccaggcctagtggctcaagcctgtaatcccagcactttgggaggccaaggtgggcagatcacctaaggttaggagttcaagaccagcctggccaacatggtgaaaccccgtctctaaaaaaatacaaaaaattagcccagcatgatgggcgggtgcctgtaatcccagctactcaggaggctgagacaggataatcgcttgaacccaggaacagaggttgcagtgagctgagatcacgccattgctttccagcctgggcaactgagcgagactctgtcttaataa

SEQ ID NO: 6645 - DNA, 965 bp, Homo sapiens
  source 1..965: mol_type = unassigned DNA
aaagccggggctggggcctcctacaggaccatcagtttctcctgatcagcagcctttccttccgcagagagcgagggctggcgggagcagctggccctgattgcgggcacggcagtcgtgggtgtggtcctggtcctggtggtcattgtggtcgcagttctctgcctcaggaagcagagcaatgggagagaagcagaatattcggacaaacacggacagtatctcatcggacatggtactaaggtctacatcgaccccttcacttatgaagaccctaatgaggctgtgagggaatttgcaaaagagatcgatgtctcctacgtcaagattgaagaggtgattggtgcaggtgagtttggcgaggtgtgccgggggcggctcaaggccccagggaagaaggagagctgtgtggcaatcaagaccctgaagggtggctacacggagcggcagcggcgtgagtttctgagcgaggcctccatcatgggccagttcgagcaccccaatatcatccgcctggagggcgtggtcaccaacagcatgcccgtcatgattctcacagagttcatggagaacggcgccctggactccttcctgcggctaaacgacggacagttcacagtcatccagctcgtgggcatgctgcggggcatcgcctcgggcatgcggtaccttgccgagatgagctacgtccaccgagacctggctgctcgcaacatcctagtcaacagcaacctcgtctgcaaagtgtctgactttggcctttcccgattcctggaggagaactcttccgatcccacctacacgagctccctgggaggaaagattcccatccgatggactgccccggaggccattgccttccggaagttcacttccgccagtgatgcctggagttacgggattgtgatgtgggaggtgatgtcatttggggagaggccgtactgggacatgagcaatcaggacgt

SEQ ID NO: 6646 - DNA, 709 bp, Homo sapiens
  source 1..709: mol_type = unassigned DNA
ccatctcaggaaaaaaaaaaaaaaaaaaaaaaaccacggagacaggggtttggggctaaaagctatgagccgagcctccgagtccagtgggagttaattcccagctgacggggccctgcctgatttctcaggtactaaggtctacatcgaccccttcacttatgaagaccctaatgaggctgtgagggaatttgcaaaagagatcgatgtctcctacgtcaagattgaagaggtgattggtgcaggtgagtttggcgaggtgtgccgggggcggctcaaggccccagggaagaaggagagctgtgtggcaatcaagaccctgaagggtggctacacggagcggcagcggcgtgagtttctgagcgaggcctccatcatgggccagttcgagcaccccaatatcatccgcctggagggcgtggtcaccaacagcatgcccgtcatgattctcacagagttcatggagaacggcgccctggactccttcctgcggctaaacgacggacagttcacagtcatccagctcgtgggcatgctgcggggcatcgcctcgggcatgcggtaccttgccgagatgagctacgtccaccgagacctggctgctcgcaacatcctagtcaacagcaacctcgtctgcaaagtgtctgactttggcctttcccgattcctggaggagaactcttccgatcccacctacacgagctccctg

SEQ ID NO: 6647 - DNA, 1551 bp, Homo sapiens
  source 1..1551: mol_type = unassigned DNA
atggagctccgggtgctgctctgctgggcttcgttggccgcagctttggaagagaccctgctgaacacaaaattggaaactgctgatctgaagtgggtgacattccctcaggtggacgggcagtgggaggaactgagcggcctggatgaggaacagcacagcgtgcgcacctacgaagtgtgtgacgtgcagcgtgccccgggccaggcccactggcttcgcacaggttgggtcccacggcggggcgccgtccacgtgtacgccacgctgcgcttcaccatgctcgagtgcctgtccctgcctcgggctgggcgctcctgcaaggagaccttcaccgtcttctactatgagagcgatgcggacacggccacggccctcacgccagcctggatggagaacccctacatcaaggtggacacggtggccgcggagcatctcacccggaagcgccctggggccgaggccaccgggaaggtgaatgtcaagacgctgcgtctgggaccgctcagcaaggctggcttctacctggccttccaggaccagggtgcctgcatggccctgctatccctgcacctcttctacaaaaagtgcgcccagctgactgtgaacctgactcgattcccggagactgtgcctcgggagctggttgtgcccgtggccggtagctgcgtggtggatgccgtccccgcccctggccccagccccagcctctactgccgtgaggatggccagtgggccgaacagccggtcacgggctgcagctgtgctccggggttcgaggcagctgaggggaacaccaagtgccgagcctgtgcccagggcaccttcaagcccctgtcaggagaagggtcctgccagccatgcccagccaatagccactctaacaccattggatcagccgtctgccagtgccgcgtcgggtacttccgggcacgcacagacccccggggtgcaccctgcaccacccctccttcggctccgcggagcgtggtttcccgcctgaacggctcctccctgcacctggaatggagtgcccccctggagtctggtggccgagaggacctcacctacgccctccgctgccgggagtgccgacccggaggctcctgtgcgccctgcgggggagacctgacttttgaccccggcccccgggacctggtggagccctgggtggtggttcgagggctacgtcctgacttcacctatacctttgaggtcactgcattgaacggggtatcctccttagccacggggcccgtcccatttgagcctgtcaatgtcaccactgaccgagaggtacctcctgcagtgtctgacatccgggtgacgcggtcctcacccagcagcttgagcctggcctgggctgttccccgggcacccagtggggctgtgctggactacgaggtcaaataccatgagaagggcgccgagggtcccagcagcgtgcggttcctgaagacgtcagaaaaccgggcagagctgcgggggctgaagcggggagccagctacctggtgcagagagcgagggctggcgggagcagctggccctga

SEQ ID NO: 6648 - DNA, 921 bp, Homo sapiens
  source 1..921: mol_type = unassigned DNA
atggagctccgggtgctgctctgctgggcttcgttggccgcagctttggaagagaccctgctgaacacaaaattggaaactgctgatctgaagtgggtgacattccctcaggtggacgggcagtgggaggaactgagcggcctggatgaggaacagcacagcgtgcgcacctacgaagtgtgtgacgtgcagcgtgccccgggccaggcccactggcttcgcacaggttgggtcccacggcggggcgccgtccacgtgtacgccacgctgcgcttcaccatgctcgagtgcctgtccctgcctcgggctgggcgctcctgcaaggagaccttcaccgtcttctactatgagagcgatgcggacacggccacggccctcacgccagcctggatggagaacccctacatcaaggtggacacggtggccgcggagcatctcacccggaagcgccctggggccgaggccaccgggaaggtgaatgtcaagacgctgcgtctgggaccgctcagcaaggctggcttctacctggccttccaggaccagggtgcctgcatggccctgctatccctgcacctcttctacaaaaagtgcgcccagctgactgtgaacctgactcgattcccggagactgtgcctcgggagctggttgtgcccgtggccggtagctgcgtggtggatgccgtccccgcccctggccccagccccagcctctactgccgtgaggatggccagtgggccgaacagccggtcacgggctgcagctgtgctccggggttcgaggcagctgaggggaacaccaagtgccgagggcgccgagggtcccagcagcgtgcggttcctgaagacgtcagaaaaccgggcagagctgcgggggctgaagcggggagccagctacctggtgcaggtacgggcgcgctctga

SEQ ID NO: 6649 - DNA, 769 bp, Homo sapiens
  source 1..769: mol_type = unassigned DNA
tttttttttttttttttggagatgggatctcgatatgttgcccaggctggtcttgaaccccttggctcaagcgatcctccagcctcagcctcccaaagtgctgggattcgaggcatgagccaccgagcccaccgtgcagatggatgtttttgtgcatgcttttgatgaatgctttctctctctcagcctgtgcccagggcaccttcaagcccctgtcaggagaagggtcctgccagccatgcccagccaatagccactctaacaccattggatcagccgtctgccagtgccgcgtcgggtacttccgggcacgcacagacccccggggtgcaccctgcaccacccctccttcggctccgcggagcgtggtttcccgcctgaacggctcctccctgcacctggaatggagtgcccccctggagtctggtggccgagaggacctcacctacgccctccgctgccgggagtgccgacccggaggctcctgtgcgccctgcgggggagacctgacttttgaccccggcccccgggacctggtggagccctgggtggtggttcgagggctacgtcctgacttcacctatacctttgaggtcactgcattgaacggggtatcctccttagccacggggcccgtcccatttgagcctgtcaatgtcaccactgaccgagaggtacctcctgcagtgtctgacatccgggtgacgcggtcctcacccagcagcttgagcctggcctgggctgttccccgggcacccagtggggctgt

SEQ ID NO: 6650 - DNA, 3737 bp, Homo sapiens
  source 1..3737: mol_type = unassigned DNA
ttccagcgcagctcagcccctgcccggcccggcccgcccggctccgcgccgcagtctccctccctcccgctccgtccccgctcgggctcccaccatccccgcccgcgaggagagcactcggcccggcggcgcgagcagagccactccagggagggggggagaccgcgagcggccggctcagcccccgccacccggggcgggaccccgaggccccggagggaccccaactccagccacgtcttgctgcgcgcccgcccggcgcggccactgccagcacgctccgggcccgccgcccgcgcgcgcggcacagacgcggggccacacttggcgccgccgcccggtgccccgcacgctcgcatgggcccgcgctgagggccccgacgaggagtcccgcgcggagtatcggcgtccacccgcccagggagagtcagacctgggggggcgagggccccccaaactcagttcggatcctacccgagtgaggcggcgccatggagctccgggtgctgctctgctgggcttcgttggccgcagctttggaagagaccctgctgaacacaaaattggaaactgctgatctgaagtgggtgacattccctcaggtggacgggcagtgggaggaactgagcggcctggatgaggaacagcacagcgtgcgcacctacgaagtgtgtgacgtgcagcgtgccccgggccaggcccactggcttcgcacaggttgggtcccacggcggggcgccgtccacgtgtacgccacgctgcgcttcaccatgctcgagtgcctgtccctgcctcgggctgggcgctcctgcaaggagaccttcaccgtcttctactatgagagcgatgcggacacggccacggccctcacgccagcctggatggagaacccctacatcaaggtggacacggtggccgcggagcatctcacccggaagcgccctggggccgaggccaccgggaaggtgaatgtcaagacgctgcgtctgggaccgctcagcaaggctggcttctacctggccttccaggaccagggtgcctgcatggccctgctatccctgcacctcttctacaaaaagtgcgcccagctgactgtgaacctgactcgattcccggagactgtgcctcgggagctggttgtgcccgtggccggtagctgcgtggtggatgccgtccccgcccctggccccagccccagcctctactgccgtgaggatggccagtgggccgaacagccggtcacgggctgcagctgtgctccggggttcgaggcagctgaggggaacaccaagtgccgagggcgccgagggtcccagcagcgtgcggttcctgaagacgtcagaaaaccgggcagagctgcgggggctgaagcggggagccagctacctggtgcaggtacgggcgcgctctgaggccggctacgggcccttcggccaggaacatcacagccagacccaactggatgagagcgagggctggcgggagcagctggccctgattgcgggcacggcagtcgtgggtgtggtcctggtcctggtggtcattgtggtcgcagttctctgcctcaggaagcagagcaatgggagagaagcagaatattcggacaaacacggacagtatctcatcggacatggtactaaggtctacatcgaccccttcacttatgaagaccctaatgaggctgtgagggaatttgcaaaagagatcgatgtctcctacgtcaagattgaagaggtgattggtgcaggtgagtttggcgaggtgtgccgggggcggctcaaggccccagggaagaaggagagctgtgtggcaatcaagaccctgaagggtggctacacggagcggcagcggcgtgagtttctgagcgaggcctccatcatgggccagttcgagcaccccaatatcatccgcctggagggcgtggtcaccaacagcatgcccgtcatgattctcacagagttcatggagaacggcgccctggactccttcctgcggctaaacgacggacagttcacagtcatccagctcgtgggcatgctgcggggcatcgcctcgggcatgcggtaccttgccgagatgagctacgtccaccgagacctggctgctcgcaacatcctagtcaacagcaacctcgtctgcaaagtgtctgactttggcctttcccgattcctggaggagaactcttccgatcccacctacacgagctccctgggaggaaagattcccatccgatggactgccccggaggccattgccttccggaagttcacttccgccagtgatgcctggagttacgggattgtgatgtgggaggtgatgtcatttggggagaggccgtactgggacatgagcaatcaggacgtgatcaatgccattgaacaggactaccggctgcccccgcccccagactgtcccacctccctccaccagctcatgctggactgttggcagaaagaccggaatgcccggccccgcttcccccaggtggtcagcgccctggacaagatgatccggaaccccgccagcctcaaaatcgtggcccgggagaatggcggggcctcacaccctctcctggaccagcggcagcctcactactcagcttttggctctgtgggcgagtggcttcgggccatcaaaatgggaagatacgaagaaagtttcgcagccgctggctttggctccttcgagctggtcagccagatctctgctgaggacctgctccgaatcggagtcactctggcgggacaccagaagaaaatcttggccagtgtccagcacatgaagtcccaggccaagccgggaaccccgggtgggacaggaggaccggccccgcagtactgacctgcaggaactccccaccccagggacaccgcctccccattttccggggcagagtggggactcacagaggcccccagccctgtgccccgctggattgcactttgagcccgtggggtgaggagttggcaatttggagagacaggatttgggggttctgccataataggaggggaaaatcaccccccagccacctcggggaactccagaccaagggtgagggcgcctttccctcaggactgggtgtgaccagaggaaaaggaagtgcccaacatctcccagcctccccaggtgcccccctcaccttgatgggtgcgttcccgcagaccaaagagagtgtgactcccttgccagctccagagtgggggggctgtcccagggggcaagaaggggtgtcagggcccagtgacaaaatcattggggtttgtagtcccaacttgctgctgtcaccaccaaactcaatcatttttttcccttgtaaatgcccctcccccagctgctgccttcatattgaaggtttttgagttttgtttttggtcttaatttttctccccgttccctttttgtttcttcgttttgtttttctaccgtccttgtcataactttgtgttggagggaacctgtttcactatggcctcctttgcccaagttgaaacaggggcccatcatcatgtctgtttccagaacagtgccttggtcatcccacatccccggaccccgcctgggacccccaagctgtgtcctatgaaggggtgtggggtgaggtagtgaaaagggcggtagttggtggtggaacccagaaacggacgccggtgcttggaggggttcttaaattatatttaaaaaagtaactttttgtataaataaaagaaaatgggacgtgtcccagctccaggggt

SEQ ID NO: 6651 - DNA, 16219 bp, Homo sapiens
  source 1..16219: mol_type = unassigned DNA
ctgttgcttcccgtctcctcggcggctcccctcccccgcccggctctccgcgccccttctgggcggcggggcggcggagccgtcggcgtgcggccctccttgcgttcgtgcgtgcgcccgtggcccggcgcacgtcccgcgacaccgaggccgagcggggcagggggctgaccgccatgaccccccagagcccggcgtgagggggccgagatgcggtgacctgccagcacctgccgcagccttcgtccgggagtcgccccatctctccacgcatcggggccctgtgccccttgctgctgcagccgggcaccatgtcgacctcgtccttgaggcgccagatgaagaacatcgtccacaactactcagaggcggagatcaaggttcgagaggccacgagcaatgacccctggggcccatccagctccctcatgtcagagattgccgacctcacctacaacgttgtcgccttctcggagatcatgagcatgatctggaagcggctcaatgaccatggcaagaactggcgtcacgtttacaaggccatgacgctgatggagtacctcatcaagaccggctcggagcgcgtgtcgcagcagtgcaaggagaacatgtacgccgtgcagacgctgaaggacttccagtacgtggaccgcgacggcaaggaccagggcgtgaacgtgcgtgagaaagctaagcagctggtggccctgctgcgcgacgaggaccggctgcgggaagagcgggcgcacgcgctcaagaccaaggaaaagctggcacagaccgccacggcctcatcagcagctgtgggctcaggcccccctcccgaggcggagcaggcgtggccgcagagcagcggggaggaggagctgcagctccagctggccctggccatgagcaaggaggaggccgaccagcccccgtcctgcggccccgaggacgacgcccagctccagctggcccttagtttgagccgagaagagcatgataaggaggagcggatccgtcgcggggatgacctgcggctgcagatggcaatcgaggagagcaagagggagactgggggcaaggaggagtcgtccctcatggaccttgctgacgtcttcacggccccagctcctgccccgaccacagacccctgggggggcccagcacccatggctgctgccgtccccacggctgcccccacctcggacccctggggcggcccccctgtccctccagctgctgatccctggggaggtccagcccccacgccggcctctggggacccctggaggcctgctgcccctgcaggaccctcagttgacccttggggtgggaccccagcccctgcagctggggaggggcccacgcctgatccatggggaagttccgatggtggggtcccggtcagtgggccctcagcctccgatccctggacaccggccccggccttctcagatccctggggagggtcacctgccaagcccagcaccaatggcacaacagcagccgggggattcgacacggagcccgacgagttctctgactttgaccgactccgcacggcactgccgacctccgggagcagcgcaggagagctggagctgctggcaggagaggtgccggcccgaagccctggggcgtttgacatgagtggggtcaggggatctctggctgaggctgtgggcagccccccacctgcagccacaccaactcccacgccccccacccggaagacgccggagtcattcctggggcccaatgcagccctcgtcgacctggactcgctggtgagccggccgggccccacgccgcctggagccaaggcctccaaccccttcctgccaggcggaggcccagccactggcccttccgtcaccaaccccttccagcccgcgcctcccgcgacgctcaccctgaaccagctccgtctcagtcctgtgcctcccgtccctggagcgccacccacgtacatctctccccttggcgggggccctggcctgccccccatgatgcccccgggccccccggcccccaacactaatcccttcctcctataatccagggcggaagggggcctggctccatccggctgccccattccggctccctgggagatcagtgttgtgagtgcatgtgaaatgggggatccccacccccagtgcccttccccttcctggggcccactcacactacaccctcttcctttcccaccccacctccccggagagaaactggacatggggcctggggaggggagctggccagaggaggacccctttcccgtggcattagaagggggaggggtggctggggcccccacccattccccctccctccaaactcccaacccccagtcagtgtttgagcctcctcgttcccctcacgcacccgctcacgcaccctcggtgaatccttggtgatgattttggcaactttgggaataaatggcaattcccacgggcttggcactcccagattcccatctgtgatttcgtgtgtcccccagagccccttcatccagggacccagggctcaggtcacatctctttctcgggggtggctggcaaccagcccctctgtctcagaagccctgatttccctgaccctcccaggtcaagggatggctgggttgagggtggactgtgcgaggcctggcggagctgtagcccacacaggtccaggtggtcgggaggccactcatggccagacgcttccggtgcaggaggccttgctcttgtgttgaggggacaccaggatgaggtcagagagtgcactggggttcagggaggagaagaatcctgagagatggcacatgtgcaacacaggtcaccgtcgccatcgcccgggcccaccgcaagcatcactaatccatccctgcactcctggaaagccgggtcagcctctgccggctgagctgagtggaccaccaggcgcctcctggttgtcctctgtgtgctgttttcctctgtgtgctcttgtcctgggctggaccacacctggtgagactatccgggagaatcctcgggccgccttgtgaggggggtgttgctgtcatctccagggctaggtgacagcttgttgcaggccccacagccagggcctcagggatggggatctggccatgtctgttttaagccgaacaggctgttcttccatgtggagtctccctccgtgatcccctggggtcaagtcctgacggctgggttcgctccctcagtgactccgacagctcttgtctcagaggtgctggggtgaaggctgtgtggggccaggcccctggggtcagacttcttgccccttctgcccgggggacgctctgggctcagggtggggccagacagctacatcacagggacacttgttatgggtcggggtccagggagcacccagccagtggagtgttggaggccactgagagggacatgactgcggtgtccgagcagcgtcgtggccaccctgtgtgcccactccctggtggacagacctacgtcacctggggattgcagagcaaaaggagtgctgttggggtgatgtgaggttggggttctgtttcttgctgtgaattgggtcatgacctgtgtcggagcgttctctggcctccacttgcccctgcagaccagggtgtctggagggttgtcgggggcttgatggaggaattgctgaccacaccatgcaggaagaggtgggtcccagggacacaggaactttggggtcagccggttccagattcagttgcagaggagcatcccccttgcttagccagggaggggaagccctcttctcacacccggcctgggtatgttgtgggagagtcatttcccaggaggaaatggggactgttaccgggggagggggtgctgtccccaggcagcagcaagcgtcccttacgcttgggctgtccgagaccctgctgctctaggcggttgtgatgggggagccccacagggcacagagagccagctgaaggcggcagctctgggtgggatcacatggaaaggggaggcgagccgagcctccctcttgccaatcttggtctccccacagggtcatagctcctgggcccctcacttgtcagaccctccattcaccaaattaaggataagtttcacgatttcgcactgcggagcctgcactccctttctcttcaaaaaagctgaggacgaagataaaatgatacagttggattagtccagtggaggggttaaaggtgtgaggctttaattctccccaccatttcctcatttggcaaaacagagaagacaggattgaaaaacaagacaaaaacccagaggcttgcacataaatttggggcttaactacagcatcttcggcatcttcttttccctacagtgcgaattacaaagtagcaccacagatctcgtgtctcctactttattcctctttctagaatattccagccaccaaagtgctcagcaggagctgctgtgtaggagtcccccatgaggcccaagcacctgagcttagtgacatacacggttgaacgctgggagaatgctgggagcctgctgttgtccccgattgagggctccccccactgtgtgtgtatcactctttctacagcagatgtgtctctctccccacagtgggatggcgagcttgttaaatggccgtgaggaagactttattcaggaccatcgagacaggtacaggtaccatcagtggatggaaaatcactaagagcaaacctcaggggtccgggggttttcggctaaacccacctagcaggattcttgctgaaggcaggccagggtgatcagaggtcacctggggatggtggaggctgaagaagcctatcagatgtgagggtggcgggggttgggggggatggcggcggggttcatttgctgaaaggattttacaagggcatgcacggatgggcctaggaggaggttcagatccctcaggtttggctaagcaagagtcatggtggtgctcccggctggctctcaggagcagatgtgcttctgacccgacgtcttcccccagagagggctgaagtggaaaaaaccccagaatttctccctgggacaggtgaagcgatggggcgtgggacattcctgggtctcgactctgttcagggcctaggggttgggtggggaaggcacttgagggaaccttcctggagcccgtaggagcttcatccgagctcctgggtcaccccgcccaccagagtccaggcccaccagagtcccctgccacctgtgctcaccctagccttacccctcgctctactcccgccctcgccctatcctcgctcctcgccctacgcttgcccctcgctctggagctgcgatgccagcctcagggctttcagtcctgccttgatctttttttatactgaaactcaattttacacacacaaacccactcccagccagcctctgccttttgccttttcctcatgttctcattgaataggaagaaatgcccttttttttcccccctagaaggagtcttgctctgttgccaggctggagtgcagtggcacgatctcggctcaccgcaacctccacctcccgggttcaagcgattctcctgcctcagcctctcgagtagctgggattacaggtgcccaccaccacgcccagctaatttttttttgtatttttagtacagacggggtttcaccatgttaggatggtctcgatctcctgacctcgtgatccgcctgcctcggcctcccaaagtgctgggattacaggcgtgagccactgtagcggcccccaccccatttcattttttatttttttattatactttaagttctagggtacctatgcacaacgcgcaggtttgttacatatatatacatgtgccatgttggtgtgctgcacgcattaactcgtcatttacattaggtatatctcctaatgccttccctcccgcctcccccaggcccttagtttgtgctgctctgcgttggttttctgcgtgtgctaaaaggggagggagagtttctgtgcccattcccaggcaccttcttgcagccgcaggcatctcccccacacgtgcttctagcttcccgggtgtggcgtgagccattgcgtccggccagaaatgttttatttcttgagaacttgtctgtctctgtgatgactgtgggttgtccagctcatccctcaagcgccatcctgccaggcccttcactgtggtgagaaaccggcctactcacatcacaggtgcccctggagtttctcaaactgcagcccaaggattggctgcttgcttttgtaaaaaaaaatgttttattagagtgcagccacggctgcttctgcactacagtggcaatggtgacattgagtgtggcagagaccgagtgtcccttgagcctaaaatatttactatctggctcttcaacaaaaagtgtgctgacccccggtgattgcttgtatgtggcaggggtctaaggcctgcctgcacgtcctgggacagcccacgcttccacagggttccagcatgctttccgccgagaaatcgctccctttgctgtttgttttgtattgaatgtttcttcatgcttttgttttactttcagggataattatataatgttatgtttcatccacattattttagtatggatatttataatttcctaaagcactattttttttttttgagacagagtcttgctctgtcgcccaggctggagtgcagtggctcgatctctgctcactgcaagctccgcctcctgtgttcacgccattctcctgcctcagcctcccaagtagctgggactacagatgcccaccaccatgcccagctaatttttttgtatttttttagtagagacggggtttcactgtgttagccaggatggtcacgatctcctgacctcgtgatctgcccacctcggccttccaaagtgttgggattacaggcttgagccactgtgcccggcccataaagcactatttaatgactgctccataaatacaaacttcctttccttattattattatttattttttttttgagatggagtcttgctctcgtcccccaggctggagtgcagtggcgcgatctcggctcactgcaacctccgcctcccgggttcaagcgattctcctgacttgggactacaggtgcgtgcgaccacagccaactcatttttctgtttttagcagagacagggtttcaccatattggccaggctggtcgaactcctgaccttgtgatccacccgcctcggcctcccaaagtgctgggattacaggcgtgagccacggcacccggcccataattacaaactttctgagggacatcttgaagcacacaaaactatagacaatattatcataaccacccctgcaaatgcctcactcgtgttcagccatcatttacatttgaaccactcctgtttcacctacagcctcctcatggcccctcccctggagcacttaaaaatggtaatgacatgctctctagtaatcgttgtgtgttactgtcaaaaggtataactcatgcattgatgggggtaacccctacagcagttaaccctgcgtgctcagaggggaatgaaaggtagctcagaggctcgggaggtgaggttgcaaaatggcttgtgttgtggggaatgttctcatccacccaaatcaagcatcactacatccatccgcaggggaggcaagcttagggcatcacgtccaggagtggccaggtcccgatgtcacggggagccgggctgggacaagctccagacggccagggtggtgtgggtttgcagtgggagggctggcgcgggggccctgagggctccctggttcccatcttatcaagatgctggactcggtgcttgaaacatgtcctgacagccacatgaaaagggttagaaatgatactgtttcgcctgggtgctgtggctcatgcttgtaatcctagcactttgggaggccgaggcgggcggatcacgaggtcaggagttcgagaccagcctggccaacatggcgaaaccccgtctctactaaaaatacaaaaattagcctagtgtggtggcgggcacctgtaatcccagctacttaggaggctgaggcaggagaatcgcttgaacccaggaggcggaggttgtagtgagccgagattgcactactgcactccagcctgggtgacagagtgagaccctgtctccaaaaaaaaaaaaaaaatgatactgtttcctgtatttttttctcttagtatcttaagaaatacatgatttgaacaaggaccttgtgtctcctctcccctttcccggactattctgaccccagcagttctcagaaggagctgacattaatgagaacttctccctgttagacccttaaaatactgagctttcgggaccctgcctggcttgttcctgtaaaacggtcttgtctgtggtaaatactaaggtttttggtctcacagccgaggaaatcaaggatgtggatgcacacagagtgagatttggagcaggagtttaataggcaaaaggaagaaacagctctgtcacagagacgggtcccgaacgggttgtgaagttgtagaagaaatgtcaggggttttatagatgggctagtgaggaggggtgtcttttcttcctagggcctgaagaaccagttaggaccaggtgtgctgtctgcatcgagcagagtctctagcagcccccaccccattcttttttttttttttttttttgagatggagtctcgctctgtcgcccaggctggagtgcagtggtgtcatcttggctcactgcaacctccgcctcccaggttcaagcaattctcgtgcctcagcctcccgcgtagtcgggattacaggtgcatgcagccatgcccggctaattttgtatttttagtagagacaaggtttcaccatgttggtcaggctggtctccaactcctgacctcaagtgatccgcctgcctcggcctcccaaagtagtgggattgcaggcgtgagccaccgcgccgggcccccaccccattctttgatcctgcaggcaggcccttcgtttgtgctgctctgcgctgctgcttatctgtgtgtgctaaaaggggagggagtgtttctgtgcccattcccaggcaccttcgtgcagctgcaggcatctcccccacgcgcttccagcttcccttagtgtgcctaaagaaagggaaaggaatgtgctttaggcccactgttttcactggggcccatctatgtatgtggcttggtgattacccaggaacctcccaagtctgtgcccgagttgcttatctgtgttttacagcctgaaagatcaggctgctctttgttaggagaagtgatttctttgaactgcgtggtgtggtgagaaagggagcaatttctaagctgctttttgttaggaagttttttgctggggactctcttcgccctatctacctaaatgatttctgtttcttacatcaattgggtattgatttcaggtagaatgggtgaatgcatttattcgttcatctaagccgcatttactcctttcttttctttcactgttgttttttttttgagacggagtcttgcactgtcacccaggctggagtgcagtggtgcgatctcggctcactgcaagctccacctcccgggttcatgccattctcctgcctcagcctcccgagtagctgggactacaggcgcccaccaccacgcccggctaagctaattttttgtattgttagtagagacggggtttcaccgtgttagccaggatggtctcaatctgaccttgtgattccgcccacctcggcctcccaaagtgctgggattacagccgtgagccaccgcacctggcctctttcagttttgatagcagattatttcctttggccctgcgtggtctctctctggctgggcagctctgggccagccataaatggaggggagggcgtgtgtgtggccacgtgtgtttctgtcctggacaacactgtccggaggggcctaagtgggaagtgccctcaaccaaggagatagctgctgtgtgtgtgtgtgttgtgtgtggttgggacagtcggggattctcacttttttttaaaatttgagatggagtttcactgtcgtcacccaggctagagtgcaatggtgtgatttcggctcactgcaacctctgcctcccgggtttaagcgattctcctgcttcagcctctcaagtagctgggattacaggtgcccgccaccacgcccagctaatttttgtatttttagtagagacggggtttcaccacgttggccaggctggtctggaactcctgacctcaggtgatccacctgcctcggccccccaaagtactgggattacaggcgtgagccactgggcgcagcctgggatcctcactttttcgcagattggtcactagcagggcgtctgatggaactttctgagatgccggaaatgttctctgtgctgtacaaaagggatgccactagccacatgccacgtagaacagttgaaatgtggccagcatgagatttttttaatcttgccaatttttgatggatttaagtttaagcacctgcgtgtgagcggctaccgcgtgggctgggattggaggaagctggaaagcgctcccctgcgtttcggctgctggcccagcagagggcgccggagagcggacggagccgcaggcggggttgtgggaagacgctgggatcccgtgcgcgcttgtgctccttccttctgggccagcgcgcagactatcaaccgaggtattcagtccctcggaaacccagttcctccgtttccaggcttctcgcccacacggagacagtcgctctcacacgtacctctcgcgggctcttactcgtggtcccggtctcctcctggtccccaccttccagcccagcgcgcacactagacggcacgtgctctccacgctctttctccagcgccccttgctcacccgccccccgttggagtggcccatcctctccgcttagacacctgcagtcactgtcactagctgaactgcgccctcctgaaagctctatgttgaaaccctaccccccaccctgcaccgaccccgtaccccagaatggggctgtatttggagacagggcctttacaaggtaagtaaggttaaaatgaggacattagggtgggtcctaatccaatctgactgttatatagtggggttgcaccttcatgtgaggacgccgggagaagacagccgtctgggagccaaggagagaggccttggcggaagccaaccctgcagcaccttcatcttgaatttctggtttccagaactgtgagaaaatccattgacgttctatagcgctcccagctggcggtactttgttatgacagccctaacatgaatgcagccatccacactgtctgggggaaggcacacacaccccacagcacccttgctgtctcaccccgtatcgcaaaagctcacgcatgtgtctctcccgagtccctggagggtcctgccacctacatctctctccttggcctgccgcctgtgatgctcctgggccccctgctccagcaccgctcccttccttctgtaatacagacaacagagacaggagatggcctggccccacttcatttctgttccctgggaaataagcatcgcaagtgatccgtagaatggtagacatcatccacttcccaagcatctctggctgaatgctgttctcatccacttcccaagcatctctggctgaatgctgttctacacatgcacgtgggaggcaccagggagcccagaagaaatgaaaagcctgggcagactcgcagttctgccacacagtgaatgtgctactcaagccactcagcctgggctgcagaggttggaagcctcactggcctgaggtttctgagtaagctctgacccaatcattgactattaaacttcagaggtccatggagacctcttaggagtctttgaaggaacttagcatagataccgatagctgctgactgcagggagatggggagatatgttttgtaaacctgtccaggcaacttttttgcctacggaaacacacaaaaacgaaaacaaaccaatgaaaaaaacctctcagaacgatacagaatccagagccactacaacacatttcatgaagtggcgtgagcctgtaattccagcagtttgggaggccggggcgaatggatgacttgaggtcaggagttcgagaccagcctggccaacatgacaaaatcaccatctctactaaaaatacaaaaattagtcatgcatagtggcatgcacctgtagtcccagctactcgggatgctgagatgggagaatcgtttgagcccgggaggtggaggttgcagtgagccgagatcgcaccattgcactccagcatggacaacagagcaagaccctttcttagaaaaaagaaaagtatccccgaacattatcagagtcaagttaataaaggccaaaggtagagaaaatcttgaaagtatcgagaaaatgacatgtcaatcataaggtcaggttcttcaacagtcatactgacattgtggctggaatatttgttgttgtgggatatatatatatatatatatttagagtgttgtgggatatatatatatatttagagacaaggtcttgctctatcactaaagctgcattgcagtgtgtgatcatagctcaccatgggattcttgattttcagtgagtataaagtgtaagacaaaataagtcttagttcaggtatgctggatgggaagccagaggtctgcatagcagttacaaagaaggccttattatctggaagaaaagggaccatagaatgtccattggttggggaacaacccagctttagtttttccagattctctgcatgtgcaggtttatgagactggagaactttgatttcttcttcctcctcctcctctcttttcttcttcctcttcctcctttttctcctcctttcttcctttatttttctttcttcctttcctcctctttcttctcctttttcctcctcttttcttcctttcttctctttttcttcttcttttttttttttttttaaaagaccgtgtttcgctctgtcacccaggctggaatgcagtggcgtactgttttagaaaagtgaaagagggccgggcgtggtggctcatgtctgaaatcctagcactttgggaggctgaggcgggtggatcacctgaggttgggagttcgagaccagcctggccgacatggcaaaaccctgtctctactaaaaatacaaaaattagccgggcatgatggcagatgcctgtaatctcagctcctcagtaggctaaggcgggagaatcgcttgaacccagaggcagaggctgcagtgagccaagattgcagcattgcaggaaagagagaaaaaggagggaaggggaaggaaaaggaaagaaagaaaagaggggaagggaagggagagatttaaaaaacaatagtaaagagagatttaaaaaacaatagtaaagagagattaaaaaaaaaaagtaaatgggccaggtgcgatggcttgtgcctgtaatcccagcagtttgagaggctgaagtgggaggatcacttgaagccaggagtaccagaccagcctgggaaacatagtgagaccccgtctatactaaaaaatatttaaatgggctgagcgcggtggctcaggcctgtaatcccagcactttgggaggccgaggcaggcggattacctcaggtcaggagtttgagaccagcctgaccaacatggcaaaaccccatctctactaaaaataccaaaacaaaaactagcagggcatggtggcgcatgcctgaaatcccagctactcaggtggctgagacaggagaatcacttgaacccaggagacggaggctgcagtgagccgagattgtgccactgcactccagcctgggcgagcaacagagtgaggctgtctctcaaaaaaaaaaaaaaaggaacggtagtgtgcacctgtggtcccagctacacaggaggctgaggcaggagcatcacttgaacccaggagttcaaggctgcagtgagctatgatggcaccactgccctccagactgagccaaaaagcagaccctgactctaaaacaaaagaaagaacaaataacaaatgaaaataaatacccaaaaaccagtcaaatgtgaaactggtgtcaggggtatgttctccatgttgagccccttctgtggaatatgacagtgtctctatttcgggtaaaggaaagaccaaaataactttccaagatgaaaagctaagagtgctgatctcatcacagacatagccagctcttcagttcagaccacctggaaaccctccccatgtcttttcagaacaatgtcctaagaaccataggggaagtggccataaaaaccatctttcctttgcagactggggtggggactctggccaatgccattctgttcttccataatatctttcccatcttgactgagcatcaaatgaggcccacacacaagattctcacccacatggccgtggcaaactccttggttcttctttccactggaatcccccacacaatggtgtcttttgtcctatggaaacccttgtccagtcttgagtgtaaactcgtgtttacaggtcttaaagtcctgacctggtgatccgcccgcgtggacctcccaaagtgctggaattacaggcgtgagccaccactcctggcctatgccagcattctttaaagttgtgggaaaaggccaaaagcaaatagaaaattgggcaaaaaagttcataattgcttaaacatatggaaaacctggaagtaaaattaagcaagtaagtgcgagcactctacattgaagattatagaaaattcagcctcccaaatatccaaagaatccaggagtgtgccaagagatccaagagtaggtccacaatttctcattctcaggagaatctgagattatatttcaatctaatgataactgattatataatccaatttctgcatcatcttgcttttatgttttgtaataaaaattttagaccaggccaataaggcatcagcaatttaccgtagggaactagggaatgtttaattatgacaatgaagtgtttaatattgtgttttgaaatataaacagtgtagatatatttgaataatactgaatttttagaaaaatctattggggtgtcatatataaaaggataagtagagatttggaaatgcttttttattggacaagaaaattgatcaaatcgaaatctggacaaactagaaagtctggatgctagcaatacaatctatagacacattctagcatcacttctgtgtcagaagtatccggattgtggtgcctacaaatgcatgctcctacacaccaagacatccattaagaaaataaagccatgctttccagagcgtttagcacttgtttaacgtacttgtgcttctaaatatcacaaggcaggatgggatttctaaagacaaggggatataggaccgaggcaaagacaatcagcatgtacactgaatcacactccataatcatattgctagaacacttagggagtacctctgaaatcacagccctgctgccatgatgtgcaattacaggatagaggtgccaggtgaaggtcccactgtggccaaggaaagcctttgtgagacgactacttcagggtgttccccatcagaggagcacacccctgatcttgtattcctcgtcaatccaaggtccatgtgaaatggtcagatggggaattttttcttccacagacatcaggatcttctgagtttcttcatcaaagccagatttgtgcagcctgggaaaatagaaataaagtttttttttttgtttttcatttttacacagtattgcctctctacattctgatgtctacctctcctctcctctttattctttcctagaaatcactgggagaattgtactgaatttgaaaaacaagcatgaatctttcctataggataggaagcctctgatttataccataaagtgaaatttcatatacaggatgtatcaattaagatttaattcaaaaaagatgaatttaagttaaaaagaaaaacacaggataacttccattcatctgatgttcatatgccctggcacatctattgcttcttataatgtgcttgcttaaaaaaaaaaaacatgagcttttctcagagacactaatataatgaattcatgtacccatcaccaacttctacaattaccaatattcagcctcttccatttacaacctgcccattttctaagaaataattaaagcacatgctacacccataaa

SEQ ID NO: 6652 - DNA, 2355 bp, Homo sapiens
  source 1..2355: mol_type = unassigned DNA
cggcggctcccctcccccgcccggctctccgcgccccttctgggcggcggggcggcggagccgtcggcgtgcggccctccttgcgttcgtgcgtgcgcccgtggcccggcgcacgtcccgcgacaccgaggccgagcggggcagggggctgaccgccatgaccccccagagcccggcgtgagggggccgagatgcggtgacctgccagcacctgccgcagccttcgtccgggagtcgccccatctctccacgcatcggggccctgtgccccttgctgctgcagccgggcaccatgtcgacctcgtccttgaggcgccagatgaagaacatcgtccacaactactcagaggcggagatcaaggttcgagaggccacgagcaatgacccctggggcccatccagctccctcatgtcagagattgccgacctcacctacaacgttgtcgccttctcggagatcatgagcatgatctggaagcggctcaatgaccatggcaagaactggcgtcacgtttacaaggccatgacgctgatggagtacctcatcaagaccggctcggagcgcgtgtcgcagcagtgcaaggagaacatgtacgccgtgcagacgctgaaggacttccagtacgtggaccgcgacggcaaggaccagggcgtgaacgtgcgtgagaaagctaagcagctggtggccctgctgcgcgacgaggaccggctgcgggaagagcgggcgcacgcgctcaagaccaaggaaaagctggcacagaccgccacggcctcatcagcagctgtgggctcaggcccccctcccgaggcggagcaggcgtggccgcagagcagcggggaggaggagctgcagctccagctggccctggccatgagcaaggaggaggccgaccaggaggagcggatccgtcgcggggatgacctgcggctgcagatggcaatcgaggagagcaagagggagactgggggcaaggaggagtcgtccctcatggaccttgctgacgtcttcacggccccagctcctgccccgaccacagacccctgggggggcccagcacccatggctgctgccgtccccacggctgcccccacctcggacccctggggcggcccccctgtccctccagctgctgatccctggggaggtccagcccccacgccggcctctggggacccctggaggcctgctgcccctgcaggaccctcagttgacccttggggtgggaccccagcccctgcagctggggaggggcccacgcctgatccatggggaagttccgatggtggggtcccggtcagtgggccctcagcctccgatccctggacaccggccccggccttctcagatccctggggagggtcacctgccaagcccagcaccaatggcacaacagccgggggattcgacacggagcccgacgagttctctgactttgaccgactccgcacggcactgccgacctccgggagcagcgcaggagagctggagctgctggcaggagaggtgccggcccgaagccctggggcgtttgacatgagtggggtcaggggatctctggctgaggctgtgggcagccccccacctgcagccacaccaactcccacgccccccacccggaagacgccggagtcattcctggggcccaatgcagccctcgtcgacctggactcgctggtgagccggccgggccccacgccgcctggagccaaggcctccaaccccttcctgccaggcggaggcccagccactggcccttccgtcaccaaccccttccagcccgcgcctcccgcgacgctcaccctgaaccagctccgtctcagtcctgtgcctcccgtccctggagcgccacccacgtacatctctccccttggcgggggccctggcctgccccccatgatgcccccgggccccccggcccccaacactaatcccttcctcctataatccagggcggaagggggcctggctccatccggctgccccattccggctccctgggagatcagtgttgtgagtgcatgtgaaatgggggatccccacccccagtgcccttccccttcctggggcccactcacactacaccctcttcctttcccaccccacctccccggagagaaactggacatggggcctggggaggggagctggccagaggaggacccctttcccgtggcattagaagggggaggggtggctggggcccccacccattccccctccctccaaactcccaacccccagtcagtgtttgagcctcctcgttcccctcacgcacccgctcacgcaccctcggtgaatccttggtgatgattttggcaactttgggaataaatggcaattcccacgggcttggc

SEQ ID NO: 6653 - DNA, 2621 bp, Homo sapiens
  source 1..2621: mol_type = unassigned DNA
aattctttcatttcagagttgagcaaactgtgtctcaaggaggtgtgcgctgcaggtagctgatgtggccaggatttgaacccacattttatattctttgccattagattccatttttcttatctcttatttctcagcgccaggtctctttttgtttctgggcctctttcttccttggcctcctgcctccctgtcttcccatgttcttgtatctgctgctgcctgtgtttttctcattgtgtctctgcctagctccctctgcccaggtttctatgtgtctctttctgtcagaactgtcttctatttcttctcagtccccttctctgcatttgttacatcatctcttcatcttaatgtattaggctggggctgttttgggactccagagagttactttttaactagctacatctgtcttcaggtgcctggctttctggcctgaggtggaagcagaggccagcctctctccgtcatccctatctcccctgggcttacatcatggcggggctttgaaaatctccctctgtggcttcttggagccgcatagatgggtgatcagagctggctctggaaccaggctgctccaggagtaaggagcccagtctttgcatgcagtgttgaaaaaggtaatgtccctcttgtgctgagcgagcacctggcacacagcagggacccaggcagtggggctgttaggttccttatctctcctgagccttgggcttccgctatccttgggacgtctggtcttctggcttccccggttcttcctgccgccctggatgcggtgacctgccagcacctgccgcagccttcgtccgggagtcgccccatctctccacgcatcggggccctgtgccccttgctgctgcagccgggcaccatgtcgacctcgtccttgaggcgccagatgaagaacatcgtccacaactactcagaggcggagatcaaggttcgagaggccacgagcaatgacccctggggcccatccagctccctcatgtcagagattgccgacctcacctacaacgttgtcgccttctcggagatcatgagcatgatctggaagcggctcaatgaccatggcaagaactggcgtcacgtttacaaggccatgacgctgatggagtacctcatcaagaccggctcggagcgcgtgtcgcagcagtgcaaggagaacatgtacgccgtgcagacgctgaaggacttccagtacgtggaccgcgacggcaaggaccagggcgtgaacgtgcgtgagaaagctaagcagctggtggccctgctgcgcgacgaggaccggctgcgggaagagcgggcgcacgcgctcaagaccaaggaaaagctggcacagaccgccacggcctcatcagcagctgtgggctcaggcccccctcccgaggcggagcaggcgtggccgcagagcagcggggaggaggagctgcagctccagctggccctggccatgagcaaggaggaggccgaccaggaggagcggatccgtcgcggggatgacctgcggctgcagatggcaatcgaggagagcaagagggagactgggggcaaggaggagtcgtccctcatggaccttgctgacgtcttcacggccccagctcctgccccgaccacagacccctgggggggcccagcacccatggctgctgccgtccccacggctgcccccacctcggacccctggggcggcccccctgtccctccagctgctgatccctggggaggtccagcccccacgccggcctctggggacccctggaggcctgctgcccctgcaggaccctcagttgacccttggggtgggaccccagcccctgcagctggggaggggcccacgcctgatccatggggaagttccgatggtggggtcccggtcagtgggccctcagcctccgatccctggacaccggccccggccttctcagatccctggggagggtcacctgccaagcccagcaccaatggcacaacagcagccgggggattcgacacggagcccgacgagttctctgactttgaccgactccgcacggcactgccgacctccgggagcagcgcaggagagctggagctgctggcaggagaggtgccggcccgaagccctggggcgtttgacatgagtggggtcaggggatctctggctgaggctgtgggcagccccccacctgcagccacaccaactcccacgccccccacccggaagacgccggagtcattcctggggcccaatgcagccctcgtcgacctggactcgctggtgagccggccgggccccacgccgcctggagccaaggcctccaaccccttcctgccaggcggaggcccagccactggcccttccgtcaccaaccccttccagcccgcgcctcccgcgacgctcaccctgaaccagctccgtctcagtcctgtgcctcccgtccctggagcgccacccacgtacatctctccccttggcgggggccctggcctgccccccatgatgcccccgggccccccggcccccaacactaatcccttcctcctataatccagggcggaagggggcctggctccatccggctgccccattccggctccctgggagatcagtgttgtgagtgcatgtgaaatgg

SEQ ID NO: 6654 - DNA, 593 bp, Homo sapiens
  source 1..593: mol_type = unassigned DNA
agggcaggggtccaggagggggtccctgggtccacgtctagccagcgcctcccttcctggctgaccacttctatcccgcagtccccttctggaagccatgacgctgatggagtacctcatcaagaccggctcggagcgcgtgtcgcagcagtgcaaggagaacatgtacgccgtgcagacgctgaaggacttccagtacgtggaccgcgacggcaaggaccagggcgtgaacgtgcgtgagaaagctaagcagctggtggccctgctgcgcgacgaggaccggctgcgggaagagcgggcgcacgcgctcaagaccaaggaaaagctggcacagaccgccacggcctcatcagcagctgtgggctcaggcccccctcccgaggcggagcaggcgtggccgcagagcagcggggaggaggagctgcagctccagctggccctggccatgagcaaggaggaggccgaccagcccccgtcctgcggccccgaggacgacgcccagctccagctggcccttagtttgagccgagaagagcatgataaggaggagcggatccgtcgcggggatgacctgcggctgcagatggcaatcg

SEQ ID NO: 6655 - DNA, 583 bp, Homo sapiens
  source 1..583: mol_type = unassigned DNA
aggttgccagcccctcatgctcttctgtcctcacccaggtggggtcccggtcagtgggccctcagcctccgatccctggacaccggccccggccttctcagatccctggggagggtcacctgccaagcccagcaccaatggcacaacagccgggggattcgacacggagcccgacgagttctctgactttgaccgactccgcacggcactgccgacctccgggagcagcgcaggtgagcccctgccctcccctgcccagtggcgagagggagcctcccctagctcttcgggagccccgtcccttgctgtctttgtcccactccaggcagggccggctggacttagggatgaaaagttcagttgggtagagtgggccagaaccatccacctgtctttaaaagaagtgtgcatctttattttagagaaattgcagacttagagaaaaactgagaattgttctcaaggtttcccacccgaatgttgacctctgacccgtctctgcctccacgttgcttgagtgccttgcaaactctccaggtgtctcaaagaacacggactgtcttgtcctgtgcagtgagctgcg

SEQ ID NO: 6656 - DNA, 250 bp, Homo sapiens
  source 1..250: mol_type = unassigned DNA
ccaagcccagcaccaatggcacaacagcagccgggggattcgacacggagcccgacgagttctctgactttgaccgactccgcacggcactgccgacctccgggagcagcgcagcttactggacacgacttcctcctggcttctactccctcaacagctatcgttcttgctttatacgttgaatctctgtctctttataacttctaaatgttctcagcatcaggaaaatataaaaaataagttcacaaat

SEQ ID NO: 6657 - DNA, 537 bp, Homo sapiens
  source 1..537: mol_type = unassigned DNA
aagccctgatttccctgaccctcccaggtcaagggatggctgggttgagggtggactgtgcgaggcctggcggagctgtagcccacacaggtccaggtggtcgggaggccactcatggccagacgcttccggtgcaggaggccttgctcttgtgttgaggggacaccaggatgaggtcagagagtgcactggggttcagggaggagaagaatcctgagagatggcacatgtgcaacacaggtcaccgtcgccatcgcccgggcccaccgcaagcatcactaatccatccctgcactcctggaaagccgggtcagcctctgccggctgagctgagtggaccaccaggcgcctcctggttgtcctctgtgtgctgttttcctctgtgtgctcttgtcctgggctggaccacacctgaatattccagccaccaaagtgctcagcaggagctgctgtgtaggagtcccccatgaggcccaagcacctgagcttagtgacatacacggttgaacgctgggagaatgctgggagcctgctgtt

SEQ ID NO: 6658 - DNA, 4736 bp, Homo sapiens
  source 1..4736: mol_type = unassigned DNA; mol_type = unassigned DNA
tggaaacaccatggctgcggcggcccagctctctctgacacagttatcaagtgggaatcctgtatatgaaaaatactatagacaggttgatacaggcaatactggaagggtgttggcttctgatgctgctgctttcctgaaaaaatcagggcttccagacttgatacttggaaagatttgggatttagccgacacagatggcaaaggtatcctgaacaaacaagaattctttgttgctttgcgtcttgtggcatgtgcccagaatggattggaagtttcactaagtagtttgaacctggctgttcctccaccaagatttcatgataccagtagtcctttgctaatcagtggaacctctgcagctgagctcccatgggctgtaaaacctgaagataaggccaaatatgatgcaatatttgatagtttaagcccagtgaatggatttctgtctggtgataaagtgaaaccagtgttgctcaactctaagttacctgtggatatccttggaagagtttgggagttgagtgatattgaccatgatggaatgcttgacagagatgagtttgcagttgccatgtttttggtatactgtgcactggagaaagaacctgtgccaatgtccttgcctccagccttggtgccaccatctaagagaaaaacgtgggttgtatcccctgcagaaaaagctaaatatgatgaaatcttcctgaaaactgataaagatatggacggatttgtgtctggattggaggtccgtgaaatattcttgaaaacaggtttaccttctaccttactagcccatatatggtcattatgcgacacaaaggactgtgggaagctttcaaaggatcagtttgccttggcttttcacttaatcagtcagaagttaatcaagggcattgatcctcctcacgttcttactcctgaaatgattccaccatcagacagggccagtttacaaaagaacatcataggatcaagtcctgttgcagatttctctgctattaaggaactagatactcttaacaatgaaatagttgacctacagagggaaaagaataatgtggaacaggaccttaaggagaaggaagatactattaaacagaggacaagtgaggttcaggatcttcaagatgaagttcaaagggagaatactaatctgcaaaaactacaggcccagaaacagcaggtacaggaactccttgatgaactggatgagcagaaagcccagctggaggagcaactcaaggaagtcagaaagaaatgtgctgaggaggcccaactggcaagaagtagtcctgaactactgccttctggtgtgactgatgaaaatgaggtgactacagctgttactgaaaaagtttgttctgaactcgacaataatagacattcaaaagaggaagatccatttaatgtagactcaagttcgctgacaggtccagttgcagatacaaacttggattttttccagtctgatccttttgttggcagtgatcctttcaaggatgatccttttggaaaaatcgatccatttggtggtgatcctttcaaaggttcagatccatttgcatcagactgtttcttcaggcaatctactgatccttttgccacttcaagcactgaccctttcagtgcagccaacaatagcagtattacatcggtagaaacgttgaagcacaatgatccttttgctcctggtggaacagttgttgcagcaagcgattcagccacagacccctttgcttctgtttttgggaatgaatcatttggaggtggatttgctgacttcagcacattgtcaaaggtcaacaatgaagatccttttcgttcagccacatcgagctctgtcagcaacgtagtgattacaaaaaatgtatttgaggaaacatcggtcaaaagtgaagatgaacccccagcactgccaccaaagatcggaactccaacaagaccctgccctctaccacctgggaaaagatccatcaacaaattggattctcctgatccctttaaactgaatgatccatttcagcctttcccaggcaacgatagccccaaagaaaaagatcctgaaatattttgtgatccattcacttctgctactaccactaccaataaagaggctgatccaagcaattttgccaacttcagtgcttatccctctgaagaagatatgatcgaatgggccaagagggaaagtgagagagaggaagagcagaggcttgcccgactaaatcagcaggaacaagaagacttagaactggctattgcactcagcaaatctgagatatcagaagcatgaagaattctcttgttctttggcaacaatatagtattcttcttcctgaatactgaaactatttacaatgtgtatcaaaactacctgtgagcatgggaatacaaaaggtttgagattcctgtaaatgtgacaaaattttaggattttttttttttcttcattacagattcgtctttttttttttttcttataaaagccgtaacccagtcagacaaattcaccttcacttaggcccctgttctggtatacatttactgtgagcttttgcctgcctgtgctattttacttgtaaagctagagcacccaagcttctgccttctggaatatagagaaatagtttcaccctgcactaccctgttctgtagttattctgatgatagccagtgaggttcttaaagtttgcagtattctcccctgattggaatggttgagtgagggtaagggaaagaatatcttatttcttttatgattggtgcaaattggctaaagtgcatttttaaatttcctctacttaatttgtttttcagagataaggaaaaatattttgcacagatttactccactatggaaaagggatgctgtaggttgaaccattatagcctcagattcgatcttttcctaactaaaaatattaaagcctcatgtgtgaaataaatttttaaaaagatttatctggatttagagaattttagatcaacagatacctctcagtgtgtttgctaattaataaaaatcagtttcttacaaataaagtttgtaagaaaatgttcattttaagtgatagatagtggagaaaatttatcacctaaaatatacccatcagtataaggcaagcaaaagtcttaacatggcagccattctgcctttgccgtggccctgtcctgtttagttcttagtgggttaatttttgtacttttgcagaagaaacttcagcaagctagaactggaaggtactttaatttttcatatatatttgtttttttttttttaatgaaggctcatttacttgaaatgtaaaaactttcactgaatacaaatagaaaaagtgatgtgttttatatcatattgctttttgtccatctttgtggtttagtttatttactcacttcatgtttttcacctataaaattgtcaagctagcaaaaaaactcttgtttttttaattgggagagaagagacctgccagattatcagacctcttcatgttaaaagaccatctcctgtaaaactgacctagtggacaagctgaatttgaaatagactgtgaagtaagctgtaacttgtcattttaattttgtttaacacggttactgacttagatgatgtattaaataccaagataaagaaaaatgcacctaaaatctaattagaattctctgggtcaacaagtcaaggtggtattgatctgtgttaatctgagtaacttattgcctagcctataaataaattccaaaatatccaattcatttcttcttgaaatggtgcttgttttgttttctttccattacacaattagactcctacagtttaaaacaaactttaaaccactatcttgcactgctaacttttttctacctttgtaaatagaaacatttctgcataaaagtcatacatatgaagcaagggctgaatcataatcacaaggcttaattttgataaacgaatccagtgacctaaggattttctgcaaaatttgactgggagttgtgataggtggtatttttgtttattttcttcctcttactccttaggataaaggtaagttgacttgaacaactttcttttgcactgggaaaataagcaaatgtttaaatgcttcaaaaaaattttcaattaaactcaaatattaaatatctataacttataaacaccaactttcaatgtaataaatgtatcctaatcttatgtatgtttaactggattacatagatttttatcttttgttaaaatgtgtataccccgtggaccaacataatattaaagtatgtatatattatataaatatatatgtatatgtgctcgcttgtgtaggatgaatgtcttagagtcgtttgtggtattttatgttgttgactctggctccagggcctgtgcttgaaaaggacagataagtattgcccagagctaagtggcactacttacaaagttttaaatgtcttctacatactgattcatgtttatttgagctctctttatagaattttctcttaaagtttcaaacctctaagttgtagcctgtaattatgagaacagtaaactttaagtaataataaagaatcccatccatatatccaatttgcaattgagttttgcatggttctctgattatgtccatgctgtgtccaaggaggagtaggtacatacaatcagcacagattaatatatgtaaagggtttgggacagcacctggtatagaataaataataaatgtaaactatta

SEQ ID NO: 6659 - DNA, 5225 bp, Homo sapiens
  source 1..5225: mol_type = unassigned DNA; mol_type = unassigned DNA
gccccggcctcgcctgcggccgctccctccgcctcctccccgccccgagccccagtcagcccgtcttccttcccctcccttgcatgatggaaacaccatggctgcggcggcccagctctctctgacacagttatcaagtgggaatcctgtatatgaaaaatactatagacaggttgatacaggcaatactggaagggtgttggcttctgatgctgctgctttcctgaaaaaatcagggcttccagacttgatacttggaaagatttgggatttagccgacacagatggcaaaggtatcctgaacaaacaagaattctttgttgctttgcgtcttgtggcatgtgcccagaatggattggaagtttcactaagtagtttgaacctggctgttcctccaccaagatttcatgataccagtagtcctttgctaatcagtggaacctctgcagctgagctcccatgggctgtaaaacctgaagataaggccaaatatgatgcaatatttgatagtttaagcccagtgaatggatttctgtctggtgataaagtgaaaccagtgttgctcaactctaagttacctgtggatatccttggaagagtttgggagttgagtgatattgaccatgatggaatgcttgacagagatgagtttgcagttgccatgtttttggtatactgtgcactggagaaagaacctgtgccaatgtccttgcctccagccttggtgccaccatctaagagaaaaacgtgggttgtatcccctgcagaaaaagctaaatatgatgaaatcttcctgaaaactgataaagatatggacggatttgtgtctggattggaggtccgtgaaatattcttgaaaacaggtttaccttctaccttactagcccatatatggtcattatgcgacacaaaggactgtgggaagctttcaaaggatcagtttgccttggcttttcacttaatcagtcagaagttaatcaagggcattgatcctcctcacgttcttactcctgaaatgattccaccatcagacagggccagtttacaaaagaacatcataggatcaagtcctgttgcagatttctctgctattaaggaactagatactcttaacaatgaaatagttgacctacagagggaaaagaataatgtggaacaggaccttaaggagaaggaagatactattaaacagaggacaagtgaggttcaggatcttcaagatgaagttcaaagggagaatactaatctgcaaaaactacaggcccagaaacagcaggtacaggaactccttgatgaactggatgagcagaaagcccagctggaggagcaactcaaggaagtcagaaagaaatgtgctgaggaggcccaactgatctcttctctgaaagctgaattaactagtcaggaatcgcagatctccacttacgaagaagaattggcaaaagctagagaagagctgagccgtctacagcaagaaacagcagaattggaggagagtgtagagtcagggaaggctcagttggaacctcttcagcagcacctacaagattcacaacaggaaattagttcaatgcaaatgaaactgatggaaatgaaagatttggaaaatcataatagtcagttaaattggtgcagtagcccacacagcattcttgtaaacggagctacagattattgcagcctcagcaccagcagcagtgaaacagccaaccttaatgaacatgttgaaggccagagcaacctagagtctgagcccatacaccaggaatctccagcaagaagtagtcctgaactactgccttctggtgtgactgatgaaaatgaggtgactacagctgttactgaaaaagtttgttctgaactcgacaataatagacattcaaaagaggaagatccatttaatgtagactcaagttcgctgacaggtccagttgcagatacaaacttggattttttccagtctgatccttttgttggcagtgatcctttcaaggatgatccttttggaaaaatcgatccatttggtggtgatcctttcaaaggttcagatccatttgcatcagactgtttcttcaggcaatctactgatccttttgccacttcaagcactgaccctttcagtgcagccaacaatagcagtattacatcggtagaaacgttgaagcacaatgatccttttgctcctggtggaacagttgttgcagcaagcgattcagccacagacccctttgcttctgtttttgggaatgaatcatttggaggtggatttgctgacttcagcacattgtcaaaggtcaacaatgaagatccttttcgttcagccacatcgagctctgtcagcaacgtagtgattacaaaaaatgtatttgaggaaacatcggtcaaaagtgaagatgaacccccagcactgccaccaaagatcggaactccaacaagaccctgccctctaccacctgggaaaagatccatcaacaaattggattctcctgatccctttaaactgaatgatccatttcagcctttcccaggcaacgatagccccaaagaaaaagatcctgaaatattttgtgatccattcacttctgctactaccactaccaataaagaggctgatccaagcaattttgccaacttcagtgcttatccctctgaagaagatatgatcgaatgggccaagagggaaagtgagagagaggaagagcagaggcttgcccgactaaatcagcaggaacaagaagacttagaactggctattgcactcagcaaatctgagatatcagaagcatgaagaattctcttgttctttggcaacaatatagtattcttcttcctgaatactgaaactatttacaatgtgtatcaaaactacctgtgagcatgggaatacaaaaggtttgagattcctgtaaatgtgacaaaattttaggattttttttttttcttcattacagattcgtctttttttttttttcttataaaagccgtaacccagtcagacaaattcaccttcacttaggcccctgttctggtatacatttactgtgagcttttgcctgcctgtgctattttacttgtaaagctagagcacccaagcttctgccttctggaatatagagaaatagtttcaccctgcactaccctgttctgtagttattctgatgatagccagtgaggttcttaaagtttgcagtattctcccctgattggaatggttgagtgagggtaagggaaagaatatcttatttcttttatgattggtgcaaattggctaaagtgcatttttaaatttcctctacttaatttgtttttcagagataaggaaaaatattttgcacagatttactccactatggaaaagggatgctgtaggttgaaccattatagcctcagattcgatcttttcctaactaaaaatattaaagcctcatgtgtgaaataaatttttaaaaagatttatctggatttagagaattttagatcaacagatacctctcagtgtgtttgctaattaataaaaatcagtttcttacaaataaagtttgtaagaaaatgttcattttaagtgatagatagtggagaaaatttatcacctaaaatatacccatcagtataaggcaagcaaaagtcttaacatggcagccattctgcctttgccgtggccctgtcctgtttagttcttagtgggttaatttttgtacttttgcagaagaaacttcagcaagctagaactggaaggtactttaatttttcatatatatttgtttttttttttttaatgaaggctcatttacttgaaatgtaaaaactttcactgaatacaaatagaaaaagtgatgtgttttatatcatattgctttttgtccatctttgtggtttagtttatttactcacttcatgtttttcacctataaaattgtcaagctagcaaaaaaactcttgtttttttaattgggagagaagagacctgccagattatcagacctcttcatgttaaaagaccatctcctgtaaaactgacctagtggacaagctgaatttgaaatagactgtgaagtaagctgtaacttgtcattttaattttgtttaacacggttactgacttagatgatgtattaaataccaagataaagaaaaatgcacctaaaatctaattagaattctctgggtcaacaagtcaaggtggtattgatctgtgttaatctgagtaacttattgcctagcctataaataaattccaaaatatccaattcatttcttcttgaaatggtgcttgttttgttttctttccattacacaattagactcctacagtttaaaacaaactttaaaccactatcttgcactgctaacttttttctacctttgtaaatagaaacatttctgcataaaagtcatacatatgaagcaagggctgaatcataatcacaaggcttaattttgataaacgaatccagtgacctaaggattttctgcaaaatttgactgggagttgtgataggtggtatttttgtttattttcttcctcttactccttaggataaaggtaagttgacttgaacaactttcttttgcactgggaaaataagcaaatgtttaaatgcttcaaaaaaattttcaattaaactcaaatattaaatatctataacttataaacaccaactttcaatgtaataaatgtatcctaatcttatgtatgtttaactggattacatagatttttatcttttgttaaaatgtgtataccccgtggaccaacataatattaaagtatgtatatattatataaatatatatgtatatgtgctcgcttgtgtaggatgaatgtcttagagtcgtttgtggtattttatgttgttgactctggctccagggcctgtgcttgaaaaggacagataagtattgcccagagctaagtggcactacttacaaagttttaaatgtcttctacatactgattcatgtttatttgagctctctttatagaattttctcttaaagtttcaaacctctaagttgtagcctgtaattatgagaacagtaaactttaagtaataataaagaatcccatccatatatccaatttgcaattgagttttgcatggttctctgattatgtccatgctgtgtccaaggaggagtaggtacatacaatcagcacagattaatatatgtaaagggtttgggacagcacctggtatagaataaataataaatgtaaactatta

SEQ ID NO: 6660 - DNA, 631 bp, Homo sapiens
  source 1..631: mol_type = unassigned DNA; mol_type = unassigned DNA
tctgaactcgacaataatagacattcaaaagaggaagatccatttaatgtagactcaagttcgctgacaggtccagttgcagatacaaacttggattttttccagtctgatccttttgttggcagtgatcctttcaaggatgatccttttggaaaaatcgatccatttggtggtgatcctttcaaaggttcagatccatttgcatcagactgtttcttcaggcaatctactgatccttttgccacttcaagcactgaccctttcagtgcagccaacaatagcagtattacatcgtaatcctatgaggtttacgtaggttaagttgaggccaggtgtggtggctcccacctctaattccagcacttcaggaggccaaggcaggaggatcacttgaggtagaaacgttgaagcacaatgatccttttgctcctggtggaacagttgttgcagcaagcgattcaggtaaataaataatttatcaacttcattgaacattaaacattttttttaagattcttttttctttgtctctaaatatatttgtcctgttatttatagctttaaaattattgcataattatatccaatagtaatttaccaataataagcatttgtatatcactttctactt

SEQ ID NO: 6661 - DNA, 445 bp, Homo sapiens
  source 1..445: mol_type = unassigned DNA; mol_type = unassigned DNA
agattttgttagtaaaatttttgctgtaatgtcttcccctccatccgtaacctcaacttgtgatcaaggtaagtatagttggctgtatatttcataaggtcaatgacattccttattttatctactgtgaagtgaagttattgaaataaactttgctttgcttttgtttgaaagttactctttaagtagtggtgtcaccacagtaaatattgttatttggatttctttgtgtttattttatcacaggtgatcctttcaaggatgatccttttggaaaaatcgatccatttggtggtgatcctttcaaaggttcagatccatttgcatcagactgtttcttcaggcaatctactgatccttttgccacttcaagcactgaccctttcagtgcagccaacaatagcagtattacatcggtagaaacgttgaagcacaatgatccttt

SEQ ID NO: 6662 - DNA, 987 bp, Homo sapiens
  source 1..987: mol_type = unassigned DNA; mol_type = unassigned DNA
tccttttttaatctatcctcttttcaccacattttagtgagaaagcaattttttttttacaaatggagcttatattgatttttatttcataaataattgaaagagggtagaaaaatctgcccttcatttaaaaattgaatgtttcactatgtatttaaaaagcgattcaggattaggaggatggataaccataccagctgtagctgatgttctaaaatattcttgcattgtttgctggtcttctagggaaaagaataatgtggaacaggaccttaaggagaaggaagatactattaaacagaggacaagtgaggttcaggatcttcaagatgaagttcaaagggagaatactaatctgcaaaaactacaggcccagaaacagcaggtacaggaactccttgatgaactggatgagcagaaagcccagctggaggagcaactcaaggaagtcagaaagaaatgtgctgaggaggcccaactgatctcttctctgaaagctgaattaactagtcaggaatcgcagatctccacttacgaagaagaattggcaaaagctagagaagagctgagccgtctacagcaagaaacagcagaattggaggagagtgtagagtcagggaaggctcagttggaacctcttcagcagcacctacaagattcacaacaggaaattagttcaatgcaaatgaaactgatggaaatgaaagatttggaaaatcataatagtcagttaaattggtgcagtagcccacacagcattcttgtaaacggagctacagattattgcagcctcagcaccagcagcagtgaaacagccaaccttaatgaacatgttgaaggccagagcaacctagagtctgagcccatacaccaggaatctccagcaagaagtagtcctgaactactgccttctggtgtgactgatgaaaatgaggtgactacagctgttactgaaaaagtttgttctgaactcgacaataatagaca

SEQ ID NO: 6663 - DNA, 1773 bp, Homo sapiens
  source 1..1773: mol_type = unassigned DNA; mol_type = unassigned DNA
atgatggaaacaccatggctgcggcggcccagctctctctgacacagttatcaagtgggaatcctgtatatgaaaaatactatagacaggttgatacaggcaatactggaagggtgttggcttctgatgctgctgctttcctgaaaaaatcagggcttccagacttgatacttggaaagatttgggatttagccgacacagatggcaaaggtatcctgaacaaacaagaattctttgttgctttgcgtcttgtggcatgtgcccagaatggattggaagtttcactaagtagtttgaacctggctgttcctccaccaagatttcatgataccagtagtcctttgctaatcagtggaacctctgcagctgagctcccatgggctgtaaaacctgaagataaggccaaatatgatgcaatatttgatagtttaagcccagtgaatggatttctgtctggtgataaagtgaaaccagtgttgctcaactctaagttacctgtggatatccttggaagagtttgggagttgagtgatattgaccatgatggaatgcttgacagagatgagtttgcagttacggagtctcactctgtcactcaggctggagtgcagtggcgggatctcagctcactgcagcctcggcctcctggattcaagttattcttccacctcagcctcctgaggagctgggattacaggcatgcaccaccacccccggctaatttttatatttttagtagagacagcgtttcgccgtgtttgccagactggtctcgagctcctgataataggtgatccactcgcctcggcctcccaaagtgccgggattacaggcatgagccacctcttcaggcccaagacaaaaatatagttagagtagatggggaatagtagtgtcatcatttgataaacagtagtgcatgctaaggtaaatgaataaacacaatttatcttatatgcctggagcctattcccaggtaactggccttttttttttttaataaaaagctttattaaaaataatttttgaataataaatacatttgtaggaaattactaccttgaattttgttttaaatagtagacacccctttatcttctcctagatttacttgttaaccattttgtcacatttgctttctccctgtatccatattcttcagaattttttcctagttttaaactctagcttgtgtgattttaatactgcttctcctgttccctctttttttgaattacctgatatttcttatgtttgttgtgtatgtctcttgaaaatggcagatttctgtattttaatgctttacctaattggatagtttttaagataatagcacttatattgatttgattttcccttctttaccgatttattttacatttttattttctctgtttcttactgttgcttattatcaacttgtgattcattcccttaccccgcctcccagttaatgtggaaattttgttataatgtcttgtttcattaatatagttaatacaggttgagcatccctaatctgaaaatccaaaacttgaaatgcttcaaaatctgaaacttttgagtactgacatgacccacaaagtggaaaattccactcctggtctcatgtgataagttacagtcaaaacttttgtttcatgcacaaaattattaaaaagattgtataaaattatcttagattatgtgtataaagtttatatgaaacataaatgaatttcatgtttagacttgggtcccatccccaagataggataatattccagaatctgg

SEQ ID NO: 6664 - DNA, 698 bp, Homo sapiens
  source 1..698: mol_type = unassigned DNA; mol_type = unassigned DNA
catgataccagtagtcctttgctaatcagtggaacctctgcagctgagctcccatgggctgtaaaacctgaagataaggccaaatatgatgcaatatttgatagtttaagcccagtgaatggatttctgtctggtgataaagtgaaaccagtgttgctcaactctaagttacctgtggatatccttggaagagtttgggagttgagtgatattgaccatgatggaatgcttgacagagatgagtttgcagttattttcctcattttccacaagagccagatgaaataggcagaatacatattaccacattttaaaaatgcagaaagagaaacttaaagtgacttgaattcttgttcacagacggagtctcactctgtcactcaggctggagtgcagtggcgggatctcagctcactgcagcctcggcctcctggattcaagttattcttccacctcagcctcctgaggagctgggattacaggcatgcaccaccacccccggctaatttttatatttttagtagagacagcgtttcgccgtgtttgccagactggtctcgagctcctgataataggtgatccactcgcctcggcctcccaaagtgccgggattacaggcatgagccacctcttcaggcccaagacaaaaatatagttagagtagatggggaatagtagtgtcatcatttgataaacag

SEQ ID NO: 6665 - DNA, 731 bp, Homo sapiens
  source 1..731: mol_type = unassigned DNA; mol_type = unassigned DNA
ctcccttgcatgatggaaacaccatggctgcggcggcccagctctctctgacacagttatcaagtgggaatcctgtatatgaaaaatactatagacaggttgatacaggcaatactggaagggtgttggcttctgatgctgctgctttcctgaaaaaatcagggcttccagacttgatacttggaaagatttgggatttagccgacacagatggcaaaggtatcctgaacaaacaagaattctttgttgctttgcgtcttgtggcatgtgcccagaatggattggaagtttcactaagtagtttgaacctggctgttcctccaccaagatttcatgataccagtagtcctttgctaatcagtggaacctctgcagctgagctcccatgggctgtaaaacctgaagataaggccaaatatgatgcaatatttgatagtttaagcccagtgaatggatttctgtctggtgataaagtgaaaccagtgttgctcaactctaagttacctgtggatatccttggaagagtttgggagttgagtgatattgaccatgatggaatgcttgacagagatgagtttgcagttgtaagtaatctaatgttcttaacatcttcattatcttaatgattttctcatgtgcaaatttcctcttttagttcatccttagaggaaaactatattctcatcagattattgggtgaactttttttttttttctttttgagacagagt

SEQ ID NO: 6666 - DNA, 374 bp, Homo sapiens
  source 1..374: mol_type = unassigned DNA; mol_type = unassigned DNA
ctgcggcggcccagctctctctgacacagttatcaagtgggaatcctgtatatgaaaaatactatagacaggttgatacaggcaatactggaagggtgttggcttctgatgctgctgctttcctgaaaaaatcagggcttccagacttgatacttggaaagatttgggatttagccgacacagatggcaaaggtatcctgaacaaacaacatgataccagtagtcctttgctaatcagtggaacctctgcagctgagctcccatgggcttgaatggatttctgtctggtgataaagtgaaaccagtgttgctcaactctaagttacctgtggatatccttggaagagtttgggagttgagtgatattgaccatg

SEQ ID NO: 6667 - DNA, 561 bp, Homo sapiens
  source 1..561: mol_type = unassigned DNA; mol_type = unassigned DNA
attcattacccttccctggatctgggggctttcggaatctcgacctccccttggcctatctcctgcagaaaaattaggcagccaccaattcgccagcggttcaggtggctcttgcctcgatgtcctagcctaggggcccccgggccggacttggctgggctcccttcaccctctgcggagtcatgagggcgaacgacgctctgcaggtgctgggcttgcttttcagcctggcccggggctccgaggtgggcaactctcaggcagtgtgtcctgggactctgaatggcctgagtgtgaccggcgatgctgagaaccaataccagacactgtacaagctctacgagaggtgtgaggtggtgatggggaaccttgagattgtgctcacgggacacaatgccgacctctccttcctgcagtggattcgagaagtgacaggctatgtcctcgtggccatgaatgaattctctactctaccattgcccaacctccgcgtggtgcgagggacccaggtctacgatgggaagtttgccatcttcgtcatgttgaactataacaccaact

SEQ ID NO: 6668 - DNA, 560 bp, Homo sapiens
  source 1..560: mol_type = unassigned DNA; mol_type = unassigned DNA
attcattacccttccctggatctgggggctttcggaatctcgacctccccttggcctatctcctgcagaaaaattaggcctggcccggggctccgaggtgggcaactctcaggcagtgtgtcctgggactctgaatggcctgagtgtgaccggcgatgctgagaaccaataccagacactgtacaagctctacgagaggtgtgaggtggtgatggggaaccttgagattgtgctcacgggacacaatgccgacctctccttcctgcagtggattcgagaagtgacaggctatgtcctcgtggccatgaatgaattctctactctaccattgcccaacctccgcgtggtgcgagggacccaggtctacgatgggaagtttgccatcttcgtcatgttgaactataacaccaactccagccacgctctgcgccagctccgcttgactcagctcaccgagattctgtcagggggtgtttatattgagaagaacgataagctttgtcacatggacacaattgactggagggacatcgtgagggaccgagatgctgagatagtgg

SEQ ID NO: 6669 - DNA, 5919 bp, Homo sapiens
  source 1..5919: mol_type = unassigned DNA; mol_type = unassigned DNA
attacccttccctggatctgggggctttcggaatctcgacctccccttggcctatctcctgcagaaaaattagggtgagccccatcctcgatctgctccgccaagttgcgggaccgcggggcgtggcacgctcggggcaggcggtccgaggctccgcaatccctactccagcctcgcgcgggagggggcgcggccgtgactcacccccttccctctgcgttcctccctccctctctctctctctctcacacacacacacccctcccctgccatccctccccggactccggctccggctccgattgcaatttgcaacctccgctgccgtcgccgcagcagccaccaattcgccagcggttcaggtggctcttgcctcgatgtcctagcctaggggcccccgggccggacttggctgggctcccttcaccctctgcggagtcatgagggcgaacgacgctctgcaggtgctgggcttgcttttcagcctggcccggggctccgaggtgggcaactctcaggcagtgtgtcctgggactctgaatggcctgagtgtgaccggcgatgctgagaaccaataccagacactgtacaagctctacgagaggtgtgaggtggtgatggggaaccttgagattgtgctcacgggacacaatgccgacctctccttcctgcagtggattcgagaagtgacaggctatgtcctcgtggccatgaatgaattctctactctaccattgcccaacctccgcgtggtgcgagggacccaggtctacgatgggaagtttgccatcttcgtcatgttgaactataacaccaactccagccacgctctgcgccagctccgcttgactcagctcaccgagattctgtcagggggtgtttatattgagaagaacgataagctttgtcacatggacacaattgactggagggacatcgtgagggaccgagatgctgagatagtggtgaaggacaatggcagaagctgtcccccctgtcatgaggtttgcaaggggcgatgctggggtcctggatcagaagactgccagacattgaccaagaccatctgtgctcctcagtgtaatggtcactgctttgggcccaaccccaaccagtgctgccatgatgagtgtgccgggggctgctcaggccctcaggacacagactgctttgcctgccggcacttcaatgacagtggagcctgtgtacctcgctgtccacagcctcttgtctacaacaagctaactttccagctggaacccaatccccacaccaagtatcagtatggaggagtttgtgtagccagctgtccccataactttgtggtggatcaaacatcctgtgtcagggcctgtcctcctgacaagatggaagtagataaaaatgggctcaagatgtgtgagccttgtgggggactatgtcccaaagcctgtgagggaacaggctctgggagccgcttccagactgtggactcgagcaacattgatggatttgtgaactgcaccaagatcctgggcaacctggactttctgatcaccggcctcaatggagacccctggcacaagatccctgccctggacccagagaagctcaatgtcttccggacagtacgggagatcacaggttacctgaacatccagtcctggccgccccacatgcacaacttcagtgttttttccaatttgacaaccattggaggcagaagcctctacaaccggggcttctcattgttgatcatgaagaacttgaatgtcacatctctgggcttccgatccctgaaggaaattagtgctgggcgtatctatataagtgccaataggcagctctgctaccaccactctttgaactggaccaaggtgcttcgggggcctacggaagagcgactagacatcaagcataatcggccgcgcagagactgcgtggcagagggcaaagtgtgtgacccactgtgctcctctgggggatgctggggcccaggccctggtcagtgcttgtcctgtcgaaattatagccgaggaggtgtctgtgtgacccactgcaactttctgaatggggagcctcgagaatttgcccatgaggccgaatgcttctcctgccacccggaatgccaacccatggagggcactgccacatgcaatggctcgggctctgatacttgtgctcaatgtgcccattttcgagatgggccccactgtgtgagcagctgcccccatggagtcctaggtgccaagggcccaatctacaagtacccagatgttcagaatgaatgtcggccctgccatgagaactgcacccaggggtgtaaaggaccagagcttcaagactgtttaggacaaacactggtgctgatcggcaaaacccatctgacaatggctttgacagtgatagcaggattggtagtgattttcatgatgctgggcggcacttttctctactggcgtgggcgccggattcagaataaaagggctatgaggcgatacttggaacggggtgagagcatagagcctctggaccccagtgagaaggctaacaaagtcttggccagaatcttcaaagagacagagctaaggaagcttaaagtgcttggctcgggtgtctttggaactgtgcacaaaggagtgtggatccctgagggtgaatcaatcaagattccagtctgcattaaagtcattgaggacaagagtggacggcagagttttcaagctgtgacagatcatatgctggccattggcagcctggaccatgcccacattgtaaggctgctgggactatgcccagggtcatctctgcagcttgtcactcaatatttgcctctgggttctctgctggatcatgtgagacaacaccggggggcactggggccacagctgctgctcaactggggagtacaaattgccaagggaatgtactaccttgaggaacatggtatggtgcatagaaacctggctgcccgaaacgtgctactcaagtcacccagtcaggttcaggtggcagattttggtgtggctgacctgctgcctcctgatgataagcagctgctatacagtgaggccaagactccaattaagtggatggcccttgagagtatccactttgggaaatacacacaccagagtgatgtctggagctatggtgtgacagtttgggagttgatgaccttcggggcagagccctatgcagggctacgattggctgaagtaccagacctgctagagaagggggagcggttggcacagccccagatctgcacaattgatgtctacatggtgatggtcaagtgttggatgattgatgagaacattcgcccaacctttaaagaactagccaatgagttcaccaggatggcccgagacccaccacggtatctggtcataaagagagagagtgggcctggaatagcccctgggccagagccccatggtctgacaaacaagaagctagaggaagtagagctggagccagaactagacctagacctagacttggaagcagaggaggacaacctggcaaccaccacactgggctccgccctcagcctaccagttggaacacttaatcggccacgtgggagccagagccttttaagtccatcatctggatacatgcccatgaaccagggtaatcttggggagtcttgccaggagtctgcagtttctgggagcagtgaacggtgcccccgtccagtctctctacacccaatgccacggggatgcctggcatcagagtcatcagaggggcatgtaacaggctctgaggctgagctccaggagaaagtgtcaatgtgtaggagccggagcaggagccggagcccacggccacgcggagatagcgcctaccattcccagcgccacagtctgctgactcctgttaccccactctccccacccgggttagaggaagaggatgtcaacggttatgtcatgccagatacacacctcaaaggtactccctcctcccgggaaggcaccctttcttcagtgggtctcagttctgtcctgggtactgaagaagaagatgaagatgaggagtatgaatacatgaaccggaggagaaggcacagtccacctcatccccctaggccaagttcccttgaggagctgggttatgagtacatggatgtggggtcagacctcagtgcctctctgggcagcacacagagttgcccactccaccctgtacccatcatgcccactgcaggcacaactccagatgaagactatgaatatatgaatcggcaacgagatggaggtggtcctgggggtgattatgcagccatgggggcctgcccagcatctgagcaagggtatgaagagatgagagcttttcaggggcctggacatcaggccccccatgtccattatgcccgcctaaaaactctacgtagcttagaggctacagactctgcctttgataaccctgattactggcatagcaggcttttccccaaggctaatgcccagagaacgtaactcctgctccctgtggcactcagggagcatttaatggcagctagtgcctttagagggtaccgtcttctccctattccctctctctcccaggtcccagccccttttccccagtcccagacaattccattcaatctttggaggcttttaaacattttgacacaaaattcttatggtatgtagccagctgtgcactttcttctctttcccaaccccaggaaaggttttccttattttgtgtgctttcccagtcccattcctcagcttcttcacaggcactcctggagatatgaaggattactctccatatcccttcctctcaggctcttgactacttggaactaggctcttatgtgtgcctttgtttcccatcagactgtcaagaagaggaaagggaggaaacctagcagaggaaagtgtaattttggtttatgactcttaaccccctagaaagacagaagcttaaaatctgtgaagaaagaggttaggagtagatattgattactatcataattcagcacttaactatgagccaggcatcatactaaacttcacctacattatctcacttagtcctttatcatccttaaaacaattctgtgacatacatattatctcattttacacaaagggaagtcgggcatggtggctcatgcctgtaatctcagcactttgggaggctgaggcagaaggattacctgaggcaaggagtttgagaccagcttagccaacatagtaagacccccatctctttaaaaaaaaaaaaaaaaaaaaaaaaaaaactttagaactgggtgcagtggctcatgcctgtaatcccagccagcactttgggaggctgagatgggaagatcacttgagcccagaattagagataagcctatggaaacatagcaagacactgtctctacaggggaaaaaaaaaaaagaaactgagccttaaagagatgaaataaattaagcagtagatccaggatgcaaaatcctcccaattcctgtgcatgtgctcttattgtaaggtgccaagaaaaactgatttaagttacagcccttgtttaaggggcactgtttcttgtttttgcactgaatcaagtctaaccccaacagccacatcctcctatacctagacatctcatctcaggaagtggtggtgggggtagtcagaaggaaaaataactggacatctttgtgtaaaccataatccacatgtgccgtaaatgatcttcactccttatccgagggcaaattcacaaggatccccaagatccacttttagaagccattctcatccagcagtgagaagcttccaggtaggacagaaaaaagatccagcttcagctgcacacctctgtccccttggatggggaactaagggaaaacgtctgttgtatcactgaagttttttgttttgtttttatacgtgtctgaataaaaatgccaaagttttttttca

SEQ ID NO: 6670 - DNA, 1027 bp, Homo sapiens
  source 1..1027: mol_type = unassigned DNA; mol_type = unassigned DNA
tccccggactccggctccggctccgattgcaatttgcaacctccgctgccgtcgccgcagcagccaccaattcgccagcggttcaggtggctcttgcctcgatgtcctagcctaggggcccccgggccggacttggctgggctcccttcaccctctgcggagtcatgagggcgaacgacgctctgcaggtgctgggcttgcttttcagcctggcccggggctccgaggtgggcaactctcaggcagtgtgtcctgggactctgaatggcctgagtgtgaccggcgatgctgagaaccaataccagacactgtacaagctctacgagaggtgtgaggtggtgatggggaaccttgagattgtgctcacgggacacaatgccgacctctccttcctgcagtggattcgagaagtgacaggctatgtcctcgtggccatgaatgaattctctactctaccattgcccaacctccgcgtggtgcgagggacccaggtctacgatgggaagtttgccatcttcgtcatgttgaactataacaccaactccagccacgctctgcgccagctccgcttgactcagctcaccggtcagttcccgatggttccttctggcctcacccctcagccagcccaagactggtacctccttgatgatgacccaagactgctcactctaagtgcctcttccaaggtgcctgtcaccttggccgctgtctaaaggtccattgctccctaagcaatagagggcccccagtagggggagctaggggcatctgctccagggaaaggaaccctgtgtccttgtggggctggagtcagagctggatctgttaaccgtttttctaatttcaaagtacagtgtaccggaggccaggcctgatggcttacacctgtaatcccagcattttgggaggccaaggagggcagatcacttgagatcaggagtttgagaccagcctggccaacatggcgaaaccctgtctctactaaaaatacaaaaaaataaaataaaataaaaaattagctggc

SEQ ID NO: 6671 - DNA, 572 bp, Homo sapiens
  source 1..572: mol_type = unassigned DNA; mol_type = unassigned DNA
aatttgcaacctccgctgccgtcgccgcagcagccaccaattcgccagcggttcaggtggctcttgcctcgatgtcctagcctaggggcccccgggccggacttggctgggctcccttcaccctctgcggagtcatgagggcgaacgacgctctgcaggtgccaagggcccaatctacaagtacccagatgttcagaatgaatgtcggccctgccatgagaactgcacccaggggtgtaaaggaccagagcttcaagactgtttaggacaaacactggtgctgatcggcaaaacccatctgacaatggctttgacagtgatagcaggattggtagtgattttcatgatgctgggcggcacttttctctactggcgtgggcgccggattcagaataaaagggctatgaggcgatacttggaacggggtgagagcatagagcctctggaccccagtgagaaggctaacaaagtcttggccagaatcttcaaagagacagagctaaggaagcttaaagtgcttggctcgggtgtctttggaactgtgcacaaaggagtgtggatccctgagggtg

SEQ ID NO: 6672 - DNA, 4382 bp, Homo sapiens
  source 1..4382: mol_type = unassigned DNA; mol_type = unassigned DNA
atttgcaacctccgctgccgtcgccgcagcagccaccaattcgccagcggttcaggtggctcttgcctcgatgtcctagcctaggggcccccgggccggacttggctgggctcccttcaccctctgcggagtcatgagggcgaacgacgctctgcaggtgctgggcttgcttttcagcctggcccggggctccgaggtgggcaactctcaggcagtgtgtcctgggactctgaatggcctgagtgtgaccggcgatgctgagaaccaataccagacactgtacaagctctacgagaggtgtgaggtggtgatggggaaccttgagattgtgctcacgggacacaatgccgacctctccttcctgcagtggattcgagaagtgacaggctatgtcctcgtggccatgaatgaattctctactctaccattgcccaacctccgcgtggtgcgagggacccaggtctacgatgggaagtttgccatcttcgtcatgttgaactataacaccaactccagccacgctctgcgccagctccgcttgactcagctcaccgagattctgtcagggggtgtttatattgagaagaacgataagctttgtcacatggacacaattgactggagggacatcgtgagggaccgagatgctgagatagtggtgaaggacaatggcagaagctgtcccccctgtcatgaggtttgcaaggggcgatgctggggtcctggatcagaagactgccagacattgaccaagaccatctgtgctcctcagtgtaatggtcactgctttgggcccaaccccaaccagtgctgccatgatgagtgtgccgggggctgctcaggccctcaggacacagactgctttgcctgccggcacttcaatgacagtggagcctgtgtacctcgctgtccacagcctcttgtctacaacaagctaactttccagctggaacccaatccccacaccaagtatcagtatggaggagtttgtgtagccagctgtccccataactttgtggtggatcaaacatcctgtgtcagggcctgtcctcctgacaagatggaagtagataaaaatgggctcaagatgtgtgagccttgtgggggactatgtcccaaagcctgtgagggaacaggctctgggagccgcttccagactgtggactcgagcaacattgatggatttgtgaactgcaccaagatcctgggcaacctggactttctgatcaccggcctcaatggagacccctggcacaagatccctgccctggacccagagaagctcaatgtcttccggacagtacgggagatcacaggttacctgaacatccagtcctggccgccccacatgcacaacttcagtgttttttccaatttgacaaccattggaggcagaagcctctacaaccggggcttctcattgttgatcatgaagaacttgaatgtcacatctctgggcttccgatccctgaaggaaattagtgctgggcgtatctatataagtgccaataggcagctctgctaccaccactctttgaactggaccaaggtgcttcgggggcctacggaagagcgactagacatcaagcataatcggccgcgcagagactgcgtggcagagggcaaagtgtgtgacccactgtgctcctctgggggatgctggggcccaggccctggtcagtgcttgtcctgtcgaaattatagccgaggaggtgtctgtgtgacccactgcaactttctgaatggggagcctcgagaatttgcccatgaggccgaatgcttctcctgccacccggaatgccaacccatggagggcactgccacatgcaatggctcgggctctgatacttgtgctcaatgtgcccattttcgagatgggccccactgtgtgagcagctgcccccatggagtcctaggtgccaagggcccaatctacaagtacccagatgttcagaatgaatgtcggccctgccatgagaactgcacccaggggtgtaaaggaccagagcttcaagactgtttaggacaaacactggtgctgatcggcaaaacccatctgacaatggctttgacagtgatagcaggattggtagtgattttcatgatgctgggcggcacttttctctactggcgtgggcgccggattcagaataaaagggctatgaggcgatacttggaacggggtgagagcatagagcctctggaccccagtgagaaggctaacaaagtcttggccagaatcttcaaagagacagagctaaggaagcttaaagtgcttggctcgggtgtctttggaactgtgcacaaaggagtgtggatccctgagggtgaatcaatcaagattccagtctgcattaaagtcattgaggacaagagtggacggcagagttttcaagctgtgacagatcatatgctggccattggcagcctggaccatgcccacattgtaaggctgctgggactatgcccagggtcatctctgcagcttgtcactcaatatttgcctctgggttctctgctggatcatgtgagacaacaccggggggcactggggccacagctgctgctcaactggggagtacaaattgccaagggaatgtactaccttgaggaacatggtatggtgcatagaaacctggctgcccgaaacgtgctactcaagtcacccagtcaggttcaggtggcagattttggtgtggctgacctgctgcctcctgatgataagcagctgctatacagtgaggccaagactccaattaagtggatggcccttgagagtatccactttgggaaatacacacaccagagtgatgtctggagctatggtcagtgcatctggatgccctctctaccatcactggccccagtttcaaatttaccttttgagaccccctcttagaatctctaagcacttcagatttttgtgttagatcaggttctgccttcccttcacttcatgcccatgtctactattttgccagtgactagtccatgtcttcctgcaacaggtgtgacagtttgggagttgatgaccttcggggcagagccctatgcagggctacgattggctgaagtaccagacctgctagagaagggggagcggttggcacagccccagatctgcacaattgatgtctacatggtgatggtcaagtgttggatgattgatgagaacattcgcccaacctttaaagaactagccaatgagttcaccaggatggcccgagacccaccacggtatctggtcataaagagagagagtgggcctggaatagcccctgggccagagccccatggtctgacaaacaagaagctagaggaagtagagctggagccagaactagacctagacctagacttggaagcagaggaggacaacctggcaaccaccacactgggctccgccctcagcctaccagttggaacacttaatcggccacgtgggagccagagccttttaagtccatcatctggatacatgcccatgaaccagggtaatcttggggagtcttgccaggagtctgcagtttctgggagcagtgaacggtgcccccgtccagtctctctacacccaatgccacggggatgcctggcatcagagtcatcagaggggcatgtaacaggctctgaggctgagctccaggagaaagtgtcaatgtgtaggagccggagcaggagccggagcccacggccacgcggagatagcgcctaccattcccagcgccacagtctgctgactcctgttaccccactctccccacccgggttagaggaagaggatgtcaacggttatgtcatgccagatacacacctcaaaggtactccctcctcccgggaaggcaccctttcttcagtgggtctcagttctgtcctgggtactgaagaagaagatgaagatgaggagtatgaatacatgaaccggaggagaaggcacagtccacctcatccccctaggccaagttcccttgaggagctgggttatgagtacatggatgtggggtcagacctcagtgcctctctgggcagcacacagagttgcccactccaccctgtacccatcatgcccactgcaggcacaactccagatgaagactatgaatatatgaatcggcaacgagatggaggtggtcctgggggtgattatgcagccatgggggcctgcccagcatctgagcaagggtatgaagagatgagagcttttcaggggcctggacatcaggccccccatgtccattatgcccgcctaaaaactctacgtagcttagaggctacagactctgcctttgataaccctgattactggcatagcaggcttttccccaaggctaatgcccagagaacgtaactcctgctccctgtggcactcagggagcatttaatgg

SEQ ID NO: 6673 - DNA, 660 bp, Homo sapiens
  source 1..660: mol_type = unassigned DNA; mol_type = unassigned DNA
caattcgccagcggttcaggtggctcttgcctcgatgtcctagcctaggggcccccgggccggacttggctgggctcccttcaccctctgcggagtcatgagggcgaacgacgctctgcaggtgctgggcttgcttttcagcctggcccggggctccgaggtgggcaactctcaggcagtgtgtcctgggactctgaatggcctgagtgtgaccggcgatgctgagaaccaataccagacactgtacaagctctacgagaggtgtgaggtggtgatggggaaccttgagattgtgctcacgggacacaatgccgacctctccttcctgcagtggattcgagaagtgacaggctatgtcctcgtggccatgaatgaattctctactctaccattgcccaacctccgcgtggtgcgagggacccaggtctacgatgggaagtttgccatcttcgtcatgttgaactataacaccaactccagccacgctctgcgccagctccgcttgactcagctcaccgagattctgtcagggggtgtttatattgagaagaacgataagctttgtcacatggacacaattgactggagggacatcgtgagggaccgagatgctgagatagtggtgaaggacaatggcagaagctgtaagtggccgtgatc

SEQ ID NO: 6674 - DNA, 2755 bp, Homo sapiens
  source 1..2755: mol_type = unassigned DNA; mol_type = unassigned DNA
aattcgccagcggttcaggtggctcttgcctcgatgtcctagcctaggggcccccgggccggacttggctgggctcccttcaccctctgcggagtcatgagggcgaacgacgctctgcaggtgctgggcttgcttttcagcctggcccggggctccgaggtgggcaactctcaggcagtgtgtcctgggactctgaatggcctgagtgtgaccggcgatgctgagaaccaataccagacactgtacaagctctacgagaggtgtgaggtggtgatggggaaccttgagattgtgctcacgggacacaatgccgacctctccttcctgcagtggattcgagaagtgacaggctatgtcctcgtggccatgaatgaattctctactctaccattgcccaacctccgcgtggtgcgagggacccaggtctacgatgggaagtttgccatcttcgtcatgttgaactataacaccaactccagccacgctctgcgccagctccgcttgactcagctcaccgagattctgtcagggggtgtttatattgagaagaacgataagctttgtcacatggacacaattgactggagggacatcgtgagggaccgagatgctgagatagtggtgaaggacaatggcagaagctgtcccccctgtcatgaggtttgcaaggggcgatgctggggtcctggatcagaagactgccagacattgaccaagaccatctgtgctcctcagtgtaatggtcactgctttgggcccaaccccaaccagtgctgccatgatgagtgtgccgggggctgctcaggccctcaggacacagactgctttgcctgccggcacttcaatgacagtggagcctgtgtacctcgctgtccacagcctcttgtctacaacaagctaactttccagctggaacccaatccccacaccaagtatcagtatggaggagtttgtgtagccagctgtccccataactttgtggtggatcaaacatcctgtgtcagggcctgtcctcctgacaagatggaagtagataaaaatgggctcaagatgtgtgagccttgtgggggactatgtcccaaagccttttaagtccatcatctggatacatgcccatgaaccagggtaatcttggggagtcttgccaggagtctgcagtttctgggagcagtgaacggtgcccccgtccagtctctctacacccaatgccacggggatgcctggcatcagagtcatcagaggggcatgtaacaggctctgaggctgagctccaggagaaagtgtcaatgtgtaggagccggagcaggagccggagcccacggccacgcggagatagcgcctaccattcccagcgccacagtctgctgactcctgttaccccactctccccacccgggttagaggaagaggatgtcaacggttatgtcatgccagatacacacctcaaaggtactccctcctcccgggaaggcaccctttcttcagtgggtctcagttctgtcctgggtactgaagaagaagatgaagatgaggagtatgaatacatgaaccggaggagaaggcacagtccacctcatccccctaggccaagttcccttgaggagctgggttatgagtacatggatgtggggtcagacctcagtgcctctctgggcagcacacagagttgcccactccaccctgtacccatcatgcccactgcaggcacaactccagatgaagactatgaatatatgaatcggcaacgagatggaggtggtcctgggggtgattatgcagccatgggggcctgcccagcatctgagcaagggtatgaagagatgagagcttttcaggggcctggacatcaggccccccatgtccattatgcccgcctaaaaactctacgtagcttagaggctacagactctgcctttgataaccctgattactggcatagcaggcttttccccaaggctaatgcccagagaacgtaactcctgctccctgtggcactcagggagcatttaatggcagctagtgcctttagagggtaccgtcttctccctattccctctctctcccaggtcccagccccttttccccagtcccagacaattccattcaatctttggaggcttttaaacattttgacacaaaattcttatggtatgtagccagctgtgcactttcttctctttcccaaccccaggaaaggttttccttattttgtgtgctttcccagtcccattcctcagcttcttcacaggcactcctggagatatgaaggattactctccatatcccttcctctcaggctcttgactacttggaactaggctcttatgtgtgcctttgtttcccatcagactgtcaagaagaggaaagggaggaaacctagcagaggaaagtgtaattttggtttatgactcttaaccccctagaaagacagaagcttaaaatctgtgaagaaagaggttaggagtagatattgattactatcataattcagcacttaactatgagccaggcatcatactaaacttcacctacattatctcacttagtcctttatcatccttaaaacaattctgtgacatacatattatctcattttacacaaagggaagtcgggcatggtggctcatgcctgtaatctcagcactttgggaggctgaggcagaaggattacctgaggcaaggagtttgagaccagcttagccaacatagtaagacccccatctctttaaaaaaaaaaaaaaaaaaaaaaaaaaaa

SEQ ID NO: 6675 - DNA, 676 bp, Homo sapiens
  source 1..676: mol_type = unassigned DNA; mol_type = unassigned DNA
agagatatttattccaggacctagagagaggcaggatgagggtagagaagtgagtgccctagttggagggggagaggagggtaatcaaagttgcggccttttcctaacttctcttttctagggagagaaacaaattccctgtcttccttctcagttaaccccttagtacccaaaagaagcacagaggggtcccaggttgaaaaaggaaatcttttcaccttcccattcatggaatgtgtgtcctgggactctgaatggcctgagtgtgaccggcgatgctgagaaccaataccagacactgtacaagctctacgagaggtgtgaggtggtgatggggaaccttgagattgtgctcacgggacacaatgccgacctctccttcctgcagtggattcgagaagtgacaggctatgtcctcgtggccatgaatgaattctctactctaccattgcccaacctccgcgtggtgcgagggacccaggtctacgatgggaagtttgccatcttcgtcatgttgaactataacaccaactccagccacgctctgcgccagctccgcttgactcagctcaccgagattctgtcagggggtgtttatattgagaagaacgataagctttgtcacatggacacaattgactggagggacatcgtgagggaccgagatgctgagata

SEQ ID NO: 6676 - DNA, 4353 bp, Homo sapiens
  source 1..4353: mol_type = unassigned DNA; mol_type = unassigned DNA
atttattccaggacctagagagaggcaggatgagggtagagaattaaccccttagtacccaaaagaagcacagaggggtcccaggttgaaaaaggaaatcttttcaccttcccattcatggaatgtgtgtcctgggactctgaatggcctgagtgtgaccggcgatgctgagaaccaataccagacactgtacaagctctacgagaggtgtgaggtggtgatggggaaccttgagattgtgctcacgggacacaatgccgacctctccttcctgcagtggattcgagaagtgacaggctatgtcctcgtggccatgaatgaattctctactctaccattgcccaacctccgcgtggtgcgagggacccaggtctacgatgggaagtttgccatcttcgtcatgttgaactataacaccaactccagccacgctctgcgccagctccgcttgactcagctcaccgagattctgtcagggggtgtttatattgagaagaacgataagctttgtcacatggacacaattgactggagggacatcgtgagggaccgagatgctgagatagtggtgaaggacaatggcagaagctgtcccccctgtcatgaggtttgcaaggggcgatgctggggtcctggatcagaagactgccagacattgaccaagaccatctgtgctcctcagtgtaatggtcactgctttgggcccaaccccaaccagtgctgccatgatgagtgtgccgggggctgctcaggccctcaggacacagactgctttgcctgccggcacttcaatgacagtggagcctgtgtacctcgctgtccacagcctcttgtctacaacaagctaactttccagctggaacccaatccccacaccaagtatcagtatggaggagtttgtgtagccagctgtccccataactttgtggtggatcaaacatcctgtgtcagggcctgtcctcctgacaagatggaagtagataaaaatgggctcaagatgtgtgagccttgtgggggactatgtcccaaagcctgtgagggaacaggctctgggagccgcttccagactgtggactcgagcaacattgatggatttgtgaactgcaccaagatcctgggcaacctggactttctgatcaccggcctcaatggagacccctggcacaagatccctgccctggacccagagaagctcaatgtcttccggacagtacgggagatcacaggttacctgaacatccagtcctggccgccccacatgcacaacttcagtgttttttccaatttgacaaccattggaggcagaagcctctacaaccggggcttctcattgttgatcatgaagaacttgaatgtcacatctctgggcttccgatccctgaaggaaattagtgctgggcgtatctatataagtgccaataggcagctctgctaccaccactctttgaactggaccaaggtgcttcgggggcctacggaagagcgactagacatcaagcataatcggccgcgcagagactgcgtggcagagggcaaagtgtgtgacccactgtgctcctctgggggatgctggggcccaggccctggtcagtgcttgtcctgtcgaaattatagccgaggaggtgtctgtgtgacccactgcaactttctgaatggggagcctcgagaatttgcccatgaggccgaatgcttctcctgccacccggaatgccaacccatggagggcactgccacatgcaatggctcgggctctgatacttgtgctcaatgtgcccattttcgagatgggccccactgtgtgagcagctgcccccatggagtcctaggtgccaagggcccaatctacaagtacccagatgttcagaatgaatgtcggccctgccatgagaactgcacccaggggtgtaaaggaccagagcttcaagactgtttaggacaaacactggtgctgatcggcaaaacccatctgacaatggctttgacagtgatagcaggattggtagtgattttcatgatgctgggcggcacttttctctactggcgtgggcgccggattcagaataaaagggctatgaggcgatacttggaacggggtgagagcatagagcctctggaccccagtgagaaggctaacaaagtcttggccagaatcttcaaagagacagagctaaggaagcttaaagtgcttggctcgggtgtctttggaactgtgcacaaaggagtgtggatccctgagggtgaatcaatcaagattccagtctgcattaaagtcattgaggacaagagtggacggcagagttttcaagctgtgacagatcatatgctggccattggcagcctggaccatgcccacattgtaaggctgctgggactatgcccagggtcatctctgcagcttgtcactcaatatttgcctctgggttctctgctggatcatgtgagacaacaccggggggcactggggccacagctgctgctcaactggggagtacaaattgccaagggaatgtactaccttgaggaacatggtatggtgcatagaaacctggctgcccgaaacgtgctactcaagtcacccagtcaggttcaggtggcagattttggtgtggctgacctgctgcctcctgatgataagcagctgctatacagtgaggccaagactccaattaagtggatggcccttgagagtatccactttgggaaatacacacaccagagtgatgtctggagctatggtgtgacagtttgggagttgatgaccttcggggcagagccctatgcagggctacgattggctgaagtaccagacctgctagagaagggggagcggttggcacagccccagatctgcacaattgatgtctacatggtgatggtcaagtgttggatgattgatgagaacattcgcccaacctttaaagaactagccaatgagttcaccaggatggcccgagacccaccacggtatctggtcataaagagagagagtgggcctggaatagcccctgggccagagccccatggtctgacaaacaagaagctagaggaagtagagctggagccagaactagacctagacctagacttggaagcagaggaggacaacctggcaaccaccacactgggctccgccctcagcctaccagttggaacacttaatcggccacgtgggagccagagccttttaagtccatcatctggatacatgcccatgaaccagggtaatcttggggagtcttgccaggagtctgcagtttctgggagcagtgaacggtgcccccgtccagtctctctacacccaatgccacggggatgcctggcatcagagtcatcagaggggcatgtaacaggctctgaggctgagctccaggagaaagtgtcaatgtgtaggagccggagcaggagccggagcccacggccacgcggagatagcgcctaccattcccagcgccacagtctgctgactcctgttaccccactctccccacccgggttagaggaagaggatgtcaacggttatgtcatgccagatacacacctcaaaggtactccctcctcccgggaaggcaccctttcttcagtgggtctcagttctgtcctgggtactgaagaagaagatgaagatgaggagtatgaatacatgaaccggaggagaaggcacagtccacctcatccccctaggccaagttcccttgaggagctgggttatgagtacatggatgtggggtcagacctcagtgcctctctgggcagcacacagagttgcccactccaccctgtacccatcatgcccactgcaggcacaactccagatgaagactatgaatatatgaatcggcaacgagatggaggtggtcctgggggtgattatgcagccatgggggcctgcccagcatctgagcaagggtatgaagagatgagagcttttcaggggcctggacatcaggccccccatgtccattatgcccgcctaaaaactctacgtagcttagaggctacagactctgcctttgataaccctgattactggcatagcaggcttttccccaaggctaatgcccagagaacgtaactcctgctccctgtggcactcagggagcatttaatggcagctagtgcctttagagggtaccgtcttctccctattccctctctctcccaggtcccagccccttttccccagtcccagacaattccattcaatctttggaggcttttaaacattttgacacaaaattcttatggtatgtagccagctgtgcactttcttctctttcccaaccccaggaaaggttttccttattttgtgtgctttcccagtcccattcctcagcttcttcacaggcactcctg

SEQ ID NO: 6677 - DNA, 519 bp, Homo sapiens
  source 1..519: mol_type = unassigned DNA; mol_type = unassigned DNA
tccctacctcagagattctgtcagggggtgtttatattgagaagaacgataagctttgtcacatggacacaattgactggagggacatcgtgagggaccgagatgctgagatagtggtgaaggacaatggcagaagctgtcccccctgtcatgaggtttgcaaggggcgatgctggggtcctggatcagaagactgccagacatgtgggtttgaaattccctccaaaaacttcactcatacgctttcatatcccttcctccccaagcctgggtcaacactgtgggggaggcatgagcagtggcctcagaattcagtcctaggagccctaacagccatgctttctctccttccatagtgaccaagaccatctgtgctcctcagtgtaatggtcactgctttgggcccaaccccaaccagtgctgccatgatgagtgtgccgggggctgctcaggccctcaggacacagactgctttgcctgccggcacttcaatgacagtggagcctgtgtacctcgctg

SEQ ID NO: 6678 - DNA, 574 bp, Homo sapiens
  source 1..574: mol_type = unassigned DNA; mol_type = unassigned DNA
aatggtcactgctttgggcccaaccccaaccagtgctgccatgatgagtgtgccgggggctgctcaggccctcaggacacagactgctttgtatgtaccctttccattgcctgggttctgaaattgggatgtggcctttgaggaggaggtaggggtacacacgtaacataaatctgatgagcctccttttttcccaggcctgccggcacttcaatgacagtggagcctgtgtacctcgctgtccacagcctcttgtctacaacaagctaactttccagctggaacccaatccccacaccaagtatcagtatggaggagtttgtgtagccagctgtccccataactttgtggtggatcaaacatcctgtgtcagggcctgtcctcctgacaagatggaagtagataaaaatgggctcaagatgtgtgagccttgtgggggactatgtcccaaagcctgtgagggaacaggctctgggagccgcttccagactgtggactcgagcaacattgatggatttgtgaactgcaccaagatcctgggcaacctggactttctgatcaccggcctcaatgg

SEQ ID NO: 6679 - DNA, 277 bp, Homo sapiens
  source 1..277: mol_type = unassigned DNA; mol_type = unassigned DNA
gagccttgtgggggactatgtcccaaagcctgtgagggaacaggctctgggagccgcttccagactgtggactcgagcaacattgatggatttgtgaactgcaccaagatcctgggcaacctggactttctgatcaccggcctcaatgggttagagatcctgccttccctccttagaccccagcccacgcacccctcacagttcatttcattggccaaaactttcctatgtggagctgactaggaatcaaagtcataaaattctagcctgttacaaa

SEQ ID NO: 6680 - DNA, 971 bp, Homo sapiens
  source 1..971: mol_type = unassigned DNA; mol_type = unassigned DNA
caaggtgcttcgggggcctacggaagagcgactagacatcaagcataatcggccgcgcagagactgcgtggcagagggcaaagtgtgtgacccactgtgctcctctgggggatgctggggcccaggccctggtcagtgcttgtcctgtcgaaattatagccgaggaggtgtctgtgtgacccactgcaactttctgaatggggagcctcgagaatttgcccatgaggccgaatgcttctcctgccacccggaatgccaacccatggagggcactgccacatgcaatggctcggtatactagtagcaccaggatctccaagggagacagagaaggggcaatacttggagcatctggggaatgatatggctaaggatagcacagagaggccagataatgctagggcctgcagatagaagatcctgaatgtctgggttggtctttgctgggaggtatggaattgaccttgggatctgattcttcctgaccttctctcttccactcagggctctgatacttgtgctcaatgtgcccattttcgagatgggccccactgtgtgagcagctgcccccatggagtcctaggtgccaagggcccaatctacaagtacccagatgttcagaatgaatgtcggccctgccatgagaactgcacccaggggtgtaaaggaccagagcttcaagactgtttaggacaaacactggtgctgatcggcaaaacccatctgacaatggctttgacagtgatagcaggattggtagtgattttcatgatgctgggcggcacttttctctactggcgtgggcgccggattcagaataaaagggctatgaggcgatacttggaacggggtgagagatttgatccctttcttcaaggaagtagtgtggtcccctagaagaacactggtcagagaaatgggaggcatgcattctagtcctgattttgccattaatttgccacatgactttg

SEQ ID NO: 6681 - DNA, 266 bp, Homo sapiens
  source 1..266: mol_type = unassigned DNA; mol_type = unassigned DNA
ctagacatcaagcataatcggccgcgcagagactgcgtggcagagggcaaagtgtgtgacccactgtgctcctctgggggatgctggggcccaggccctggtcagtgcttgtcctgtcgaaattatagccgaggaggtgtctgtgtgacccactgcaactttctgaatgggtacagtaaggggagccagtcaaggatgggtgggggtggggccctgcaatggaactgttcaggtggcatacaataaaagtctttagacagctttct

SEQ ID NO: 6682 - DNA, 2729 bp, Homo sapiens
  source 1..2729: mol_type = unassigned DNA; mol_type = unassigned DNA
tgcttgtcctgtcgaaattatagccgaggaggtgtctgtgtgacccactgcaactttctgaatggggagcctcgagaatttgcccatgaggccgaatgcttctcctgccacccggaatgccaacccatggagggcactgccacatgcaatggctcgggctctgatacttgtgctcaatgtgcccattttcgagatgggccccactgtgtgagcagctgcccccatggagtcctaggtgccaagggcccaatctacaagtacccagatgttcagaatgaatgtcggccctgccatgagaactgcacccaggggtgtaaaggaccagagcttcaagactgtttaggacaaacactggtgctgatcggcaaaacccatctgacaatggctttgacagtgatagcaggattggtagtgattttcatgatgctgggcggcacttttctctactggcgtgggcgccggattcagaataaaagggctatgaggcgatacttggaacggggtgagagcatagagcctctggaccccagtgagaagactccaattaagtggatggcccttgagagtatccactttgggaaatacacacaccagagtgatgtctggagctatggtgtgacagtttgggagttgatgaccttcggggcagagccctatgcagggctacgattggctgaagtaccagacctgctagagaagggggagcggttggcacagccccagatctgcacaattgatgtctacatggtgatggtcaagtgttggatgattgatgagaacattcgcccaacctttaaagaactagccaatgagttcaccaggatggcccgagacccaccacggtatctggtcataaagagagagagtgggcctggaatagcccctgggccagagccccatggtctgacaaacaagaagctagaggaagtagagctggagccagaactagacctagacctagacttggaagcagaggaggacaacctggcaaccaccacactgggctccgccctcagcctaccagttggaacacttaatcggccacgtgggagccagagccttttaagtccatcatctggatacatgcccatgaaccagggtaatcttggggagtcttgccaggagtctgcagtttctgggagcagtgaacggtgcccccgtccagtctctctacacccaatgccacggggatgcctggcatcagagtcatcagaggggcatgtaacaggctctgaggctgagctccaggagaaagtgtcaatgtgtaggagccggagcaggagccggagcccacggccacgcggagatagcgcctaccattcccagcgccacagtctgctgactcctgttaccccactctccccacccgggttagaggaagaggatgtcaacggttatgtcatgccagatacacacctcaaaggtactccctcctcccgggaaggcaccctttcttcagtgggtctcagttctgtcctgggtactgaagaagaagatgaagatgaggagtatgaatacatgaaccggaggagaaggcacagtccacctcatccccctaggccaagttcccttgaggagctgggttatgagtacatggatgtggggtcagacctcagtgcctctctgggcagcacacagagttgcccactccaccctgtacccatcatgcccactgcaggcacaactccagatgaagactatgaatatatgaatcggcaacgagatggaggtggtcctgggggtgattatgcagccatgggggcctgcccagcatctgagcaagggtatgaagagatgagagcttttcaggggcctggacatcaggccccccatgtccattatgcccgcctaaaaactctacgtagcttagaggctacagactctgcctttgataaccctgattactggcatagcaggcttttccccaaggctaatgcccagagaacgtaactcctgctccctgtggcactcagggagcatttaatggcagctagtgcctttagagggtaccgtcttctccctattccctctctctcccaggtcccagccccttttccccagtcccagacaattccattcaatctttggaggcttttaaacattttgacacaaaattcttatggtatgtagccagctgtgcactttcttctctttcccaaccccaggaaaggttttccttattttgtgtgctttcccagtcccattcctcagcttcttcacaggcactcctggagatatgaaggattactctccatatcccttcctctcaggctcttgactacttggaactaggctcttatgtgtgcctttgtttcccatcagactgtcaagaagaggaaagggaggaaacctagcagaggaaagtgtaattttggtttatgactcttaaccccctagaaagacagaagcttaaaatctgtgaagaaagaggttaggagtagatattgattactatcataattcagcacttaactatgagccaggcatcatactaaacttcacctacattatctcacttagtcctttatcatccttaaaacaattctgtgacatacatattatctcattttacacaaagggaagtcgggcatggtggctcatgcctgtaatctcagcactttgggaggctgaggcagaaggattacctgaggcaaggagtttgagaccagcttagccaacatagtaagacccccatctctttaaaaaaaaaaaaaaaaaaaaaaaaaaaa

SEQ ID NO: 6683 - DNA, 306 bp, Homo sapiens
  source 1..306: mol_type = unassigned DNA; mol_type = unassigned DNA
gaatgtcggccctgccatgagaactgcacccaggggtgtaaaggaccagagcttcaagactgtttaggacaaacactggtgctgatcgggtatgatggggttggagattctggaaactggggatatttgggagttgggagagaggtggttacctggagagaagagggaggctgtcttcattctggccttttatgtatgcagtccactatcactggacacttgggactcaagaatgcaggcttctggacttcccttcctaaaattaactttcagtagtctaagactggtccagatttaggttggtcc

SEQ ID NO: 6684 - DNA, 3237 bp, Homo sapiens
  source 1..3237: mol_type = unassigned DNA; mol_type = unassigned DNA
agaacactggtcagagaaatgggaggcatgcattctagtcctgattttgccattaatttgccacatgactttgaagaagttacttatcttctctgtgcctcggtttatgcatctatacagaggaaataacatttgtccttccaggatggctgtaagggtaaagggggatgatgtatgtgaaagtgctttggaaagcacagagcactgtataaaaggtactcaaggtggtaatagtactaccaactctccctagctgtccccttccccactttgtgctcctccatcaaagggaaaacccaacccctttgattcctgatctcatgagcacaaataacttcctcagttctcagggtctgtacctcaatatgcctataatccattccaggactaacggtgcttcctcttcctgccctttcagctgtgctgcttttggcattcacctatgaggagcgggttggagtgggacatgggaatggcctttcctgagtaactccttcccatttgctcctcagagcatagagcctctggaccccagtgagaaggctaacaaagtcttggccagaatcttcaaagagacagagctaaggaagcttaaagtgcttggctcgggtgtctttggaactgtgcacaaaggagtgtggatccctgagggtgaatcaatcaagattccagtctgcattaaagtcattgaggacaagagtggacggcagagttttcaagctgtgacagatcatatgctggccattggcagcctggaccatgcccacattgtaaggctgctgggactatgcccagggtcatctctgcagcttgtcactcaatatttgcctctgggttctctgctggatcatgtgagacaacaccggggggcactggggccacagctgctgctcaactggggagtacaaattgccaagggaatgtactaccttgaggaacatggtatggtgcatagaaacctggctgcccgaaacgtgctactcaagtcacccagtcaggttcaggtggcagattttggtgtggctgacctgctgcctcctgatgataagcagctgctatacagtgaggccaagactccaattaagtggatggcccttgagagtatccactttgggaaatacacacaccagagtgatgtctggagctatggtgtgacagtttgggagttgatgaccttcggggcagagccctatgcagggctacgattggctgaagtaccagacctgctagagaagggggagcggttggcacagccccagatctgcacaattgatgtctacatggtgatggtcaagtgttggatgattgatgagaacattcgcccaacctttaaagaactagccaatgagttcaccaggatggcccgagacccaccacggtatctggtcataaagagagagagtgggcctggaatagcccctgggccagagccccatggtctgacaaacaagaagctagaggaagtagagctggagccagaactagacctagacctagacttggaagcagaggaggacaacctggcaaccaccacactgggctccgccctcagcctaccagttggaacacttaatcggccacgtgggagccagagccttttaagtccatcatctggatacatgcccatgaaccagggtaatcttggggagtcttgccaggagtctgcagtttctgggagcagtgaacggtgcccccgtccagtctctctacacccaatgccacggggatgcctggcatcagagtcatcagaggggcatgtaacaggctctgaggctgagctccaggagaaagtgtcaatgtgtaggagccggagcaggagccggagcccacggccacgcggagatagcgcctaccattcccagcgccacagtctgctgactcctgttaccccactctccccacccgggttagaggaagaggatgtcaacggttatgtcatgccagatacacacctcaaaggtactccctcctcccgggaaggcaccctttcttcagtgggtctcagttctgtcctgggtactgaagaagaagatgaagatgaggagtatgaatacatgaaccggaggagaaggcacagtccacctcatccccctaggccaagttcccttgaggagctgggttatgagtacatggatgtggggtcagacctcagtgcctctctgggcagcacacagagttgcccactccaccctgtacccatcatgcccactgcaggcacaactccagatgaagactatgaatatatgaatcggcaacgagatggaggtggtcctgggggtgattatgcagccatgggggcctgcccagcatctgagcaagggtatgaagagatgagagcttttcaggggcctggacatcaggccccccatgtccattatgcccgcctaaaaactctacgtagcttagaggctacagactctgcctttgataaccctgattactggcatagcaggcttttccccaaggctaatgcccagagaacgtaactcctgctccctgtggcactcagggagcatttaatggcagctagtgcctttagagggtaccgtcttctccctattccctctctctcccaggtcccagccccttttccccagtcccagacaattccattcaatctttggaggcttttaaacattttgacacaaaattcttatggtatgtagccagctgtgcactttcttctctttcccaaccccaggaaaggttttccttattttgtgtgctttcccagtcccattcctcagcttcttcacaggcactcctggagatatgaaggattactctccatatcccttcctctcaggctcttgactacttggaactaggctcttatgtgtgcctttgtttcccatcagactgtcaagaagaggaaagggaggaaacctagcagaggaaagtgtaattttggtttatgactcttaaccccctagaaagacagaagcttaaaatctgtgaagaaagaggttaggagtagatattgattactatcataattcagcacttaactatgagccaggcatcatactaaacttcacctacattatctcacttagtcctttatcatccttaaaacaattctgtgacatacatattatctcattttacacaaagggaagtcgggcatggtggctcatgcctgtaatctcagcactttgggaggctgaggcagaaggattacctgaggcaaggagtttgagaccagcttagccaacatagtaagacccccatctcttt

SEQ ID NO: 6685 - DNA, 551 bp, Homo sapiens
  source 1..551: mol_type = unassigned DNA; mol_type = unassigned DNA
atatttgcctctgggttctctgctggatcatgtgagacaacaccggggggcactggggccacagctgctgctcaactggggagtacaaattgccaagggaatgtactaccttgaggaacatggtatggtgcatagaaacctggctgcccgaaacgtgctactcaagtcacccagtcaggttcaggtggcagattttggtgtggctgacctgctgcctcctgatgataagcagctgctatacagtgaggccaagactccaattaagtggatggcccttgagagtatccactttgggaaatacacacaccagagtgatgtctggagctatggtgtgacagtttgggagttgatgaccttcggggcagagccctatgcagggctacgattggctgaagtaccagacctgctagagaagggggagcggttggcacagccccagatctgcacaattgatgtctacatggtgatggtcaagtgtgagttacctgctgagcccaaccattttctctttttttctttttttttcttttttttttttttttgagacagag

SEQ ID NO: 6686 - DNA, 3289 bp, Homo sapiens
  source 1..3289: mol_type = unassigned DNA; mol_type = unassigned DNA
aaaaaaaaaaaattagccaggcgtggcggcatgcatctgtactcccagctactcgggaggctgaggcaggagaatggcgtgaacccaggaggcggagcttgcagtgggccgagatcgcaccactgcactccagtctgggcgacagagcgagactccgtctcaaaaaaaaaaaaaaaagaatttgggacttggaaatcctaagaaaatttgtggaaataaacttgtgatacctctatctttaatccgcagactccaattaagtggatggcccttgagagtatccactttgggaaatacacacaccagagtgatgtctggagctatggtcagtgcatctggatgccctctctaccatcactggccccagtttcaaatttaccttttgagaccccctcttagaatctctaagcacttcagatttttgtgttagatcaggttctgccttcccttcacttcatgcccatgtctactattttgccagtgactagtccatgtcttcctgcaacaggtgtgacagtttgggagttgatgaccttcggggcagagccctatgcagggctacgattggctgaagtaccagacctgctagagaagggggagcggttggcacagccccagatctgcacaattgatgtctacatggtgatggtcaagtgttggatgattgatgagaacattcgcccaacctttaaagaactagccaatgagttcaccaggatggcccgagacccaccacggtatctggtcataaagagagagagtgggcctggaatagcccctgggccagagccccatggtctgacaaacaagaagctagaggaagtagagctggagccagaactagacctagacctagacttggaagcagaggaggacaacctggcaaccaccacactgggctccgccctcagcctaccagttggaacacttaatcggccacgtgggagccagagccttttaagtccatcatctggatacatgcccatgaaccagggtaatcttggggagtcttgccaggagtctgcagtttctgggagcagtgaacggtgcccccgtccagtctctctacacccaatgccacggggatgcctggcatcagagtcatcagaggggcatgtaacaggctctgaggctgagctccaggagaaagtgtcaatgtgtaggagccggagcaggagccggagcccacggccacgcggagatagcgcctaccattcccagcgccacagtctgctgactcctgttaccccactctccccacccgggttagaggaagaggatgtcaacggttatgtcatgccagatacacacctcaaaggtactccctcctcccgggaaggcaccctttcttcagtgggtctcagttctgtcctgggtactgaagaagaagatgaagatgaggagtatgaatacatgaaccggaggagaaggcacagtccacctcatccccctaggccaagttcccttgaggagctgggttatgagtacatggatgtggggtcagacctcagtgcctctctgggcagcacacagagttgcccactccaccctgtacccatcatgcccactgcaggcacaactccagatgaagactatgaatatatgaatcggcaacgagatggaggtggtcctgggggtgattatgcagccatgggggcctgcccagcatctgagcaagggtatgaagagatgagagcttttcaggggcctggacatcaggccccccatgtccattatgcccgcctaaaaactctacgtagcttagaggctacagactctgcctttgataaccctgattactggcatagcaggcttttccccaaggctaatgcccagagaacgtaactcctgctccctgtggcactcagggagcatttaatggcagctagtgcctttagagggtaccgtcttctccctattccctctctctcccaggtcccagccccttttccccagtcccagacaattccattcaatctttggaggcttttaaacattttgacacaaaattcttatggtatgtagccagctgtgcactttcttctctttcccaaccccaggaaaggttttccttattttgtgtgctttcccagtcccattcctcagcttcttcacaggcactcctggagatatgaaggattactctccatatcccttcctctcaggctcttgactacttggaactaggctcttatgtgtgcctttgtttcccatcagactgtcaagaagaggaaagggaggaaacctagcagaggaaagtgtaattttggtttatgactcttaaccccctagaaagacagaagcttaaaatctgtgaagaaagaggttaggagtagatattgattactatcataattcagcacttaactatgagccaggcatcatactaaacttcacctacattatctcacttagtcctttatcatccttaaaacaattctgtgacatacatattatctcattttacacaaagggaagtcgggcatggtggctcatgcctgtaatctcagcactttgggaggctgaggcagaaggattacctgaggcaaggagtttgagaccagcttagccaacatagtaagacccccatctctttaaaaaaaaaaaaaaaaaaaaaaaaaaaactttagaactgggtgcagtggctcatgcctgtaatcccagccagcactttgggaggctgagatgggaagatcacttgagcccagaattagagataagcctatggaaacatagcaagacactgtctctacaggggaaaaaaaaaaaagaaactgagccttaaagagatgaaataaattaagcagtagatccaggatgcaaaatcctcccaattcctgtgcatgtgctcttattgtaaggtgccaagaaaaactgatttaagttacagcccttgtttaaggggcactgtttcttgtttttgcactgaatcaagtctaaccccaacagccacatcctcctatacctagacatctcatctcaggaagtggtggtgggggtagtcagaaggaaaaataactggacatctttgtgtaaaccataatccacatgtgccgtaaatgatcttcactccttatccgagggcaaattcacaaggatccccaagatccacttttagaagccattctcatccagcagtgagaagcttccaggtaggacagaaaaaagatccagcttcagctgcacacctctgtccccttggatggggaactaagggaaaacgtctgttgtatcactgaagttttttgttttgtttttatacgtgtctgaataaaaatgccaaagtttt

SEQ ID NO: 6687 - DNA, 291 bp, Homo sapiens
  source 1..291: mol_type = unassigned DNA; mol_type = unassigned DNA
ggccagagccccatggtctgacaaacaagaagctagaggaagtagagctggagccagaactagacctagacctagacttggaagcagaggaggacaacctggcaaccaccacactgggctccgccctcagcctaccagttggaacacttaatcggccacgtgggagccagagccttttaagtccatcatctggatacatgcccatgaaccagggtaatcttggggagtcttgccaggtaagttctgttgctgagaggctgggttttaggatcagattgatacgagtagtat

SEQ ID NO: 6688 - DNA, 12136 bp, Homo sapiens
  source 1..12136: mol_type = unassigned DNA; mol_type = unassigned DNA
ggagcgagcaagcgaaggctcacgcggggaaatagctgcacagtccggcccagagcgccaagcgcacacaccgagcacactcccacacgcgcacacacgcgctcacactcgccccctcctcgggccccggccctggacccgcgggcgcggactcggtcgcccgccctgggagtcgccacaccgcgcgcgccgcgcccgcccccctcgcacccccacgcgcgcccggctgggggatctcctccgcgtgcccgaaagggggatatgccatttggacatgtaattgtcagcacgggatctgagacttccaaaaaatgaagccggcgacaggactttgggtctgggtgagccttctcgtggcggcggggaccgtccagcccagcgattctcagtcagtgtgtgcaggaacggagaataaactgagctctctctctgacctggaacagcagtaccgagccttgcgcaagtactatgaaaactgtgaggttgtcatgggcaacctggagataaccagcattgagcacaaccgggacctctccttcctgcggtctgttcgagaagtcacaggctacgtgttagtggctcttaatcagtttcgttacctgcctctggagaatttacgcattattcgtgggacaaaactttatgaggatcgatatgccttggcaatatttttaaactacagaaaagatggaaactttggacttcaagaacttggattaaagaacttgacagaaatcctaaatggtggagtctatgtagaccagaacaaattcctttgttatgcagacaccattcattggcaagatattgttcggaacccatggccttccaacttgactcttgtgtcaacaaatggtagttcaggatgtggacgttgccataagtcctgtactggccgttgctggggacccacagaaaatcattgccagactttgacaaggacggtgtgtgcagaacaatgtgacggcagatgctacggaccttacgtcagtgactgctgccatcgagaatgtgctggaggctgctcaggacctaaggacacagactgctttgcctgcatgaatttcaatgacagtggagcatgtgttactcagtgtccccaaacctttgtctacaatccaaccacctttcaactggagcacaatttcaatgcaaagtacacatatggagcattctgtgtcaagaaatgtccacataactttgtggtagattccagttcttgtgtgcgtgcctgccctagttccaagatggaagtagaagaaaatgggattaaaatgtgtaaaccttgcactgacatttgcccaaaagcttgtgatggcattggcacaggatcattgatgtcagctcagactgtggattccagtaacattgacaaattcataaactgtaccaagatcaatgggaatttgatctttctagtcactggtattcatggggacccttacaatgcaattgaagccatagacccagagaaactgaacgtctttcggacagtcagagagataacaggtttcctgaacatacagtcatggccaccaaacatgactgacttcagtgttttttctaacctggtgaccattggtggaagagtactctatagtggcctgtccttgcttatcctcaagcaacagggcatcacctctctacagttccagtccctgaaggaaatcagcgcaggaaacatctatattactgacaacagcaacctgtgttattatcataccattaactggacaacactcttcagcacaatcaaccagagaatagtaatccgggacaacagaaaagctgaaaattgtactgctgaaggaatggtgtgcaaccatctgtgttccagtgatggctgttggggacctgggccagaccaatgtctgtcgtgtcgccgcttcagtagaggaaggatctgcatagagtcttgtaacctctatgatggtgaatttcgggagtttgagaatggctccatctgtgtggagtgtgacccccagtgtgagaagatggaagatggcctcctcacatgccatggaccgggtcctgacaactgtacaaagtgctctcattttaaagatggcccaaactgtgtggaaaaatgtccagatggcttacagggggcaaacagtttcattttcaagtatgctgatccagatcgggagtgccacccatgccatccaaactgcacccaagggtgtaacggtcccactagtcatgactgcatttactacccatggacgggccattccactttaccacaacatgctagaactcccctgattgcagctggagtaattggtgggctcttcattctggtcattgtgggtctgacatttgctgtttatgttagaaggaagagcatcaaaaagaaaagagccttgagaagattcttggaaacagagttggtggaaccattaactcccagtggcacagcacccaatcaagctcaacttcgtattttgaaagaaactgagctgaagagggtaaaagtccttggctcaggtgcttttggaacggtttataaaggtatttgggtacctgaaggagaaactgtgaagattcctgtggctattaagattcttaatgagacaactggtcccaaggcaaatgtggagttcatggatgaagctctgatcatggcaagtatggatcatccacacctagtccggttgctgggtgtgtgtctgagcccaaccatccagctggttactcaacttatgccccatggctgcctgttggagtatgtccacgagcacaaggataacattggatcacaactgctgcttaactggtgtgtccagatagctaagggaatgatgtacctggaagaaagacgactcgttcatcgggatttggcagcccgtaatgtcttagtgaaatctccaaaccatgtgaaaatcacagattttgggctagccagactcttggaaggagatgaaaaagagtacaatgctgatggaggaaagatgccaattaaatggatggctctggagtgtatacattacaggaaattcacccatcagagtgacgtttggagctatggagttactatatgggaactgatgacctttggaggaaaaccctatgatggaattccaacgcgagaaatccctgatttattagagaaaggagaacgtttgcctcagcctcccatctgcactattgacgtttacatggtcatggtcaaatgttggatgattgatgctgacagtagacctaaatttaaggaactggctgctgagttttcaaggatggctcgagaccctcaaagatacctagttattcagggtgatgatcgtatgaagcttcccagtccaaatgacagcaagttctttcagaatctcttggatgaagaggatttggaagatatgatggatgctgaggagtacttggtccctcaggctttcaacatcccacctcccatctatacttccagagcaagaattgactcgaataggagtgaaattggacacagccctcctcctgcctacacccccatgtcaggaaaccagtttgtataccgagatggaggttttgctgctgaacaaggagtgtctgtgccctacagagccccaactagcacaattccagaagctcctgtggcacagggtgctactgctgagatttttgatgactcctgctgtaatggcaccctacgcaagccagtggcaccccatgtccaagaggacagtagcacccagaggtacagtgctgaccccaccgtgtttgccccagaacggagcccacgaggagagctggatgaggaaggttacatgactcctatgcgagacaaacccaaacaagaatacctgaatccagtggaggagaacccttttgtttctcggagaaaaaatggagaccttcaagcattggataatcccgaatatcacaatgcatccaatggtccacccaaggccgaggatgagtatgtgaatgagccactgtacctcaacacctttgccaacaccttgggaaaagctgagtacctgaagaacaacatactgtcaatgccagagaaggccaagaaagcgtttgacaaccctgactactggaaccacagcctgccacctcggagcacccttcagcacccagactacctgcaggagtacagcacaaaatatttttataaacagaatgggcggatccggcctattgtggcagagaatcctgaatacctctctgagttctccctgaagccaggcactgtgctgccgcctccaccttacagacaccggaatactgtggtgtaagctcagttgtggttttttaggtggagagacacacctgctccaatttccccacccccctctctttctctggtggtcttccttctaccccaaggccagtagttttgacacttcccagtggaagatacagagatgcaatgatagttatgtgcttacctaacttgaacattagagggaaagactgaaagagaaagataggaggaaccacaatgtttcttcatttctctgcatgggttggtcaggagaatgaaacagctagagaaggaccagaaaatgtaaggcaatgctgcctactatcaaactagctgtcactttttttctttttctttttctttctttgtttctttcttcctcttcttttttttttttttttttaaagcagatggttgaaacacccatgctatctgttcctatctgcaggaactgatgtgtgcatatttagcatccctggaaatcataataaagtttccattagaacaaaagaataacattttctataacatatgatggtgtctgaaattgagaatccagtttctttccccagcagtttctgtcctagcaagtaagaatggccaactcaactttcataatttaaaaatctccattaaagttataactagtaattatgttttcaacactttttggtttttttcattttgttttgctctgaccgattcctttatatttgctcccctatttttggctttaatttctaattgcaaagatgtttacatcaaagcttcttcacagaatttaagcaagaaatattttaatatagtgaaatggccactactttaagtatacaatctttaaaataagaaagggaggctaatatttttcatgctatcaaattatcttcaccctcatcctttacatttttcaacatttttttttctccataaatgacactacttgataggccgttggttgtctgaagagtagaagggaaactaagagacagttctctgtggttcaggaaaactactgatactttcaggggtggcccaatgagggaatccattgaactggaagaaacacactggattgggtatgtctacctggcagatactcagaaatgtagtttgcacttaagctgtaattttatttgttctttttctgaactccattttggattttgaatcaagcaatatggaagcaaccagcaaattaactaatttaagtacatttttaaaaaaagagctaagataaagactgtggaaatgccaaaccaagcaaattaggaaccttgcaacggtatccagggactatgatgagaggccagcacattatcttcatatgtcacctttgctacgcaaggaaatttgttcagttcgtatacttcgtaagaaggaatgcgagtaaggattggcttgaattccatggaatttctagtatgagactatttatatgaagtagaaggtaactctttgcacataaattggtataataaaaagaaaaacacaaacattcaaagcttagggataggtccttgggtcaaaagttgtaaataaatgtgaaacatcttctcatgcaattattttattatccaacacactaatcttttgatactttatataattccctttcttcatatactgcatccagtactagaaccatcattattatgtatcattttgaaagaatacctgatgagatgaaggatgagaacaaatgacagagatgagtctccaagtaaagggggcctcacatcaataattaggaaacttagatataagtcgcccttttctgaaaattctaccccaagtcatttagatttttaaaaaatatttctaatgttaaaatattgggaccaaattagaatcaatagtataagattaattaattagagtaaaaatatctattaaggcagagaaagtttagagaaaaaaatccaaagaaatttgtgtttcttcctattctgaacaagtaaatccatccatccatccatccaaacctcctttatctaactgtgtctactaaaagcaccatgttttgtggggaacactcagataaatggaatatcatcctcaacttcaaaattctatgatctaggagatttaattaaaatgacattttaatttttctatgcgttccaacaatcagattgcatagtctcttttgtgaatagctgtcatataatcagttgtactgtaagatatctcctttaaactcatttgggatataagttaaacatccttcaaattgttgatgttgacaaacaggataatttcaataatattattcaaacataaactggtctaggagaatattgcatcactgactaattagcctatctagagtctaacttcaccattaaaccaaaagcagatggtggtccttggccaagaatattggagacattggagttggtttttttctaagctataagaagtgaggcgagctgaaaaagtatggtagagcaggagaagggtttgtgagattccttctagtgaagttcaccctcaaacttttcaggggtaaagacacagagtgattcaggggccacaatctaatagctcagggctctcctatccattcagagaagtctctaggaaaagggatctcatatcagtacttatgaaaaattgaatataagcctccctttctaaataaatctgcatcgagtcatcacagccctctttttggatactataccttgattttttttttctgatttacaatatgcatatggtttctactgggctatagaaagcagaatcactcattttggagaaggaaaaaatgaatagttaaaacaaacttttaactgttaaggtaacagaaatgtatttagtgaatgtctctttcctcctaagaacacaagacttctacatgttgggtaatacctagagatgcatgtaggaataatccaaaatgacccaaatgctttataatagcaccactttataattcttttgaatgatttctgtagtatataattgacttcagttgtttgagtgttttttgttttatttttgtcccccctgggaaaacatatttcagcatgtataagagggagaaaaaaagtttcattccttccagagaataacttatttagtccagtagggtagaattttaaaatgtcagttaaagtcttcaaagtgcttggggggatatcagattccagaggccaattgtagcaattgaaatttgcagaatcaattatgtaaatctgagacaaattagtattaaaattacacggagtatattttttaaatcacccaactttgtagattatacctattttgggcaggtatggaaaaattttgcagttaaatgattgcctaaagaaagtggtaaacaggtgaggaaagatggcctctgatctaggatagatccagaaccacaaagcatctgcaccacaaaaggtgttagactaccaagcagctcctggttttctgcatagtattagtagcacagcttaggatgagaatcctttctccagtaacattcttaaaatagcatgaaaaacaacgcaaaactcaaatttctattaaaacacacaaactaaaatcaagtgattcttttttgtagattagggagaaggactgaatatctaatttaagagaaggaatagtgtttaagtgttatagtgtgtgagctaataccttctaaaggaaagacatggcatgaagattgtgcatacttacaatgctaaggaaaaatcaagaaaaggactgtgtgaggctctgctactagatgaagttggaaggactattaatgtgcttcttgaagtatcaaaaatgaaaagaaaattaaaattgtttaagcctgacagggaaggatgtaaatacaagtttttctagagctctctaacctttatttcaaaactggaattattcatccatctgtaattgttgataatttaactagtatatgtagttcataaggtaatagaaaaggtgatcatgaaagcatgtatataactggacagaaccacgataatgctataagatgtagatttagttaggttatcagatgttaaatgattttaatattattaaataaatcaaactagaaaactaaccacaagtataatgtaacaaagttaaatgcaggatataaaaatgtaggatggattttgcatagtaaaaagataagtttgccatttaaaattgttgtttgttgggtttagctgaaagtaggcatatatggttccacttgggaaaacttgctttaaagcattacaatgaacaattttttctcattctcttattcctttatcactttttaaatgtaaagaaaattgtatttatttatttttttaaataaacaccaccttgcagaatttaataggcaaacatgttacatatgactaagtaagggtcttcaagatgaagtaaagaaaatgtaaatgttctattaccttatgcagagacaaaaaaaaaaaggagtggtgtcatttagctagcaaacaaacaaaatacagttaattggtgatatgtcctttcttttctcactatgccctcttgcctccaaaaatgacaacaaagaatcacaatttttctgataaataaatgctaaaccaagcgtttcaaactattgcattgccattcttttggactttagttattagaatgatgattgttatagggcaaatgagaaatccatgtgcatcagcttctagttgttaaaaaaaccagataaattaacttctactgtatactgtgggcagaggatcctagagctgatcctacaacatcagcttctagttgttaaaaaaaaaaaaagaaacagataaattaacttctactgtatatactgtgggcagaggatcttactgtgcctctgtttgtgtacatggacttcggtgtgtatcagtttgaaggacagccttgccccatgtaaacatataaatgcagattggtatcgcctggttgctatttgcttaagaacaaatattatacagatgagatcaggcataattttaaaagatcattatcagtggagacctcattattactgatattacaatggggccagtttttatacttctgggtagaattaataaaatttttctgatcccagagatctgagttctctctgcagttggaaacaagaagctgttgtgggcattgtgtcgggccaggggcccttgtgtttgtgtgggcaaatatcttttagcagtgtgagctgcttttttcttttcattaaaagtctctctaaaataatagaaatttcagatactcggttcaagtctcactgattttgtagaggtccaaaaatgtaggatctgtcacttttgcaggcccctgcctcacctaattcctggccaggtgacattttgggcagaagtaaatgcttctatagtcacaagctaaaatgactctaagccccaatttcacggggggtattcacatgcttcctctggaaaatactctttgacagtcagctttgcaagtaagtgattaccttgttaggaatcaaagaaaaatgtatttctctctgacctttagaggaaaatagaatccttcccttttttgcccattgacacaactggcactgctctcttccctttctaccaccctggttcaaagtagtcccccgatgctgtcctgttcctttcttaagccatagtggatctctgagatcctacaccccactttgtgaaacactgacttcatctttgccctcgaatgcctgattttttcataagagattctagcaatttggacactgtttaagtgaactatcaaactaccgcatagagaatatttaagctattaaaattatggtttcccatgaagatcaattctctgtgtccttccctataggaatttgagacgagttagccctgtgatgaatcttgaaactcacatatgtccacatacacttggtagaacttcgatttaatctttacataaaagctgtacatataaccaagaagttatttttgccagtaaattaacttatttgctttattcatcttatttggttcctaatcgtaaatattttgtagctgctgtaaatttttttctcccaaatgaggagtcttattatcataaaggtaaaggctattcagctttgataaccacctgcaattcttttttggatcattcatccatctaacaaatacataatgaggacagttcatgttaatgaaaatccatgttgtttaatagaatgccatcctttacctacttttgctctttatggacgtttttcttttcatgctctagtgagctttccctatatcatgagaagtggttatatttgtgcaaatatacaaatataggaaaacaaagattcatacctgtaggcaatagtctaacttgtccaaaccactttgcctttactgctatttttatccccaatgcgtagatatttcccccaggcctatagcctttgtgaaggaaagcaaatcatacctcctgtatattgacacgaatctggttttcaaatgtcatttccagattttttagttaattgggggttgtccttttcccttaatgtgagagtcattttcctgtatatttctggatctctcaggggctgggaggggggagtgaggggactacaaccatagcactccaagaacccttttgggattactccagtaatcaactacgaaagttattttctaaatgtagatatgtaaggtgttcttttaaagtaaggtactttgaaatatgtagcataaactggtactgctgttaaatgggtcgattattaaacggagcagctgtgtgagggcagctaactttgaatgcctgtctccctggctggtgtgtctccttctcatgttgagagcaccagggattgcgtggctgcatgctgaaaccgcattttcccatggtgtatgactagttcatctctttcttgagcaccattacaagaagatcaaatgaaaatgagatcaatgtggaagacaattcatagcacaaaaaaagtcatcttaaatctactctcaaacattcatcttatacatgcatcaaagtaatttactgacatcagtttgggtgagagagggagtcactttactgaaaaggcagaggcttaaggtgtatacatttgtactcacttccttattttcttaacttgtaagcagaaaacaagccctctctcttgtgaagtatcttcaaaggattggggtgcaaaaataccttgctggtaagccatcaatgttttatttaaatccctgcattcaaagttagctgcctttttgaaataaacaaacaaaaaatactactgtatgtttgaaaatgtgaatagtatttttatagcttgttaaagacatggctagttgcatttgtaaataagtataatgttgctttgattttcttttgtggacatctttatttggaacataattgtctttagggttgatttgtatataagtaattggcctgtgattgtttcttttttggttggaagttatcattttgacattacttgtgattctgtgttcagcactattgtgatgtgttcaacctctgcactcgcttacacaataggatatgccaattgtgtgtggtgtaatgttattttgatttttttccatgttattgatgaaggatcatgcacctaacacatactaacttttttaatgttaggcatatttttagtatactttctcttattctttcttctcctccaaccttttacccatcctccttcctttccctcattcctgttgttatttgagaatgagggagaaacagtattttacatttatgtaattaggcttttccgttagttctcaaggatcctcttttggctcttgggaaagaattgtacctgtacaaggcaattatagaatgcgaactgctttgcctcattccatactgatcatcccagctgaacaatttgaaaactgttctgcctttttgttacatgaatctgtcagaaatatatttttaatttaatataaatgaaattcaataaaatatgaaacaaacgtt

SEQ ID NO: 6689 - DNA, 12084 bp, Homo sapiens
  source 1..12084: mol_type = unassigned DNA; mol_type = unassigned DNA
ggagcgagcaagcgaaggctcacgcggggaaatagctgcacagtccggcccagagcgccaagcgcacacaccgagcacactcccacacgcgcacacacgcgctcacactcgccccctcctcgggccccggccctggacccgcgggcgcggactcggtcgcccgccctgggagtcgccacaccgcgcgcgccgcgcccgcccccctcgcacccccacgcgcgcccggctgggggatctcctccgcgtgcccgaaagggggatatgccatttggacatgtaattgtcagcacgggatctgagacttccaaaaaatgaagccggcgacaggactttgggtctgggtgagccttctcgtggcggcggggaccgtccagcccagcgattctcagtcagtgtgtgcaggaacggagaataaactgagctctctctctgacctggaacagcagtaccgagccttgcgcaagtactatgaaaactgtgaggttgtcatgggcaacctggagataaccagcattgagcacaaccgggacctctccttcctgcggtctgttcgagaagtcacaggctacgtgttagtggctcttaatcagtttcgttacctgcctctggagaatttacgcattattcgtgggacaaaactttatgaggatcgatatgccttggcaatatttttaaactacagaaaagatggaaactttggacttcaagaacttggattaaagaacttgacagaaatcctaaatggtggagtctatgtagaccagaacaaattcctttgttatgcagacaccattcattggcaagatattgttcggaacccatggccttccaacttgactcttgtgtcaacaaatggtagttcaggatgtggacgttgccataagtcctgtactggccgttgctggggacccacagaaaatcattgccagactttgacaaggacggtgtgtgcagaacaatgtgacggcagatgctacggaccttacgtcagtgactgctgccatcgagaatgtgctggaggctgctcaggacctaaggacacagactgctttgcctgcatgaatttcaatgacagtggagcatgtgttactcagtgtccccaaacctttgtctacaatccaaccacctttcaactggagcacaatttcaatgcaaagtacacatatggagcattctgtgtcaagaaatgtccacataactttgtggtagattccagttcttgtgtgcgtgcctgccctagttccaagatggaagtagaagaaaatgggattaaaatgtgtaaaccttgcactgacatttgcccaaaagcttgtgatggcattggcacaggatcattgatgtcagctcagactgtggattccagtaacattgacaaattcataaactgtaccaagatcaatgggaatttgatctttctagtcactggtattcatggggacccttacaatgcaattgaagccatagacccagagaaactgaacgtctttcggacagtcagagagataacaggtttcctgaacatacagtcatggccaccaaacatgactgacttcagtgttttttctaacctggtgaccattggtggaagagtactctatagtggcctgtccttgcttatcctcaagcaacagggcatcacctctctacagttccagtccctgaaggaaatcagcgcaggaaacatctatattactgacaacagcaacctgtgttattatcataccattaactggacaacactcttcagcacaatcaaccagagaatagtaatccgggacaacagaaaagctgaaaattgtactgctgaaggaatggtgtgcaaccatctgtgttccagtgatggctgttggggacctgggccagaccaatgtctgtcgtgtcgccgcttcagtagaggaaggatctgcatagagtcttgtaacctctatgatggtgaatttcgggagtttgagaatggctccatctgtgtggagtgtgacccccagtgtgagaagatggaagatggcctcctcacatgccatggaccgggtcctgacaactgtacaaagtgctctcattttaaagatggcccaaactgtgtggaaaaatgtccagatggcttacagggggcaaacagtttcattttcaagtatgctgatccagatcgggagtgccacccatgccatccaaactgcacccaagggtgtaacggtcccactagtcatgactgcatttactacccatggacgggccattccactttaccacaacatgctagaactcccctgattgcagctggagtaattggtgggctcttcattctggtcattgtgggtctgacatttgctgtttatgttagaaggaagagcatcaaaaagaaaagagccttgagaagattcttggaaacagagttggtggaaccattaactcccagtggcacagcacccaatcaagctcaacttcgtattttgaaagaaactgagctgaagagggtaaaagtccttggctcaggtgcttttggaacggtttataaaggtatttgggtacctgaaggagaaactgtgaagattcctgtggctattaagattcttaatgagacaactggtcccaaggcaaatgtggagttcatggatgaagctctgatcatggcaagtatggatcatccacacctagtccggttgctgggtgtgtgtctgagcccaaccatccagctggttactcaacttatgccccatggctgcctgttggagtatgtccacgagcacaaggataacattggatcacaactgctgcttaactggtgtgtccagatagctaagggaatgatgtacctggaagaaagacgactcgttcatcgggatttggcagcccgtaatgtcttagtgaaatctccaaaccatgtgaaaatcacagattttgggctagccagactcttggaaggagatgaaaaagagtacaatgctgatggaggaaagatgccaattaaatggatggctctggagtgtatacattacaggaaattcacccatcagagtgacgtttggagctatggagttactatatgggaactgatgacctttggaggaaaaccctatgatggaattccaacgcgagaaatccctgatttattagagaaaggagaacgtttgcctcagcctcccatctgcactattgacgtttacatggtcatggtcaaatgttggatgattgatgctgacagtagacctaaatttaaggaactggctgctgagttttcaaggatggctcgagaccctcaaagatacctagttattcagggtgatgatcgtatgaagcttcccagtccaaatgacagcaagttctttcagaatctcttggatgaagaggatttggaagatatgatggatgctgaggagtacttggtccctcaggctttcaacatcccacctcccatctatacttccagagcaagaattgactcgaataggaaccagtttgtataccgagatggaggttttgctgctgaacaaggagtgtctgtgccctacagagccccaactagcacaattccagaagctcctgtggcacagggtgctactgctgagatttttgatgactcctgctgtaatggcaccctacgcaagccagtggcaccccatgtccaagaggacagtagcacccagaggtacagtgctgaccccaccgtgtttgccccagaacggagcccacgaggagagctggatgaggaaggttacatgactcctatgcgagacaaacccaaacaagaatacctgaatccagtggaggagaacccttttgtttctcggagaaaaaatggagaccttcaagcattggataatcccgaatatcacaatgcatccaatggtccacccaaggccgaggatgagtatgtgaatgagccactgtacctcaacacctttgccaacaccttgggaaaagctgagtacctgaagaacaacatactgtcaatgccagagaaggccaagaaagcgtttgacaaccctgactactggaaccacagcctgccacctcggagcacccttcagcacccagactacctgcaggagtacagcacaaaatatttttataaacagaatgggcggatccggcctattgtggcagagaatcctgaatacctctctgagttctccctgaagccaggcactgtgctgccgcctccaccttacagacaccggaatactgtggtgtaagctcagttgtggttttttaggtggagagacacacctgctccaatttccccacccccctctctttctctggtggtcttccttctaccccaaggccagtagttttgacacttcccagtggaagatacagagatgcaatgatagttatgtgcttacctaacttgaacattagagggaaagactgaaagagaaagataggaggaaccacaatgtttcttcatttctctgcatgggttggtcaggagaatgaaacagctagagaaggaccagaaaatgtaaggcaatgctgcctactatcaaactagctgtcactttttttctttttctttttctttctttgtttctttcttcctcttcttttttttttttttttttaaagcagatggttgaaacacccatgctatctgttcctatctgcaggaactgatgtgtgcatatttagcatccctggaaatcataataaagtttccattagaacaaaagaataacattttctataacatatgatggtgtctgaaattgagaatccagtttctttccccagcagtttctgtcctagcaagtaagaatggccaactcaactttcataatttaaaaatctccattaaagttataactagtaattatgttttcaacactttttggtttttttcattttgttttgctctgaccgattcctttatatttgctcccctatttttggctttaatttctaattgcaaagatgtttacatcaaagcttcttcacagaatttaagcaagaaatattttaatatagtgaaatggccactactttaagtatacaatctttaaaataagaaagggaggctaatatttttcatgctatcaaattatcttcaccctcatcctttacatttttcaacatttttttttctccataaatgacactacttgataggccgttggttgtctgaagagtagaagggaaactaagagacagttctctgtggttcaggaaaactactgatactttcaggggtggcccaatgagggaatccattgaactggaagaaacacactggattgggtatgtctacctggcagatactcagaaatgtagtttgcacttaagctgtaattttatttgttctttttctgaactccattttggattttgaatcaagcaatatggaagcaaccagcaaattaactaatttaagtacatttttaaaaaaagagctaagataaagactgtggaaatgccaaaccaagcaaattaggaaccttgcaacggtatccagggactatgatgagaggccagcacattatcttcatatgtcacctttgctacgcaaggaaatttgttcagttcgtatacttcgtaagaaggaatgcgagtaaggattggcttgaattccatggaatttctagtatgagactatttatatgaagtagaaggtaactctttgcacataaattggtataataaaaagaaaaacacaaacattcaaagcttagggataggtccttgggtcaaaagttgtaaataaatgtgaaacatcttctcatgcaattattttattatccaacacactaatcttttgatactttatataattccctttcttcatatactgcatccagtactagaaccatcattattatgtatcattttgaaagaatacctgatgagatgaaggatgagaacaaatgacagagatgagtctccaagtaaagggggcctcacatcaataattaggaaacttagatataagtcgcccttttctgaaaattctaccccaagtcatttagatttttaaaaaatatttctaatgttaaaatattgggaccaaattagaatcaatagtataagattaattaattagagtaaaaatatctattaaggcagagaaagtttagagaaaaaaatccaaagaaatttgtgtttcttcctattctgaacaagtaaatccatccatccatccatccaaacctcctttatctaactgtgtctactaaaagcaccatgttttgtggggaacactcagataaatggaatatcatcctcaacttcaaaattctatgatctaggagatttaattaaaatgacattttaatttttctatgcgttccaacaatcagattgcatagtctcttttgtgaatagctgtcatataatcagttgtactgtaagatatctcctttaaactcatttgggatataagttaaacatccttcaaattgttgatgttgacaaacaggataatttcaataatattattcaaacataaactggtctaggagaatattgcatcactgactaattagcctatctagagtctaacttcaccattaaaccaaaagcagatggtggtccttggccaagaatattggagacattggagttggtttttttctaagctataagaagtgaggcgagctgaaaaagtatggtagagcaggagaagggtttgtgagattccttctagtgaagttcaccctcaaacttttcaggggtaaagacacagagtgattcaggggccacaatctaatagctcagggctctcctatccattcagagaagtctctaggaaaagggatctcatatcagtacttatgaaaaattgaatataagcctccctttctaaataaatctgcatcgagtcatcacagccctctttttggatactataccttgattttttttttctgatttacaatatgcatatggtttctactgggctatagaaagcagaatcactcattttggagaaggaaaaaatgaatagttaaaacaaacttttaactgttaaggtaacagaaatgtatttagtgaatgtctctttcctcctaagaacacaagacttctacatgttgggtaatacctagagatgcatgtaggaataatccaaaatgacccaaatgctttataatagcaccactttataattcttttgaatgatttctgtagtatataattgacttcagttgtttgagtgttttttgttttatttttgtcccccctgggaaaacatatttcagcatgtataagagggagaaaaaaagtttcattccttccagagaataacttatttagtccagtagggtagaattttaaaatgtcagttaaagtcttcaaagtgcttggggggatatcagattccagaggccaattgtagcaattgaaatttgcagaatcaattatgtaaatctgagacaaattagtattaaaattacacggagtatattttttaaatcacccaactttgtagattatacctattttgggcaggtatggaaaaattttgcagttaaatgattgcctaaagaaagtggtaaacaggtgaggaaagatggcctctgatctaggatagatccagaaccacaaagcatctgcaccacaaaaggtgttagactaccaagcagctcctggttttctgcatagtattagtagcacagcttaggatgagaatcctttctccagtaacattcttaaaatagcatgaaaaacaacgcaaaactcaaatttctattaaaacacacaaactaaaatcaagtgattcttttttgtagattagggagaaggactgaatatctaatttaagagaaggaatagtgtttaagtgttatagtgtgtgagctaataccttctaaaggaaagacatggcatgaagattgtgcatacttacaatgctaaggaaaaatcaagaaaaggactgtgtgaggctctgctactagatgaagttggaaggactattaatgtgcttcttgaagtatcaaaaatgaaaagaaaattaaaattgtttaagcctgacagggaaggatgtaaatacaagtttttctagagctctctaacctttatttcaaaactggaattattcatccatctgtaattgttgataatttaactagtatatgtagttcataaggtaatagaaaaggtgatcatgaaagcatgtatataactggacagaaccacgataatgctataagatgtagatttagttaggttatcagatgttaaatgattttaatattattaaataaatcaaactagaaaactaaccacaagtataatgtaacaaagttaaatgcaggatataaaaatgtaggatggattttgcatagtaaaaagataagtttgccatttaaaattgttgtttgttgggtttagctgaaagtaggcatatatggttccacttgggaaaacttgctttaaagcattacaatgaacaattttttctcattctcttattcctttatcactttttaaatgtaaagaaaattgtatttatttatttttttaaataaacaccaccttgcagaatttaataggcaaacatgttacatatgactaagtaagggtcttcaagatgaagtaaagaaaatgtaaatgttctattaccttatgcagagacaaaaaaaaaaaggagtggtgtcatttagctagcaaacaaacaaaatacagttaattggtgatatgtcctttcttttctcactatgccctcttgcctccaaaaatgacaacaaagaatcacaatttttctgataaataaatgctaaaccaagcgtttcaaactattgcattgccattcttttggactttagttattagaatgatgattgttatagggcaaatgagaaatccatgtgcatcagcttctagttgttaaaaaaaccagataaattaacttctactgtatactgtgggcagaggatcctagagctgatcctacaacatcagcttctagttgttaaaaaaaaaaaaagaaacagataaattaacttctactgtatatactgtgggcagaggatcttactgtgcctctgtttgtgtacatggacttcggtgtgtatcagtttgaaggacagccttgccccatgtaaacatataaatgcagattggtatcgcctggttgctatttgcttaagaacaaatattatacagatgagatcaggcataattttaaaagatcattatcagtggagacctcattattactgatattacaatggggccagtttttatacttctgggtagaattaataaaatttttctgatcccagagatctgagttctctctgcagttggaaacaagaagctgttgtgggcattgtgtcgggccaggggcccttgtgtttgtgtgggcaaatatcttttagcagtgtgagctgcttttttcttttcattaaaagtctctctaaaataatagaaatttcagatactcggttcaagtctcactgattttgtagaggtccaaaaatgtaggatctgtcacttttgcaggcccctgcctcacctaattcctggccaggtgacattttgggcagaagtaaatgcttctatagtcacaagctaaaatgactctaagccccaatttcacggggggtattcacatgcttcctctggaaaatactctttgacagtcagctttgcaagtaagtgattaccttgttaggaatcaaagaaaaatgtatttctctctgacctttagaggaaaatagaatccttcccttttttgcccattgacacaactggcactgctctcttccctttctaccaccctggttcaaagtagtcccccgatgctgtcctgttcctttcttaagccatagtggatctctgagatcctacaccccactttgtgaaacactgacttcatctttgccctcgaatgcctgattttttcataagagattctagcaatttggacactgtttaagtgaactatcaaactaccgcatagagaatatttaagctattaaaattatggtttcccatgaagatcaattctctgtgtccttccctataggaatttgagacgagttagccctgtgatgaatcttgaaactcacatatgtccacatacacttggtagaacttcgatttaatctttacataaaagctgtacatataaccaagaagttatttttgccagtaaattaacttatttgctttattcatcttatttggttcctaatcgtaaatattttgtagctgctgtaaatttttttctcccaaatgaggagtcttattatcataaaggtaaaggctattcagctttgataaccacctgcaattcttttttggatcattcatccatctaacaaatacataatgaggacagttcatgttaatgaaaatccatgttgtttaatagaatgccatcctttacctacttttgctctttatggacgtttttcttttcatgctctagtgagctttccctatatcatgagaagtggttatatttgtgcaaatatacaaatataggaaaacaaagattcatacctgtaggcaatagtctaacttgtccaaaccactttgcctttactgctatttttatccccaatgcgtagatatttcccccaggcctatagcctttgtgaaggaaagcaaatcatacctcctgtatattgacacgaatctggttttcaaatgtcatttccagattttttagttaattgggggttgtccttttcccttaatgtgagagtcattttcctgtatatttctggatctctcaggggctgggaggggggagtgaggggactacaaccatagcactccaagaacccttttgggattactccagtaatcaactacgaaagttattttctaaatgtagatatgtaaggtgttcttttaaagtaaggtactttgaaatatgtagcataaactggtactgctgttaaatgggtcgattattaaacggagcagctgtgtgagggcagctaactttgaatgcctgtctccctggctggtgtgtctccttctcatgttgagagcaccagggattgcgtggctgcatgctgaaaccgcattttcccatggtgtatgactagttcatctctttcttgagcaccattacaagaagatcaaatgaaaatgagatcaatgtggaagacaattcatagcacaaaaaaagtcatcttaaatctactctcaaacattcatcttatacatgcatcaaagtaatttactgacatcagtttgggtgagagagggagtcactttactgaaaaggcagaggcttaaggtgtatacatttgtactcacttccttattttcttaacttgtaagcagaaaacaagccctctctcttgtgaagtatcttcaaaggattggggtgcaaaaataccttgctggtaagccatcaatgttttatttaaatccctgcattcaaagttagctgcctttttgaaataaacaaacaaaaaatactactgtatgtttgaaaatgtgaatagtatttttatagcttgttaaagacatggctagttgcatttgtaaataagtataatgttgctttgattttcttttgtggacatctttatttggaacataattgtctttagggttgatttgtatataagtaattggcctgtgattgtttcttttttggttggaagttatcattttgacattacttgtgattctgtgttcagcactattgtgatgtgttcaacctctgcactcgcttacacaataggatatgccaattgtgtgtggtgtaatgttattttgatttttttccatgttattgatgaaggatcatgcacctaacacatactaacttttttaatgttaggcatatttttagtatactttctcttattctttcttctcctccaaccttttacccatcctccttcctttccctcattcctgttgttatttgagaatgagggagaaacagtattttacatttatgtaattaggcttttccgttagttctcaaggatcctcttttggctcttgggaaagaattgtacctgtacaaggcaattatagaatgcgaactgctttgcctcattccatactgatcatcccagctgaacaatttgaaaactgttctgcctttttgttacatgaatctgtcagaaatatatttttaatttaatataaatgaaattcaataaaatatgaaacaaa

SEQ ID NO: 6690 - DNA, 2680 bp, Homo sapiens
  source 1..2680: mol_type = unassigned DNA; mol_type = unassigned DNA
atatgccatttggacatgtaattgtcagcacgggatctgagacttccaaaaaatgaagccggcgacaggactttgggtctgggtgagccttctcgtggcggcggggaccgtccagcccagcgattctcagtcagtgtgtgcaggaacggagaataaactgagctctctctctgacctggaacagcagtaccgagccttgcgcaagtactatgaaaactgtgaggttgtcatgggcaacctggagataaccagcattgagcacaaccgggacctctccttcctgcggtctgttcgagaagtcacaggctacgtgttagtggctcttaatcagtttcgttacctgcctctggagaatttacgcattattcgtgggacaaaactttatgaggatcgatatgccttggcaatatttttaaactacagaaaagatggaaactttggacttcaagaacttggattaaagaacttgacagaaatcctaaatggtggagtctatgtagaccagaacaaattcctttgttatgcagacaccattcattggcaagatattgttcggaacccatggccttccaacttgactcttgtgtcaacaaatggtagttcaggatgtggacgttgccataagtcctgtactggccgttgctggggacccacagaaaatcattgccagactttgacaaggacggtgtgtgcagaacaatgtgacggcagatgctacggaccttacgtcagtgactgctgccatcgagaatgtgctggaggctgctcaggacctaaggacacagactgctttgcctgcatgaatttcaatgacagtggagcatgtgttactcagtgtccccaaacctttgtctacaatccaaccacctttcaactggagcacaatttcaatgcaaagtacacatatggagcattctgtgtcaagaaatgtccacataactttgtggtagattccagttcttgtgtgcgtgcctgccctagttccaagatggaagtagaagaaaatgggattaaaatgtgtaaaccttgcactgacatttgcccaaaagcttgtgatggcattggcacaggatcattgatgtcagctcagactgtggattccagtaacattgacaaattcataaactgtaccaagatcaatgggaatttgatctttctagtcactggtattcatggggacccttacaatgcaattgaagccatagacccagagaaactgaacgtctttcggacagtcagagagataacaggtttcctgaacatacagtcatggccaccaaacatgactgacttcagtgttttttctaacctggtgaccattggtggaagagtactctatagtggcctgtccttgcttatcctcaagcaacagggcatcacctctctacagttccagtccctgaaggaaatcagcgcaggaaacatctatattactgacaacagcaacctgtgttattatcataccattaactggacaacactcttcagcacaatcaaccagagaatagtaatccgggacaacagaaaagctgaaaattgtactgctgaaggaatggtgtgcaaccatctgtgttccagtgatggctgttggggacctgggccagaccaatgtctgtcgtgtcgccgcttcagtagaggaaggatctgcatagagtcttgtaacctctatgatggtgaatttcgggagtttgagaatggctccatctgtgtggagtgtgacccccagtgtgagaagatggaagatggcctcctcacatgccatggaccgggtcctgacaactgtacaaagtgctctcattttaaagatggcccaaactgtgtggaaaaatgtccagatggcttacagggggcaaacagtttcattttcaagtatgctgatccagatcgggagtgccacccatgccatccaaactgcacccaagggtgtaacggtcccactagtcatgactgcatttactacccatggacgggccattccactttaccacaacatgctagaactcccctgattgcagctggagtaattggtgggctcttcattctggtcattgtgggtctgacatttgctgtttatgttagaaggaagagcatcaaaaagaaaagagccttgagaagattcttggaaacagagttggtggaaccattaactcccagtggcacagcacccaatcaagctcaacttcgtattttgaaagaaactgagctgaagagggtaaaagtccttggctcaggtgcttttggaacggtttataaaggtatttgggtacctgaaggagaaactgtgaagattcctgtggctattaagattcttaatgagacaactggtcccaaggcaaatgtggagttcatggatgaagctctgatcatggcaagtatggatcatccacacctagtccggttgctgggtgtgtgtctgagcccaaccatccagctggttactcaacttatgccccatggctgcctgttggagtatgtccacgagcacaaggataacattggatcacaactgctgcttaactggtgtgtccagatagctaaggtaagtgcctgtcaatttctatggaaattacatttttaggttaatatttcctaacctggaacagttttcatattgaaaatatgttgtcttcccatttaaataaaataaagtatatttgctgcaatgaaagatacataacag

SEQ ID NO: 6691 - DNA, 2194 bp, Homo sapiens
  source 1..2194: mol_type = unassigned DNA; mol_type = unassigned DNA
tgaagccggcgacaggactttgggtctgggtgagccttctcgtggcggcggggaccgtccagcccagcgattctcagtcagtgtgtgcaggaacggagaataaactgagctctctctctgacctggaacagcagtaccgagccttgcgcaagtactatgaaaactgtgaggttgtcatgggcaacctggagataaccagcattgagcacaaccgggacctctccttcctgcggtctgttcgagaagtcacaggctacgtgttagtggctcttaatcagtttcgttacctgcctctggagaatttacgcattattcgtgggacaaaactttatgaggatcgatatgccttggcaatatttttaaactacagaaaagatggaaactttggacttcaagaacttggattaaagaacttgacagaaatcctaaatggtggagtctatgtagaccagaacaaattcctttgttatgcagacaccattcattggcaagatattgttcggaacccatggccttccaacttgactcttgtgtcaacaaatggtagttcaggatgtggacgttgccataagtcctgtactggccgttgctggggacccacagaaaatcattgccagactttgacaaggacggtgtgtgcagaacaatgtgacggcagatgctacggaccttacgtcagtgactgctgccatcgagaatgtgctggaggctgctcaggacctaaggacacagactgctttgcctgcatgaatttcaatgacagtggagcatgtgttactcagtgtccccaaacctttgtctacaatccaaccacctttcaactggagcacaatttcaatgcaaagtacacatatggagcattctgtgtcaagaaatgtccacataactttgtggtagattccagttcttgtgtgcgtgcctgccctagttccaagatggaagtagaagaaaatgggattaaaatgtgtaaaccttgcactgacatttgcccaaaagcttgtgatggcattggcacaggatcattgatgtcagctcagactgtggattccagtaacattgacaaattcataaactgtaccaagatcaatgggaatttgatctttctagtcactggtattcatggggacccttacaatgcaattgaagccatagacccagagaaactgaacgtctttcggacagtcagagagataacaggtttcctgaacatacagtcatggccaccaaacatgactgacttcagtgttttttctaacctggtgaccattggtggaagagtactctatagtggcctgtccttgcttatcctcaagcaacagggcatcacctctctacagttccagtccctgaaggaaatcagcgcaggaaacatctatattactgacaacagcaacctgtgttattatcataccattaactggacaacactcttcagcacaatcaaccagagaatagtaatccgggacaacagaaaagctgaaaattgtactgctgaaggaatggtgtgcaaccatctgtgttccagtgatggctgttggggacctgggccagaccaatgtctgtcgtgtcgccgcttcagtagaggaaggatctgcatagagtcttgtaacctctatgatggtgaatttcgggagtttgagaatggctccatctgtgtggagtgtgacccccagtgtgagaagatggaagatggcctcctcacatgccatggaccgggtcctgacaactgtacaaagtgctctcattttaaagatggcccaaactgtgtggaaaaatgtccagatggcttacagggggcaaacagtttcattttcaagtatgctgatccagatcgggagtgccacccatgccatccaaactgcacccaagggtgcataggctcaagtattgaagactgcatcggcctgatggatagaactcccctgattgcagctggagtaattggtgggctcttcattctggtcattgtgggtctgacatttgctgtttatgttagaaggaagagcatcaaaaagaaaagagccttgagaagattcttggaaacagagttggtggaaccattaactcccagtggcacagcacccaatcaagctcaacttcgtattttgaaagaaactgagctgaagagggtaaaagtccttggctcaggtgcttttggaacggtttataaaggtatttgggtacctgaaggaga

SEQ ID NO: 6692 - DNA, 309 bp, Homo sapiens
  source 1..309: mol_type = unassigned DNA; mol_type = unassigned DNA
tgccacccatgccatccaaactgcacccaagggtgcataggctcaagtattgaagactgcatcggcctgatggataggtgtaacggtcccactagtcatgactgcatttactacccatggacgggccattccactttaccacaacatgctaggtaacatctaccatgtttccattttgtcgctcaaatcctttcctagttatcatgaacaaaaagtactaaccagttgggttaaatttataatatattgtaactcataatatatcaaattggaaagttttgaaagaggcataaaacactttccttctca

SEQ ID NO: 6693 - DNA, 582 bp, Homo sapiens
  source 1..582: mol_type = unassigned DNA; mol_type = unassigned DNA
aattaatgactctataaaaaagaacctagagagatcccttgccccttctgctgtgtgaaaacatagcaagacactggcctcaaggagtgggtcctcacaagacactcaatttgctgacaccttgatattggacttcccagcctccaaaatttctgttcgagaagtcacaggctacgtgttagtggctcttaatcagtttcgttacctgcctctggagaatttacgcattattcgtgggacaaaactttatgaggatcgatatgccttggcaatatttttaaactacagaaaagatggaaactttggacttcaagaacttggattaaagaacttgacagaaatcctaaatggtggagtctatgtagaccagaacaaattcctttgttatgcagacaccattcattggcaagatattgttcggaacccatggccttccaacttgactcttgtgtcaacaaatggtagttcaggatgtggacgttgccataagtcctgtactggccgttgctggggacccacagaaaatcattgccagactttgacaaggacggtgtgtgcagaacaatgtgacggcagatgcta

SEQ ID NO: 6694 - DNA, 569 bp, Homo sapiens
  source 1..569: mol_type = unassigned DNA; mol_type = unassigned DNA
atttgttctcctggttccctctctgtgagatcttcttaatctgtgtctttcaagggaaggtcattgctgctctgaaggaagctgcattttgtgtgcaggaacggagaataaactgagctctctctctgacctggaacagcagtaccgagccttgcgcaagtactatgaaaactgtgaggttgtcatgggcaacctggagataaccagcattgagcacaaccgggacctctccttcctgcggtctgttcgagaagtcacaggctacgtgttagtggctcttaatcagtttcgttacctgcctctggagaatttacgcattattcgtgggacaaaactttatgaggatcgatatgccttggcaatatttttaaactacagaaaagatggaaactttggacttcaagaacttggattaaagaacttgacagaaatcctaaatggtggagtctatgtagaccagaacaaattcctttgttatgcagacaccattcattggcaagatattgttcggaacccatggccttccaacttgactcttgtgtcaacaaatggtagttcaggatgtggac

SEQ ID NO: 6695 - DNA, 444 bp, Homo sapiens
  source 1..444: mol_type = unassigned DNA; mol_type = unassigned DNA
atatggtcataacaaatgggattaagtttatctccttgctatatatttctgtggaatctatgccttcctactctctgtgattagcacatgtaatttgggaatataaaagtgaaaatgttcatcatgtgtgcaggaacggagaataaactgagctctctctctgacctggaacagcagtaccgagccttgcgcaagtactatgaaaactgtgaggttgtcatgggcaacctggagataaccagcattgagcacaaccgggacctctccttcctgcgggtaaagctgtggctttctttctcttctttgtgaatggacagtggcgtcatgatgcatacaggcagacctgtgtgctgatacctggaaggggtgctcttctgcctggcaggcactgtgactataggcaaaagataagagatagcgaaacgcacccaggaaaagaacaag

SEQ ID NO: 6696 - DNA, 11699 bp, Homo sapiens
  source 1..11699: mol_type = unassigned DNA; mol_type = unassigned DNA
gcagtgtgtgcaggaacggagaataaactgagctctctctctgacctggaacagcagtaccgagccttgcgcaagtactatgaaaactgtgaggttgtcatgggcaacctggagataaccagcattgagcacaaccgggacctctccttcctgcggtctgttcgagaagtcacaggctacgtgttagtggctcttaatcagtttcgttacctgcctctggagaatttacgcattattcgtgggacaaaactttatgaggatcgatatgccttggcaatatttttaaactacagaaaagatggaaactttggacttcaagaacttggattaaagaacttgacagaaatcctaaatggtggagtctatgtagaccagaacaaattcctttgttatgcagacaccattcattggcaagatattgttcggaacccatggccttccaacttgactcttgtgtcaacaaatggtagttcaggatgtggacgttgccataagtcctgtactggccgttgctggggacccacagaaaatcattgccagactttgacaaggacggtgtgtgcagaacaatgtgacggcagatgctacggaccttacgtcagtgactgctgccatcgagaatgtgctggaggctgctcaggacctaaggacacagactgctttgcctgcatgaatttcaatgacagtggagcatgtgttactcagtgtccccaaacctttgtctacaatccaaccacctttcaactggagcacaatttcaatgcaaagtacacatatggagcattctgtgtcaagaaatgtccacataactttgtggtagattccagttcttgtgtgcgtgcctgccctagttccaagatggaagtagaagaaaatgggattaaaatgtgtaaaccttgcactgacatttgcccaaaagcttgtgatggcattggcacaggatcattgatgtcagctcagactgtggattccagtaacattgacaaattcataaactgtaccaagatcaatgggaatttgatctttctagtcactggtattcatggggacccttacaatgcaattgaagccatagacccagagaaactgaacgtctttcggacagtcagagagataacaggtttcctgaacatacagtcatggccaccaaacatgactgacttcagtgttttttctaacctggtgaccattggtggaagagtactctatagtggcctgtccttgcttatcctcaagcaacagggcatcacctctctacagttccagtccctgaaggaaatcagcgcaggaaacatctatattactgacaacagcaacctgtgttattatcataccattaactggacaacactcttcagcacaatcaaccagagaatagtaatccgggacaacagaaaagctgaaaattgtactgctgaaggaatggtgtgcaaccatctgtgttccagtgatggctgttggggacctgggccagaccaatgtctgtcgtgtcgccgcttcagtagaggaaggatctgcatagagtcttgtaacctctatgatggtgaatttcgggagtttgagaatggctccatctgtgtggagtgtgacccccagtgtgagaagatggaagatggcctcctcacatgccatggaccgggtcctgacaactgtacaaagtgctctcattttaaagatggcccaaactgtgtggaaaaatgtccagatggcttacagggggcaaacagtttcattttcaagtatgctgatccagatcgggagtgccacccatgccatccaaactgcacccaagggtgtaacggtcccactagtcatgactgcatttactacccatggacgggccattccactttaccacaacatgctagaactcccctgattgcagctggagtaattggtgggctcttcattctggtcattgtgggtctgacatttgctgtttatgttagaaggaagagcatcaaaaagaaaagagccttgagaagattcttggaaacagagttggtggaaccattaactcccagtggcacagcacccaatcaagctcaacttcgtattttgaaagaaactgagctgaagagggtaaaagtccttggctcaggtgcttttggaacggtttataaaggtatttgggtacctgaaggagaaactgtgaagattcctgtggctattaagattcttaatgagacaactggtcccaaggcaaatgtggagttcatggatgaagctctgatcatggcaagtatggatcatccacacctagtccggttgctgggtgtgtgtctgagcccaaccatccagctggttactcaacttatgccccatggctgcctgttggagtatgtccacgagcacaaggataacattggatcacaactgctgcttaactggtgtgtccagatagctaagggaatgatgtacctggaagaaagacgactcgttcatcgggatttggcagcccgtaatgtcttagtgaaatctccaaaccatgtgaaaatcacagattttgggctagccagactcttggaaggagatgaaaaagagtacaatgctgatggaggaaagatgccaattaaatggatggctctggagtgtatacattacaggaaattcacccatcagagtgacgtttggagctatggagttactatatgggaactgatgacctttggaggaaaaccctatgatggaattccaacgcgagaaatccctgatttattagagaaaggagaacgtttgcctcagcctcccatctgcactattgacgtttacatggtcatggtcaaatgttggatgattgatgctgacagtagacctaaatttaaggaactggctgctgagttttcaaggatggctcgagaccctcaaagatacctagttattcagggtgatgatcgtatgaagcttcccagtccaaatgacagcaagttctttcagaatctcttggatgaagaggatttggaagatatgatggatgctgaggagtacttggtccctcaggctttcaacatcccacctcccatctatacttccagagcaagaattgactcgaataggaaccagtttgtataccgagatggaggttttgctgctgaacaaggagtgtctgtgccctacagagccccaactagcacaattccagaagctcctgtggcacagggtgctactgctgagatttttgatgactcctgctgtaatggcaccctacgcaagccagtggcaccccatgtccaagaggacagtagcacccagaggtacagtgctgaccccaccgtgtttgccccagaacggagcccacgaggagagctggatgaggaaggttacatgactcctatgcgagacaaacccaaacaagaatacctgaatccagtggaggagaacccttttgtttctcggagaaaaaatggagaccttcaagcattggataatcccgaatatcacaatgcatccaatggtccacccaaggccgaggatgagtatgtgaatgagccactgtacctcaacacctttgccaacaccttgggaaaagctgagtacctgaagaacaacatactgtcaatgccagagaaggccaagaaagcgtttgacaaccctgactactggaaccacagcctgccacctcggagcacccttcagcacccagactacctgcaggagtacagcacaaaatatttttataaacagaatgggcggatccggcctattgtggcagagaatcctgaatacctctctgagttctccctgaagccaggcactgtgctgccgcctccaccttacagacaccggaatactgtggtgtaagctcagttgtggttttttaggtggagagacacacctgctccaatttccccacccccctctctttctctggtggtcttccttctaccccaaggccagtagttttgacacttcccagtggaagatacagagatgcaatgatagttatgtgcttacctaacttgaacattagagggaaagactgaaagagaaagataggaggaaccacaatgtttcttcatttctctgcatgggttggtcaggagaatgaaacagctagagaaggaccagaaaatgtaaggcaatgctgcctactatcaaactagctgtcactttttttctttttctttttctttctttgtttctttcttcctcttcttttttttttttttttttaaagcagatggttgaaacacccatgctatctgttcctatctgcaggaactgatgtgtgcatatttagcatccctggaaatcataataaagtttccattagaacaaaagaataacattttctataacatatgatggtgtctgaaattgagaatccagtttctttccccagcagtttctgtcctagcaagtaagaatggccaactcaactttcataatttaaaaatctccattaaagttataactagtaattatgttttcaacactttttggtttttttcattttgttttgctctgaccgattcctttatatttgctcccctatttttggctttaatttctaattgcaaagatgtttacatcaaagcttcttcacagaatttaagcaagaaatattttaatatagtgaaatggccactactttaagtatacaatctttaaaataagaaagggaggctaatatttttcatgctatcaaattatcttcaccctcatcctttacatttttcaacatttttttttctccataaatgacactacttgataggccgttggttgtctgaagagtagaagggaaactaagagacagttctctgtggttcaggaaaactactgatactttcaggggtggcccaatgagggaatccattgaactggaagaaacacactggattgggtatgtctacctggcagatactcagaaatgtagtttgcacttaagctgtaattttatttgttctttttctgaactccattttggattttgaatcaagcaatatggaagcaaccagcaaattaactaatttaagtacatttttaaaaaaagagctaagataaagactgtggaaatgccaaaccaagcaaattaggaaccttgcaacggtatccagggactatgatgagaggccagcacattatcttcatatgtcacctttgctacgcaaggaaatttgttcagttcgtatacttcgtaagaaggaatgcgagtaaggattggcttgaattccatggaatttctagtatgagactatttatatgaagtagaaggtaactctttgcacataaattggtataataaaaagaaaaacacaaacattcaaagcttagggataggtccttgggtcaaaagttgtaaataaatgtgaaacatcttctcatgcaattattttattatccaacacactaatcttttgatactttatataattccctttcttcatatactgcatccagtactagaaccatcattattatgtatcattttgaaagaatacctgatgagatgaaggatgagaacaaatgacagagatgagtctccaagtaaagggggcctcacatcaataattaggaaacttagatataagtcgcccttttctgaaaattctaccccaagtcatttagatttttaaaaaatatttctaatgttaaaatattgggaccaaattagaatcaatagtataagattaattaattagagtaaaaatatctattaaggcagagaaagtttagagaaaaaaatccaaagaaatttgtgtttcttcctattctgaacaagtaaatccatccatccatccatccaaacctcctttatctaactgtgtctactaaaagcaccatgttttgtggggaacactcagataaatggaatatcatcctcaacttcaaaattctatgatctaggagatttaattaaaatgacattttaatttttctatgcgttccaacaatcagattgcatagtctcttttgtgaatagctgtcatataatcagttgtactgtaagatatctcctttaaactcatttgggatataagttaaacatccttcaaattgttgatgttgacaaacaggataatttcaataatattattcaaacataaactggtctaggagaatattgcatcactgactaattagcctatctagagtctaacttcaccattaaaccaaaagcagatggtggtccttggccaagaatattggagacattggagttggtttttttctaagctataagaagtgaggcgagctgaaaaagtatggtagagcaggagaagggtttgtgagattccttctagtgaagttcaccctcaaacttttcaggggtaaagacacagagtgattcaggggccacaatctaatagctcagggctctcctatccattcagagaagtctctaggaaaagggatctcatatcagtacttatgaaaaattgaatataagcctccctttctaaataaatctgcatcgagtcatcacagccctctttttggatactataccttgattttttttttctgatttacaatatgcatatggtttctactgggctatagaaagcagaatcactcattttggagaaggaaaaaatgaatagttaaaacaaacttttaactgttaaggtaacagaaatgtatttagtgaatgtctctttcctcctaagaacacaagacttctacatgttgggtaatacctagagatgcatgtaggaataatccaaaatgacccaaatgctttataatagcaccactttataattcttttgaatgatttctgtagtatataattgacttcagttgtttgagtgttttttgttttatttttgtcccccctgggaaaacatatttcagcatgtataagagggagaaaaaaagtttcattccttccagagaataacttatttagtccagtagggtagaattttaaaatgtcagttaaagtcttcaaagtgcttggggggatatcagattccagaggccaattgtagcaattgaaatttgcagaatcaattatgtaaatctgagacaaattagtattaaaattacacggagtatattttttaaatcacccaactttgtagattatacctattttgggcaggtatggaaaaattttgcagttaaatgattgcctaaagaaagtggtaaacaggtgaggaaagatggcctctgatctaggatagatccagaaccacaaagcatctgcaccacaaaaggtgttagactaccaagcagctcctggttttctgcatagtattagtagcacagcttaggatgagaatcctttctccagtaacattcttaaaatagcatgaaaaacaacgcaaaactcaaatttctattaaaacacacaaactaaaatcaagtgattcttttttgtagattagggagaaggactgaatatctaatttaagagaaggaatagtgtttaagtgttatagtgtgtgagctaataccttctaaaggaaagacatggcatgaagattgtgcatacttacaatgctaaggaaaaatcaagaaaaggactgtgtgaggctctgctactagatgaagttggaaggactattaatgtgcttcttgaagtatcaaaaatgaaaagaaaattaaaattgtttaagcctgacagggaaggatgtaaatacaagtttttctagagctctctaacctttatttcaaaactggaattattcatccatctgtaattgttgataatttaactagtatatgtagttcataaggtaatagaaaaggtgatcatgaaagcatgtatataactggacagaaccacgataatgctataagatgtagatttagttaggttatcagatgttaaatgattttaatattattaaataaatcaaactagaaaactaaccacaagtataatgtaacaaagttaaatgcaggatataaaaatgtaggatggattttgcatagtaaaaagataagtttgccatttaaaattgttgtttgttgggtttagctgaaagtaggcatatatggttccacttgggaaaacttgctttaaagcattacaatgaacaattttttctcattctcttattcctttatcactttttaaatgtaaagaaaattgtatttatttatttttttaaataaacaccaccttgcagaatttaataggcaaacatgttacatatgactaagtaagggtcttcaagatgaagtaaagaaaatgtaaatgttctattaccttatgcagagacaaaaaaaaaaaggagtggtgtcatttagctagcaaacaaacaaaatacagttaattggtgatatgtcctttcttttctcactatgccctcttgcctccaaaaatgacaacaaagaatcacaatttttctgataaataaatgctaaaccaagcgtttcaaactattgcattgccattcttttggactttagttattagaatgatgattgttatagggcaaatgagaaatccatgtgcatcagcttctagttgttaaaaaaaccagataaattaacttctactgtatactgtgggcagaggatcctagagctgatcctacaacatcagcttctagttgttaaaaaaaaaaaaagaaacagataaattaacttctactgtatatactgtgggcagaggatcttactgtgcctctgtttgtgtacatggacttcggtgtgtatcagtttgaaggacagccttgccccatgtaaacatataaatgcagattggtatcgcctggttgctatttgcttaagaacaaatattatacagatgagatcaggcataattttaaaagatcattatcagtggagacctcattattactgatattacaatggggccagtttttatacttctgggtagaattaataaaatttttctgatcccagagatctgagttctctctgcagttggaaacaagaagctgttgtgggcattgtgtcgggccaggggcccttgtgtttgtgtgggcaaatatcttttagcagtgtgagctgcttttttcttttcattaaaagtctctctaaaataatagaaatttcagatactcggttcaagtctcactgattttgtagaggtccaaaaatgtaggatctgtcacttttgcaggcccctgcctcacctaattcctggccaggtgacattttgggcagaagtaaatgcttctatagtcacaagctaaaatgactctaagccccaatttcacggggggtattcacatgcttcctctggaaaatactctttgacagtcagctttgcaagtaagtgattaccttgttaggaatcaaagaaaaatgtatttctctctgacctttagaggaaaatagaatccttcccttttttgcccattgacacaactggcactgctctcttccctttctaccaccctggttcaaagtagtcccccgatgctgtcctgttcctttcttaagccatagtggatctctgagatcctacaccccactttgtgaaacactgacttcatctttgccctcgaatgcctgattttttcataagagattctagcaatttggacactgtttaagtgaactatcaaactaccgcatagagaatatttaagctattaaaattatggtttcccatgaagatcaattctctgtgtccttccctataggaatttgagacgagttagccctgtgatgaatcttgaaactcacatatgtccacatacacttggtagaacttcgatttaatctttacataaaagctgtacatataaccaagaagttatttttgccagtaaattaacttatttgctttattcatcttatttggttcctaatcgtaaatattttgtagctgctgtaaatttttttctcccaaatgaggagtcttattatcataaaggtaaaggctattcagctttgataaccacctgcaattcttttttggatcattcatccatctaacaaatacataatgaggacagttcatgttaatgaaaatccatgttgtttaatagaatgccatcctttacctacttttgctctttatggacgtttttcttttcatgctctagtgagctttccctatatcatgagaagtggttatatttgtgcaaatatacaaatataggaaaacaaagattcatacctgtaggcaatagtctaacttgtccaaaccactttgcctttactgctatttttatccccaatgcgtagatatttcccccaggcctatagcctttgtgaaggaaagcaaatcatacctcctgtatattgacacgaatctggttttcaaatgtcatttccagattttttagttaattgggggttgtccttttcccttaatgtgagagtcattttcctgtatatttctggatctctcaggggctgggaggggggagtgaggggactacaaccatagcactccaagaacccttttgggattactccagtaatcaactacgaaagttattttctaaatgtagatatgtaaggtgttcttttaaagtaaggtactttgaaatatgtagcataaactggtactgctgttaaatgggtcgattattaaacggagcagctgtgtgagggcagctaactttgaatgcctgtctccctggctggtgtgtctccttctcatgttgagagcaccagggattgcgtggctgcatgctgaaaccgcattttcccatggtgtatgactagttcatctctttcttgagcaccattacaagaagatcaaatgaaaatgagatcaatgtggaagacaattcatagcacaaaaaaagtcatcttaaatctactctcaaacattcatcttatacatgcatcaaagtaatttactgacatcagtttgggtgagagagggagtcactttactgaaaaggcagaggcttaaggtgtatacatttgtactcacttccttattttcttaacttgtaagcagaaaacaagccctctctcttgtgaagtatcttcaaaggattggggtgcaaaaataccttgctggtaagccatcaatgttttatttaaatccctgcattcaaagttagctgcctttttgaaataaacaaacaaaaaatactactgtatgtttgaaaatgtgaatagtatttttatagcttgttaaagacatggctagttgcatttgtaaataagtataatgttgctttgattttcttttgtggacatctttatttggaacataattgtctttagggttgatttgtatataagtaattggcctgtgattgtttcttttttggttggaagttatcattttgacattacttgtgattctgtgttcagcactattgtgatgtgttcaacctctgcactcgcttacacaataggatatgccaattgtgtgtggtgtaatgttattttgatttttttccatgttattgatgaaggatcatgcacctaacacatactaacttttttaatgttaggcatatttttagtatactttctcttattctttcttctcctccaaccttttacccatcctccttcctttccctcattcctgttgttatttgagaatgagggagaaacagtattttacatttatgtaattaggcttttccgttagttctcaaggatcctcttttggctcttgggaaagaattgtacctgtacaaggcaattatagaatgcgaactgctttgcctcattccatactgatcatcccagctgaacaatttgaaaactgttctgcctttttgttacatgaatctgtcagaaatatatttttaatttaatataaatgaaattcaataaaatatgaaacaaacgtt

SEQ ID NO: 6697 - DNA, 8647 bp, Homo sapiens
  source 1..8647: mol_type = unassigned DNA; mol_type = unassigned DNA
ggacggagctggatcctgcttctcgccaaggcaggaagtgagtttcgcactgcaattccgggcggtgtcacgagtgaaaagttttgtttttttttttttcggcggagatcctcgttggggctgggaaactcctgcaaaactcgagaccaggaagccagcccgcaccccaacccccaccaaagccacctactcttcttctgtgggaggccagtccacatccgctctcacccgagagagatattcagctggatccaaagtgactgatgaagggaaggaaatcatgtcaagcgaagccttgaaaaagctgccctgagacggtgtcccgccgaaagaatgttggctcaattaagaaacatcagggagataaattcaacccagtgtgtctaaaaatgactacaaaacgaagtttgtttgtgcggttggtaccatgtcgctgtctacgaggggaagaggagactgtcactactcttgattattctcattgcagcttagaacaagttccgaaagagatttttacttttgaaaaaaccttggaggaactctatttagatgctaatcagattgaagagcttccaaagcaactttttaactgtcagtctttacacaaactgagtttgccagacaatgatttaacaacgttaccagcatccattgcaaaccttattaatctcagggaactggatgtcagcaagaatggaatacaggagtttccagaaaatataaaaaattgtaaagttttgacaattgtggaggccagtgtaaaccctatttccaagctccctgatggattttctcagctgttaaacctaacccagttgtatctgaatgatgcttttcttgagttcttgccagcaaattttggcagattaactaaactccaaatattagagcttagagaaaaccagttaaaaatgttgcctaaaactatgaatagactgacccagctggaaagactggatttgggaagtaacgaattcacggaagtgcctgaagtacttgagcaactaagtggattgaaagagttttggatggatgctaatagactgacttttattccagggtttattggtagtttgaaacagctcacatatttggatgtttctaaaaataatattgaaatggttgaagaaggaatttcaacatgtgaaaaccttcaagacctcctattatcaagcaattcacttcagcagcttcctgagactattggttcgttgaagaatataacaacgcttaaaatagatgaaaaccagttaatgtatctgccagactctataggagggttaatatcagtagaagaactggattgtagtttcaatgaagttgaagctttgccttcatctattgggcagcttactaacttaagaacttttgctgctgatcataattacttacagcagttgcccccagagattggaagctggaaaaatataactgtgctgtttctccattccaataaacttgagacacttccagaggaaatgggtgatatgcaaaaattaaaagtcattaatttaagtgataatagattaaagaatttaccctttagctttacaaagctacagcaattgacagctatgtggctctcagataatcagtccaaacccctgatacctcttcaaaaagaaactgattcagagacccagaaaatggtgcttaccaactacatgttccctcaacagccaaggactgaggatgttatgtttatatcagataatgaaagttttaacccttcattgtgggaggaacagaggaaacagcgggctcaagttgcatttgaatgtgatgaagacaaagatgaaagggaggcacctcccagggagggaaatttaaaaagatatccaacaccatacccagatgagcttaagaatatggtcaaaactgttcaaaccattgtacatagattaaaagatgaagagaccaatgaagactcaggaagagatttgaaaccacatgaagatcaacaagatataaataaagatgtgggtgtgaagacctcagaaagtactactacagtaaaaagcaaagttgatgaaagagaaaaatatatgataggaaactctgtacagaagatcagtgaacctgaagctgagattagtcctgggagtttaccagtgactgcaaatatgaaagcctctgagaacttgaagcatattgttaaccatgatgatgtttttgaggaatctgaagaactttcttctgatgaagagatgaaaatggcggagatgcgaccaccattaattgaaacctctattaaccagccaaaagtcgtagcacttagtaataacaaaaaagatgatacaaaggaaacagattctttatcagatgaagttacacacaatagcaatcagaataacagcaattgttcttctccatctcggatgtctgattcagtttctcttaatactgatagtagtcaagacacctcactctgctctccagtgaaacaaactcatattgatattaattccaaaatcaggcaagaagatgaaaattttaacagccttttacaaaatggagatattttaaacagttcaacagaggaaaagttcaaagctcatgataaaaaagattttaacttacctgaatatgatttgaatgttgaagagcgattagttctaattgagaaaagtgttgactcaacagccacagctgatgacactcacaaattagatcatatcaatatgaatcttaataaacttataactaatgatacatttcaaccagagatcatggaaagatcaaaaacacaggatattgtgcttggaacaagctttttaagcattaattctaaagaggaaactgagcacttggaaaatggaaacaagtatcctaatttggaatccgtaaataaggtaaatggacattctgaggaaacttcccagtctcctaataggactgaaccacatgacagtgattgttctgttgacttaggtatttccaaaagcactgaagatctctcccctcagaaaagtggtccagttggatctgttgtgaaatctcatagcataactaatatggagattggagggctaaaaatctatgatattcttagtgataatggacctcagcagccaagtacaaccgttaaaatcacatctgctgttgatggaaaaaatatagtcaggagcaagtctgccacactgttgtatgatcaaccattgcaggtatttactggttcttcctcatcttctgatttaatatcaggaacaaaggcaattttcaagtttgattcaaatcataatcccgaagagccaaatataataagaggccccacaagtggcccacaatctgcacctcaaatatatggtcctccacagtataatatccaatacagtagcagtgctgcagtcaaagacactttgtggcactccaaacaaaatccccaaatagaccatgccagttttcctcctcagctccttcctagatcagagagcacagaaaatcaaagttatgctaaacattctgccaatatgaatttctctaatcataacaatgttcgagctaatactgcataccatttacatcagagacttggcccagcaagacatggggaaatgtgggccatctcaccaaacgaccgacttattcctgcagtaactcgaagtacaatccagcgacaaagtagtgtgtcctccacagcctctgtaaatcttggtgatccaggctctacaaggcgggctcagattcctgaaggagattatttatcatacagagagttccactcagcgggaagaactcctccaatgatgccaggatcacagagacccctttctgcacgaacatacagcatagatggtccaaatgcatcaagacctcagagtgctcgaccctctattaatgaaataccagagagaactatgtcagttagtgatttcaattattcacggactagtccttcaaaaagaccaaatgcaagggttggttctgagcattctttattagatcctccaggaaaaagtaaagttcctcgtgactggagagaacaagtacttcgacatattgaagccaaaaagttagaaaagaagcatccccagacatccagttcaggagatccttgtcaagatggtatattcatttcaggacagcagaactactcatcagccacacttagtcacaaagatgttcctccagacagcttgatgaaaatgcctttgagtaatggacagatgggccagcctctcaggcctcaggcaaattatagtcaaatacatcacccccctcaggcatctgtggcaaggcatccctctagagaacaactaattgattacttgatgctgaaagtggcccaccagcctccatatacacagccccattgttctcctagacaaggccatgaactggcaaaacaagagattcgagtgagggttgaaaaggatccagaacttggatttagcatatcaggtggtgtcgggggtagaggaaacccattcagacctgatgatgatggtatatttgtaacaagggtacaacctgaaggaccagcatcaaaattactgcagccaggtgataaaattattcaggctaatggctacagttttataaatattgaacatggacaagcagtgtccttgctaaaaactttccagaatacagttgaactcatcattgtacgagaagtttcctcataagcactgtggacaaaaaaagcggggaagacagcaagatttattggaagatacttacaggggaaattaatattttgactatttttatatataaagaagaactcaaaaaattatgttcaaatttgtacattaatgaaataatggaacttgtggttagagggaaagaaccactgtacagaatataaaggagactgttgaattcataccatataaaacttgttaggtttttaaacatagcaatcaaggctacaaaaacaaacctgtgttgtttttgtatagattgtaggtttatttttggatttcatatacatgactgaactgtgtgcaaggcaatagttagccttgattttagcccagagacagatggcagagctatctctctcatagcttttatgcccttatttttattcaactggtattaatgtttttctcctgaaactactttttttgatgtgggcaagagatttgaagtgttggcttttgctatgtgcatattgaattgaagagtgagtaggtgaaggtggtgctggtgggttcactttccaaggccagactaaaacagttattttctataaaaatctggaagcaaagaatggggatggggagagctacgtggtagtatgtttttattaggagaataatgcaataaaatatgtaatgtcttttttataaagcaaaaaagacaataattgcatttatgagctcggcaggatctgttcttgtcatagccattgactatacatttgctactggtgattcagtttttaattttttagtcacaggaaatttttaactctactgtagatgcatgtccatgcattttctgtgttatggaaatccactgatttttttttttttttcaaatggtggtacttgcaatctgttttataattagtgctccatttaaatctaatttataatttttattttaagcagcaaatgaaacaaaaatggccagttttaagattgtgttgcctgtaacacaaaatgttacgaaggtttaggaaagcctctttgatttttgtttggccttgcattgccttggtaaagtaaaaggaaacagtacacttggagctaggaaaccaaagcaagctttgtgaaactggcacagtgatagagaattgctgtggagagttatagagcaaagggatgggtccttgaggcctgccagtgtgtaaaggtgttcaaataaagggctgtttctacaggtaacattaaatgtgaactcaacacttccagagtctttaaagggtttctatgtgtatcagtgtaatagtgttttaccaccaactgcctttctttgttcctagttactgtaacaaatatttgatgatagaggtttattaattttgtttatccagaccattaattttatttgtttttgttctatgtaatcaaataaaatttgagtaacatgtaatggtaaggattaatgcatggttatttggaccagaaaaaagtgccatagaagaccaataactgtttagttgaggctagtctggaacctttcattagagcaatatttggttattgcacttcatttttatttactaagaaatgcaatttgggaatttttaatctgttatgctttgtttatcaaccttgattttaattaagacttttataagactagcttaaaacaccaaccaacattatttttgcaaaagtgagttggactcactttccattcttgctagtcagagtaagtaggcagcacttttaaaaatatgtgaactcaaatattgcacttctttcaagatgttatcaattggttattgtactgtatagttttaataattttgattgaaaccctttaacaactctttgtaaattttaactcattttagttgattttcagtactatttacataggaattgatttttatggatatagtagaagaaatgtgctgtattttgataaaattcacttattgtatgtgtgttgtaatctaaaaaaaaaaagaatgacaaacagcttctttaagacaagtctcggtgttccctttattcttagtttgtttttaaatattaattttggcattctaaaatagctaacatttcttttattgatttcagattttcacaggcacattctacttttaatcagaaatatatttaataagtataattgtgaagttttcaactactttaccttgaaccacatataccaattataattttggaaaaggaattaagcctcacggaacaatggatcttcagcaaaccttaacttcattgtctgcacattacattgaagtattataaatgcaacagatgttatatgcactggcattttatcctactctagttagttaaaattttatagtattcttgcaacacataaagttgcgtaagaaactttaccaagaggagtattatagccaagttttctttgaaagtattggaaaactaaaattaaatgacaaggactttgaattagaattttgctgtaataaagtttcaaaatttgaataaaataattaaattttttgaggaagtggagaagacatttttagtttatatattgttgagtaaattgtagttaaggcctatacccataactaactttagtaagtattatatagcaattcatcaaaaccacaactgtcttttagtgattttgtctttaagagtaatttcttactctaaccagtaaaaaaataatactgatcagagtaatttatacggcatacaatagttgatacaatctaaagatttatgctaattaaggaattatcacttcatctgaatcaatgaaattctaaaattccctacatatttattttgtaaatattcttctgacctctttggactggatatgaagatatatatatatacacttaattcttttaaacacaaaacttgccataagcagaaccaaacttttaagtattaatttgctgcacttaaaaaatcccattagcagctatgtaatatttttatcaaccaacatttattcattccaaatttttgtatatatctagatgaagtaacacatagaggatagataacaaactaatgatgtttaaactggtttatttacaaaattcggggttagagaaattctcatgaaaaatatacaatttttttttagcattaaaaccctgtatatctaggtgtggaagaagtgtagtttatctcaaattattattatttacttctaaagggaggcattaagatgggaaatgtttctctgatggagattgacgtgtgaaatctatttggaagggtatttttttcactcagtctgttgcattcttacagccttctgttttaatgttcagtgaataggtttcttatgaaatggacattgaaataaaaattatgattcaagagcattaattgatgaacaagtgaacaagatgcctctttaaaaaaaaaaaagaaaaagtaatctagacaggcagccaactcagacctttgggtattcctttgtttctaaataaggaccttcagaaaaagttgaccatattctacctaaagctgctaattctttacagaattcataagcccaggggatagtaagtagtcatttagttttggaaagttcttaagagaatgctatcttctacagtctcatgaagcagtttttcaagattagaatctgtggtcagctataacgtacagtcctaatatccaaccacctgagaagctcatcctaagctgagaaagcctaaaatgttagagaatgtttagagaaaacacctgaaattttttttaagagaacaacctaggttttattgtagagaacaatcaaaatactcctgaacctttctatagaatctttaggagagaggctgacaaaaagaatccttctgttacaactttcttttctaatgtaacaaccagggacaatggtgatctgtcacgcatctgcccatctagcttctcaatcggcccacggttttatttcaggataaaatttgagaaactagtatcactggggaaggaagaaacctaagctgtaaaattatgcttttcccctcaagggattcaataaagcttatttttcatgaaaacaa

SEQ ID NO: 6698 - DNA, 6410 bp, Homo sapiens
  source 1..6410: mol_type = unassigned DNA; mol_type = unassigned DNA
ttttgtttttttttttttcggcggagatcctcgttggggctgggaaactcctgcaaaactcgagaccaggaagccagcccgcaccccaacccccaccaaagccacctactcttcttctgtgggaggccagtccacatccgctctcacccgagagagatattcagctggatccaaagtgactgatgaagggaaggaaatcatgtcaagcgaagccttgaaaaagctgccctgagacggtgtcccgccgaaagaatgttggctcaattaagaaacatcagggagataaattcaacccagtgtgtctaaaaatgactacaaaacgaagtttgtttgtgcggttggtaccatgtcgctgtctacgaggggaagaggagactgtcactactcttgattattctcattgcagcttagaacaagttccgaaagagatttttacttttgaaaaaaccttggaggaactctatttagatgctaatcagattgaagagcttccaaagcaactttttaactgtcagtctttacacaaactgagtttgccagacaatgatttaacaacgttaccagcatccattgcaaaccttattaatctcagggaactggatgtcagcaagaatggaatacaggagtttccagaaaatataaaaaattgtaaagttttgacaattgtggaggccagtgtaaaccctatttccaagctccctgatggattttctcagctgttaaacctaacccagttgtatctgaatgatgcttttcttgagttcttgccagcaaattttggcagattaactaaactccaaatattagagcttagagaaaaccagttaaaaatgttgcctaaaactatgaatagactgacccagctggaaagactggatttgggaagtaacgaattcacggaagtgcctgaagtacttgagcaactaagtggattgaaagagttttggatggatgctaatagactgacttttattccagggtttattggtagtttgaaacagctcacatatttggatgtttctaaaaataatattgaaatggttgaagaaggaatttcaacatgtgaaaaccttcaagacctcctattatcaagcaattcacttcagcagcttcctgagactattggttcgttgaagaatataacaacgcttaaaatagatgaaaaccagttaatgtatctgccagactctataggagggttaatatcagtagaagaactggattgtagtttcaatgaagttgaagctttgccttcatctattgggcagcttactaacttaagaacttttgctgctgatcataattacttacagcagttgcccccagagattggaagctggaaaaatataactgtgctgtttctccattccaataaacttgagacacttccagaggaaatgggtgatatgcaaaaattaaaagtcattaatttaagtgataatagattaaagaatttaccctttagctttacaaagctacagcaattgacagctatgtggctctcagataatcagtccaaacccctgatacctcttcaaaaagaaactgattcagagacccagaaaatggtgcttaccaactacatgttccctcaacagccaaggactgaggatgttatgtttatatcagataatgaaagttttaacccttcattgtgggaggaacagaggaaacagcgggctcaagttgcatttgaatgtgatgaagacaaagatgaaagggaggcacctcccagggagggaaatttaaaaagatatccaacaccatacccagatgagcttaagaatatggtcaaaactgttcaaaccattgtacatagattaaaagatgaagagaccaatgaagactcaggaagagatttgaaaccacatgaagatcaacaagatataaataaagatgtgggtgtgaagacctcagaaagtactactacagtaaaaagcaaagttgatgaaagagaaaaatatatgataggaaactctgtacagaagatcagtgaacctgaagctgagattagtcctgggagtttaccagtgactgcaaatatgaaagcctctgagaacttgaagcatattgttaaccatgatgatgtttttgaggaatctgaagaactttcttctgatgaagagatgaaaatggcggagatgcgaccaccattaattgaaacctctattaaccagccaaaagtcgtagcacttagtaataacaaaaaagatgatacaaaggaaacagattctttatcagatgaagttacacacaatagcaatcagaataacagcaattgttcttctccatctcggatgtctgattcagtttctcttaatactgatagtagtcaagacacctcactctgctctccagtgaaacaaactcatattgatattaattccaaaatcaggcaagaagatgaaaattttaacagccttttacaaaatggagatattttaaacagttcaacagaggaaaagttcaaagctcatgataaaaaagattttaacttacctgaatatgatttgaatgttgaagagcgattagttctaattgagaaaagtgttgactcaacagccacagctgatgacactcacaaattagatcatatcaatatgaatcttaataaacttataactaatgatacatttcaaccagagatcatggaaagatcaaaaacacaggatattgtgcttggaacaagctttttaagcattaattctaaagaggaaactgagcacttggaaaatggaaacaagtatcctaatttggaatccgtaaataaggtaaatggacattctgaggaaacttcccagtctcctaataggactgaaccacatgacagtgattgttctgttgacttaggtatttccaaaagcactgaagatctctcccctcagaaaagtggtccagttggatctgttgtgaaatctcatagcataactaatatggagattggagggctaaaaatctatgatattcttagtgataatggacctcagcagccaagtacaaccgttaaaatcacatctgctgttgatggaaaaaatatagtcaggagcaagtctgccacactgttgtatgatcaaccattgcaggtatttactggttcttcctcatcttctgatttaatatcaggaacaaaggcaattttcaagtttgattcaaatcataatcccgaagagccaaatataataagaggccccacaagtggcccacaatctgcacctcaaatatatggtcctccacagtataatatccaatacagtagcagtgctgcagtcaaagacactttgtggcactccaaacaaaatccccaaatagaccatgccagttttcctcctcagctccttcctagatcagagagcacagaaaatcaaagttatgctaaacattctgccaatatgaatttctctaatcataacaatgttcgagctaatactgcataccatttacatcagagacttggcccagcaagacatggggaaatgtgggccatctcaccaaacgaccgacttattcctgcagtaactcgaagtacaatccagcgacaaagtagtgtgtcctccacagcctctgtaaatcttggtgatccaggctctacaaggcgggctcagattcctgaaggagattatttatcatacagagagttccactcagcgggaagaactcctccaatgatgccaggatcacagagacccctttctgcacgaacatacagcatagatggtccaaatgcatcaagacctcagagtgctcgaccctctattaatgaaataccagagagaactatgtcagttagtgatttcaattattcacggactagtccttcaaaaagaccaaatgcaagggttggttctgagcattctttattagatcctccaggaaaaagtaaagttcctcgtgactggagagaacaagtacttcgacatattgaagccaaaaagttagaaaagatgcctttgagtaatggacagatgggccagcctctcaggcctcaggcaaattatagtcaaatacatcacccccctcaggcatctgtggcaaggcatccctctagagaacaactaattgattacttgatgctgaaagtggcccaccagcctccatatacacagccccattgttctcctagacaaggccatgaactggcaaaacaagagattcgagtgagggttgaaaaggatccagaacttggatttagcatatcaggtggtgtcgggggtagaggaaacccattcagacctgatgatgatggtatatttgtaacaagggtacaacctgaaggaccagcatcaaaattactgcagccaggtgataaaattattcaggctaatggctacagttttataaatattgaacatggacaagcagtgtccttgctaaaaactttccagaatacagttgaactcatcattgtacgagaagtttcctcataagcactgtggacaaaaaaagcggggaagacagcaagatttattggaagatacttacaggggaaattaatattttgactatttttatatataaagaagaactcaaaaaattatgttcaaatttgtacattaatgaaataatggaacttgtggttagagggaaagaaccactgtacagaatataaaggagactgttgaattcataccatataaaacttgttaggtttttaaacatagcaatcaaggctacaaaaacaaacctgtgttgtttttgtatagattgtaggtttatttttggatttcatatacatgactgaactgtgtgcaaggcaatagttagccttgattttagcccagagacagatggcagagctatctctctcatagcttttatgcccttatttttattcaactggtattaatgtttttctcctgaaactactttttttgatgtgggcaagagatttgaagtgttggcttttgctatgtgcatattgaattgaagagtgagtaggtgaaggtggtgctggtgggttcactttccaaggccagactaaaacagttattttctataaaaatctggaagcaaagaatggggatggggagagctacgtggtagtatgtttttattaggagaataatgcaataaaatatgtaatgtcttttttataaagcaaaaaagacaataattgcatttatgagctcggcaggatctgttcttgtcatagccattgactatacatttgctactggtgattcagtttttaattttttagtcacaggaaatttttaactctactgtagatgcatgtccatgcattttctgtgttatggaaatccactgatttttttttttttttcaaatggtggtacttgcaatctgttttataattagtgctccatttaaatctaatttataatttttattttaagcagcaaatgaaacaaaaatggccagttttaagattgtgttgcctgtaacacaaaatgttacgaaggtttaggaaagcctctttgatttttgtttggccttgcattgccttggtaaagtaaaaggaaacagtacacttggagctaggaaaccaaagcaagctttgtgaaactggcacagtgatagagaattgctgtggagagttatagagcaaagggatgggtccttgaggcctgccagtgtgtaaaggtgttcaaataaagggctgtttctacaggtaacattaaatgtgaactcaacacttccagagtctttaaagggtttctatgtgtatcagtgtaatagtgttttaccaccaactgcctttctttgttcctagttactgtaacaaatatttgatgatagaggtttattaattttgtttatccagaccattaattttatttgtttttgttctatgtaatcaaataaaatttgagtaacatgtaatggtaaggattaatgcatggttatttggaccagaaaaaagtgccatagaagaccaataactgtttagttgaggctagtctggaacctttcattagagcaatatttggttattgcacttcatttttatttactaagaaatgcaatttgggaatttttaatctgttatgctttgtttatcaaccttgattttaattaagacttttataagactagcttaaaacaccaaccaacattatttttgcaaaagtgagttggactcactttccattcttgctagtcagagtaagtaggcagcacttttaaaaatatgtgaactcaaatattgcacttctttcaagatgttatcaattggttattgtactgtatagttttaataattttgattgaaaccctttaacaactctttgtaaattttaactcattttagttgattttcagtactatttacataggaattgatttttatggatatagtagaagaaatgtgctgtattttgataaaattcacttattgtatgtgtgttgtaatctaaaaaaaaaaagaatgacaaacagcttctttaagacaa

SEQ ID NO: 6699 - DNA, 337 bp, Homo sapiens
  source 1..337: mol_type = unassigned DNA; mol_type = unassigned DNA
tttttttttttttcggcggagatcctcgttggggctgggaaactcctgcaaaactcgagaccaggaagccagcccgcaccccaacccccaccaaagccacctactcttcttctgtgggaggccagtccacatccgctctcacccgagagagatattcagctggatccaaagtgactgatgaagggaaggaaatcatgtcaagcgaagccttgaaaaagctgccctgagacggtgtcccgccgaaagtctttcagctcacagcaggatgctaatccatgaaggtgacctcgcagtactggttaattaagctttattgctcactgaaaaagaaaaaaaa

SEQ ID NO: 6700 - DNA, 2351 bp, Homo sapiens
  source 1..2351: mol_type = unassigned DNA; mol_type = unassigned DNA
tttttttcggcggagatcctcgttggggctgggaaactcctgcaaaactcgagaccaggaagccagcccgcaccccaacccccaccaaagccacctactcttcttctgtgggaggccagtccacatccgctctcacccgagagagatattcagctggatccaaagtgactgatgaagggaaggaaatcatgtcaagcgaagccttgaaaaagctgccctgagacggtgtcccgccgaaagaatgttggctcaattaagaaacatcagggagataaattcaacccagtgtgtctaaaaatgactacaaaacgaagtttgtttgtgcggttggtaccatgtcgctgtctacgaggggaagaggagactgtcactactcttgattattctcattgcagcttagaacaagttccgaaagagatttttacttttgaaaaaaccttggaggaactctatttagatgctaatcagattgaagagcttccaaagcaactttttaactgtcagtctttacacaaactgagtttgccagacaatgatttaacaacgttaccagcatccattgcaaaccttattaatctcagggaactggatgtcagcaagaatggaatacaggagtttccagaaaatataaaaaattgtaaagttttgacaattgtggaggccagtgtaaaccctatttccaagctccctgatggattttctcagctgttaaacctaacccagttgtatctgaatgatgcttttcttgagttcttgccagcaaattttggcagattaactaaactccaaatattagagcttagagaaaaccagttaaaaatgttgcctaaaactatgaatagactgacccagctggaaagactggatttgggaagtaacgaattcacggaagtgcctgaagtacttgagcaactaagtggattgaaagagttttggatggatgctaatagactgacttttattccagggtttattggtagtttgaaacagctcacatatttggatgtttctaaaaataatattgaaatggttgaagaaggaatttcaacatgtgaaaaccttcaagacctcctattatcaagcaattcacttcagcagcttcctgagactattggttcgttgaagaatataacaacgcttaaaatagatgaaaaccagttaatgtatctgccagactctataggagggttaatatcagtagaagaactggattgtagtttcaatgaagttgaagctttgccttcatctattgggcagcttactaacttaagaacttttgctgctgatcataattacttacagcagttgcccccagagattggaagctggaaaaatataactgtgctgtttctccattccaataaacttgagacacttccagaggaaatgggtgatatgcaaaaattaaaagtcattaatttaagtgataatagattaaagaatttaccctttagctttacaaagctacagcaattgacagctatgtggctctcagataatcagagcatgctgtcaaggtcctttaattccaattttactactgtaagcagttttcactgtggcagctctagggatctgcatggcagccagggcagtcttgccttgagtgttgcagacagaagaggttctggtgggcacatttttcgaatgcctttgagtaatggacagatgggccagcctctcaggcctcaggcaaattatagtcaaatacatcacccccctcaggcatctgtggcaaggcatccctctagagaacaactaattgattacttgatgctgaaagtggcccaccagcctccatatacacagccccattgttctcctagacaaggccatgaactggcaaaacaagagattcgagtgagggttgaaaaggatccagaacttggatttagcatatcaggtggtgtcgggggtagaggaaacccattcagacctgatgatgatggtatatttgtaacaagggtacaacctgaaggaccagcatcaaaattactgcagccaggtgataaaattattcaggctaatggctacagttttataaatattgaacatggacaagcagtgtccttgctaaaaactttccagaatacagttgaactcatcattgtacgagaagtttcctcataagcactgtggacaaaaaaagcggggaagacagcaagatttattggaagatacttacaggggaaattaatattttgactatttttatatataaagaagaactcaaaaaattatgttcaaatttgtacattaatgaaataatggaacttgtggttagagggaaagaaccactgtacagaatataaaggagactgttgaattcataccatataaaacttgttagg

SEQ ID NO: 6701 - DNA, 4701 bp, Homo sapiens
  source 1..4701: mol_type = unassigned DNA; mol_type = unassigned DNA
aaaactcgagaccaggaagccagcccgcaccccaacccccaccaaagccacctactcttcttctgtgggaggccagtccacatccgctctcacccgagagagatattcagctggatccaaagtgactgatgaagggaaggaaatcatgtcaagcgaagccttgaaaaagctgccctgagacggtgtcccgccgaaagaatgttggctcaattaagaaacatcagggagataaattcaacccagtgtgtctaaaaatgactacaaaacgaagtttgtttgtgcggttggtaccatgtcgctgtctacgaggggaagaggagactgtcactactcttgattattctcattgcagcttagaacaagttccgaaagagatttttacttttgaaaaaaccttggaggaactctatttagatgctaatcagattgaagagcttccaaagcaactttttaactgtcagtctttacacaaactgagtttgccagacaatgatttaacaacgttaccagcatccattgcaaaccttattaatctcagggaactggatgtcagcaagaatggaatacaggagtttccagaaaatataaaaaattgtaaagttttgacaattgtggaggccagtgtaaaccctatttccaagctccctgatggattttctcagctgttaaacctaacccagttgtatctgaatgatgcttttcttgagttcttgccagcaaattttggcagattaactaaactccaaatattagagcttagagaaaaccagttaaaaatgttgcctaaaactatgaatagactgacccagctggaaagactggatttgggaagtaacgaattcacggaagtgcctgaagtacttgagcaactaagtggattgaaagagttttggatggatgctaatagactgacttttattccagggtttattggtagtttgaaacagctcacatatttggatgtttctaaaaataatattgaaatggttgaagaaggaatttcaacatgtgaaaaccttcaagacctcctattatcaagcaattcacttcagcagcttcctgagactattggttcgttgaagaatataacaacgcttaaaatagatgaaaaccagttaatgtatctgccagactctataggagggttaatatcagtagaagaactggattgtagtttcaatgaagttgaagctttgccttcatctattgggcagcttactaacttaagaacttttgctgctgatcataattacttacagcagttgcccccagagattggaagctggaaaaatataactgtgctgtttctccattccaataaacttgagacacttccagaggaaatgggtgatatgcaaaaattaaaagtcattaatttaagtgataatagattaaagaatttaccctttagctttacaaagctacagcaattgacagctatgtggctctcagataatcagtccaaacccctgatacctcttcaaaaagaaactgattcagagacccagaaaatggtgcttaccaactacatgttccctcaacagccaaggactgaggatgttatgtttatatcagataatgaaagttttaacccttcattgtgggaggaacagaggaaacagcgggctcaagttgcatttgaatgtgatgaagacaaagatgaaagggaggcacctcccagggagggaaatttaaaaagatatccaacaccatacccagatgagcttaagaatatggtcaaaactgttcaaaccattgtacatagattaaaagatgaagagaccaatgaagactcaggaagagatttgaaaccacatgaagatcaacaagatataaataaagatgtgggtgtgaagacctcagaaagtactactacagtaaaaagcaaagttgatgaaagagaaaaatatatgataggaaactctgtacagaagatcagtgaacctgaagctgagattagtcctgggagtttaccagtgactgcaaatatgaaagcctctgagaacttgaagcatattgttaaccatgatgatgtttttgaggaatctgaagaactttcttctgatgaagagatgaaaatggcggagatgcgaccaccattaattgaaacctctattaaccagccaaaagtcgtagcacttagtaataacaaaaaagatgatacaaaggaaacagattctttatcagatgaagttacacacaatagcaatcagaataacagcaattgttcttctccatctcggatgtctgattcagtttctcttaatactgatagtagtcaagacacctcactctgctctccagtgaaacaaactcatattgatattaattccaaaatcaggcaagaagatgaaaattttaacagccttttacaaaatggagatattttaaacagttcaacagaggaaaagttcaaagctcatgataaaaaagattttaacttacctgaatatgatttgaatgttgaagagcgattagttctaattgagaaaagtgttgactcaacagccacagctgatgacactcacaaattagatcatatcaatatgaatcttaataaacttataactaatgatacatttcaaccagagatcatggaaagatcaaaaacacaggatattgtgcttggaacaagctttttaagcattaattctaaagaggaaactgagcacttggaaaatggaaacaagtatcctaatttggaatccgtaaataaggtaaatggacattctgaggaaacttcccagtctcctaataggactgaaccacatgacagtgattgttctgttgacttaggtatttccaaaagcactgaagatctctcccctcagaaaagtggtccagttggatctgttgtgaaatctcatagcataactaatatggagattggagggctaaaaatctatgatattcttagtgataatggacctcagcagccaagtacaaccgttaaaatcacatctgctgttgatggaaaaaatatagtcaggagcaagtctgccacactgttgtatgatcaaccattgcaggtatttactggttcttcctcatcttctgatttaatatcaggaacaaaggcaattttcaagtttgattcaaatcataatcccgaagagccaaatataataagaggccccacaagtggcccacaatctgcacctcaaatatatggtcctccacagtataatatccaatacagtagcagtgctgcagtcaaagacactttgtggcactccaaacaaaatccccaaatagaccatgccagttttcctcctcagctccttcctagatcagagagcacagaaaatcaaagttatgctaaacattctgccaatatgaatttctctaatcataacaatgttcgagctaatactgcataccatttacatcagagacttggcccagcaagacatggggaaatgtgggccatctcaccaaacgaccgacttattcctgcagtaactcgaagtacaatccagcgacaaagtagtgtgtcctccacagcctctgtaaatcttggtgatccaggctctacaaggcgggctcagattcctgaaggagattatttatcatacagagagttccactcagcgggaagaactcctccaatgatgccaggatcacagagacccctttctgcacgaacatacagcatagatggtccaaatgcatcaagacctcagagtgctcgaccctctattaatgaaataccagagagaactatgtcagttagtgatttcaattattcacggactagtccttcaaaaagaccaaatgcaagggttggttctgagcattctttattagatcctccaggaaaaagtaaagttcctcgtgactggagagaacaagtacttcgacatattgaagccaaaaagttagaaaagatgcctttgagtaatggacagatgggccagcctctcaggcctcaggcaaattatagtcaaatacatcacccccctcaggcatctgtggcaaggcatccctctagagaacaactaattgattacttgatgctgaaagtggcccaccagcctccatatacacagccccattgttctcctagacaaggccatgaactggcaaaacaagagattcgagtgagggttgaaaaggatccagaacttggatttagcatatcaggtggtgtcgggggtagaggaaacccattcagacctgatgatgatgctaatggctacagttttataaatattgaacatggacaagcagtgtccttgctaaaaactttccagaatacagttgaactcatcattgtacgagaagtttcctcataagcactgtggacaaaaaaagcggggaagacagcaagatttattggaagatacttacaggggaaattaatattttgactatttttatatataaagaagaactcaaaaaattatgttcaaatttgtacattaatgaaataatggaacttgtggttagagggaaagaaccactgtacagaatataaaggagactgttgaattcataccatataaaacttgttaggtttttaaacatagcaatcaaggctacaaaaacaaacctgtgttgtttttgtatagattgtaggtttatttttggatttcatatacatgactgaactgtgtgcaaggcaatagttagccttgattttagcccagagacagatggcagagctatctctctcatagcttttatgcccttatttttatt

SEQ ID NO: 6702 - DNA, 4257 bp, Homo sapiens
  source 1..4257: mol_type = unassigned DNA; mol_type = unassigned DNA
caaagtgactgatgaagggaaggaaatcatgtcaagcgaagccttgaaaaagctgccctgagacggtgtcccgccgaaagaatgttggctcaattaagaaacatcagggagataaattcaacccagtgtgtctaaaaatgactacaaaacgaagtttgtttgtgcggttggtaccatgtcgctgtctacgaggggaagaggagactgtcactactcttgattattctcattgcagcttagaacaagttccgaaagagatttttacttttgaaaaaaccttggaggaactctatttagatgctaatcagattgaagagcttccaaagcaactttttaactgtcagtctttacacaaactgagtttgccagacaatgatttaacaacgttaccagcatccattgcaaaccttattaatctcagggaactggatgtcagcaagaatggaatacaggagtttccagaaaatataaaaaattgtaaagttttgacaattgtggaggccagtgtaaaccctatttccaagctccctgatggattttctcagctgttaaacctaacccagttgtatctgaatgatgcttttcttgagttcttgccagcaaattttggcagattaactaaactccaaatattagagcttagagaaaaccagttaaaaatgttgcctaaaactatgaatagactgacccagctggaaagactggatttgggaagtaacgaattcacggaagtgcctgaagtacttgagcaactaagtggattgaaagagttttggatggatgctaatagactgacttttattccagggtttattggtagtttgaaacagctcacatatttggatgtttctaaaaataatattgaaatggttgaagaaggaatttcaacatgtgaaaaccttcaagacctcctattatcaagcaattcacttcagcagcttcctgagactattggttcgttgaagaatataacaacgcttaaaatagatgaaaaccagttaatgtatctgccagactctataggagggttaatatcagtagaagaactggattgtagtttcaatgaagttgaagctttgccttcatctattgggcagcttactaacttaagaacttttgctgctgatcataattacttacagcagttgcccccagagattggaagctggaaaaatataactgtgctgtttctccattccaataaacttgagacacttccagaggaaatgggtgatatgcaaaaattaaaagtcattaatttaagtgataatagattaaagaatttaccctttagctttacaaagctacagcaattgacagctatgtggctctcagataatcagtccaaacccctgatacctcttcaaaaagaaactgattcagagacccagaaaatggtgcttaccaactacatgttccctcaacagccaaggactgaggatgttatgtttatatcagataatgaaagttttaacccttcattgtgggaggaacagaggaaacagcgggctcaagttgcatttgaatgtgatgaagacaaagatgaaagggaggcacctcccagggagggaaatttaaaaagatatccaacaccatacccagatgagcttaagaatatggtcaaaactgttcaaaccattgtacatagattaaaagatgaagagaccaatgaagactcaggaagagatttgaaaccacatgaagatcaacaagatataaataaagatacctcagaaagtactactacagtaaaaagcaaagttgatgaaagagaaaaatatatgataggaaactctgtacagaagatcagtgaacctgaagctgagattagtcctgggagtttaccagtgactgcaaatatgaaagcctctgagaacttgaagcatattgttaaccatgatgatgtttttgaggaatctgaagaactttcttctgatgaagagatgaaaatggcggagatgcgaccaccattaattgaaacctctattaaccagccaaaagtcgtagcacttagtaataacaaaaaagatgatacaaaggaaacagattctttatcagatgaagttacacacaatagcaatcagaataacagcaattgttcttctccatctcggatgtctgattcagtttctcttaatactgatagtagtcaagacacctcactctgctctccagtgaaacaaactcatattgatattaattccaaaatcaggcaagaagatgaaaattttaacagccttttacaaaatggagatattttaaacagttcaacagaggaaaagttcaaagctcatgataaaaaagattttaacttacctgaatatgatttgaatgttgaagagcgattagttctaattgagaaaagtgttgactcaacagccacagctgatgacactcacaaattagatcatatcaatatgaatcttaataaacttataactaatgatacatttcaaccagagatcatggaaagatcaaaaacacaggatattgtgcttggaacaagctttttaagcattaattctaaagaggaaactgagcacttggaaaatggaaacaagtatcctaatttggaatccgtaaataaggtaaatggacattctgaggaaacttcccagtctcctaataggactgaaccacatgacagtgattgttctgttgacttaggtatttccaaaagcactgaagatctctcccctcagaaaagtggtccagttggatctgttgtgaaatctcatagcataactaatatggagattggagggctaaaaatctatgatattcttagtgataatggacctcagcagccaagtacaaccgttaaaatcacatctgctgttgatggaaaaaatatagtcaggagcaagtctgccacactgttgtatgatcaaccattgcaggtatttactggttcttcctcatcttctgatttaatatcaggaacaaaggcaattttcaagtttgattcaaatcataatcccgaagagccaaatataataagaggccccacaagtggcccacaatctgcacctcaaatatatggtcctccacagtataatatccaatacagtagcagtgctgcagtcaaagacactttgtggcactccaaacaaaatccccaaatagaccatgccagttttcctcctcagctccttcctagatcagagagcacagaaaatcaaagttatgctaaacattctgccaatatgaatttctctaatcataacaatgttcgagctaatactgcataccatttacatcagagacttggcccagcaagacatggggaaatgtgggccatctcaccaaacgaccgacttattcctgcagtaactcgaagtacaatccagcgacaaagtagtgtgtcctccacagcctctgtaaatcttggtgatccaggctctacaaggcgggctcagattcctgaaggagattatttatcatacagagagttccactcagcgggaagaactcctccaatgatgccaggatcacagagacccctttctgcacgaacatacagcatagatggtccaaatgcatcaagacctcagagtgctcgaccctctattaatgaaataccagagagaactatgtcagttagtgatttcaattattcacggactagtccttcaaaaagaccaaatgcaagggttggttctgagcattctttattagatcctccaggaaaaagtaaagttcctcgtgactggagagaacaagtacttcgacatattgaagccaaaaagttagaaaagatgcctttgagtaatggacagatgggccagcctctcaggcctcaggcaaattatagtcaaatacatcacccccctcaggcatctgtggcaaggcatccctctagagaacaactaattgattacttgatgctgaaagtggcccaccagcctccatatacacagccccattgttctcctagacaaggccatgaactggcaaaacaagagattcgagtgagggttgaaaaggatccagaacttggatttagcatatcaggtggtgtcgggggtagaggaaacccattcagacctgatgatgatggtatatttgtaacaagggtacaacctgaaggaccagcatcaaaattactgcagccaggtgataaaattattcaggctaatggctacagttttataaatattgaacatggacaagcagtgtccttgctaaaaactttccagaatacagttgaactcatcattgtacgagaagtttcctcataagcactgtggacaaaaa

SEQ ID NO: 6703 - DNA, 4386 bp, Homo sapiens
  source 1..4386: mol_type = unassigned DNA; mol_type = unassigned DNA
aaaaagctgccctgagacggtgtcccgccgaaagaatgttggctcaattaagaaacatcagggagataaattcaacccagtgtgtctaaaaatgactacaaaacgaagtttgtttgtgcggttggtaccatgtcgctgtctacgaggggaagaggagactgtcactactcttgattattctcattgcagcttagaacaagttccgaaagagatttttacttttgaaaaaaccttggaggaactctatttagatgctaatcagattgaagagcttccaaagcaactttttaactgtcagtctttacacaaactgagtttgccagacaatgatttaacaacgttaccagcatccattgcaaaccttattaatctcagggaactggatgtcagcaagaatggaatacaggagtttccagaaaatataaaaaattgtaaagttttgacaattgtggaggccagtgtaaaccctatttccaagctccctgatggattttctcagctgttaaacctaacccagttgtatctgaatgatgcttttcttgagttcttgccagcaaattttggcagattaactaaactccaaatattagagcttagagaaaaccagttaaaaatgttgcctaaaactatgaatagactgacccagctggaaagactggatttgggaagtaacgaattcacggaagtgcctgaagtacttgagcaactaagtggattgaaagagttttggatggatgctaatagactgacttttattccagggtttattggtagtttgaaacagctcacatatttggatgtttctaaaaataatattgaaatggttgaagaaggaatttcaacatgtgaaaaccttcaagacctcctattatcaagcaattcacttcagcagcttcctgagactattggttcgttgaagaatataacaacgcttaaaatagatgaaaaccagttaatgtatctgccagactctataggagggttaatatcagtagaagaactggattgtagtttcaatgaagttgaagctttgccttcatctattgggcagcttactaacttaagaacttttgctgctgatcataattacttacagcagttgcccccagagattggaagctggaaaaatataactgtgctgtttctccattccaataaacttgagacacttccagaggaaatgggtgatatgcaaaaattaaaagtcattaatttaagtgataatagattaaagaatttaccctttagctttacaaagctacagcaattgacagctatgtggctctcagataatcagtccaaacccctgatacctcttcaaaaagaaactgattcagagacccagaaaatggtgcttaccaactacatgttccctcaacagccaaggactgaggatgttatgtttatatcagataatgaaagttttaacccttcattgtgggaggaacagaggaaacagcgggctcaagttgcatttgaatgtgatgaagacaaagatgaaagggaggcacctcccagggagggaaatttaaaaagatatccaacaccatacccagatgagcttaagaatatggtcaaaactgttcaaaccattgtacatagattaaaagatgaagagaccaatgaagactcaggaagagatttgaaaccacatgaagatcaacaagatataaataaagatgtgggtgtgaagacctcagaaagtactactacagtaaaaagcaaagttgatgaaagagaaaaatatatgataggaaactctgtacagaagatcagtgaacctgaagctgagattagtcctgggagtttaccagtgactgcaaatatgaaagcctctgagaacttgaagcatattgttaaccatgatgatgtttttgaggaatctgaagaactttcttctgatgaagagatgaaaatggcggagatgcgaccaccattaattgaaacctctattaaccagccaaaagtcgtagcacttagtaataacaaaaaagatgatacaaaggaaacagattctttatcagatgaagttacacacaatagcaatcagaataacagcaattgttcttctccatctcggatgtctgattcagtttctcttaatactgatagtagtcaagacacctcactctgctctccagtgaaacaaactcatattgatattaattccaaaatcaggcaagaagatgaaaattttaacagccttttacaaaatggagatattttaaacagttcaacagaggaaaagttcaaagctcatgataaaaaagattttaacttacctgaatatgatttgaatgttgaagagcgattagttctaattgagaaaagtgttgactcaacagccacagctgatgacactcacaaattagatcatatcaatatgaatcttaataaacttataactaatgatacatttcaaccagagatcatggaaagatcaaaaacacaggatattgtgcttggaacaagctttttaagcattaattctaaagaggaaactgagcacttggaaaatggaaacaagtatcctaatttggaatccgtaaataaggtaaatggacattctgaggaaacttcccagtctcctaataggactgaaccacatgacagtgattgttctgttgacttaggtatttccaaaagcactgaagatctctcccctcagaaaagtggtccagttggatctgttgtgaaatctcatagcataactaatatggagattggagggctaaaaatctatgatattcttagtgataatggacctcagcagccaagtacaaccgttaaaatcacatctgctgttgatggaaaaaatatagtcaggagcaagtctgccacactgttgtatgatcaaccattgcaggtatttactggttcttcctcatcttctgatttaatatcaggaacaaaggcaattttcaagtttgattcaaatcataatcccgaagagccaaatataataagaggccccacaagtggcccacaatctgcacctcaaatatatggtcctccacagtataatatccaatacagtagcagtgctgcagtcaaagacactttgtggcactccaaacaaaatccccaaatagaccatgccagttttcctcctcagctccttcctagatcagagagcacagaaaatcaaagttatgctaaacattctgccaatatgaatttctctaatcataacaatgttcgagctaatactgcataccatttacatcagagacttggcccagcaagacatggggaaatgtgggccatctcaccaaacgaccgacttattcctgcagtaactcgaagtacaatccagcgacaaagtagtgtgtcctccacagcctctgtaaatcttggtgatccaggctctacaaggcgggctcagattcctgaaggagattatttatcatacagagagttccactcagcgggaagaactcctccaatgatgccaggatcacagagacccctttctgcacgaacatacagcatagatggtccaaatgcatcaagacctcagagtgctcgaccctctattaatgaaataccagagagaactatgtcagttagtgatttcaattattcacggactagtccttcaaaaagaccaaatgcaagggttggttctgagcattctttattagatcctccaggaaaaagtaaagttcctcgtgactggagagaacaagtacttcgacatattgaagccaaaaagttagaaaagagcatgctgtcaaggtcctttaattccaattttactactgtaagcagttttcactgtggcagctctagggatctgcatggcagccagggcagtcttgccttgagtgttgcagacagaagaggttctggtgggcacatttttcgaatgcctttgagtaatggacagatgggccagcctctcaggcctcaggcaaattatagtcaaatacatcacccccctcaggcatctgtggcaaggcatccctctagagaacaactaattgattacttgatgctgaaagtggcccaccagcctccatatacacagccccattgttctcctagacaaggccatgaactggcaaaacaagagattcgagtgagggttgaaaaggatccagaacttggatttagcatatcaggtggtgtcgggggtagaggaaacccattcagacctgatgatgatggtatatttgtaacaagggtacaacctgaaggaccagcatcaaaattactgcagccaggtgataaaattattcaggctaatggctacagttttataaatattgaacatggacaagcagtgtccttgctaaaaactttccagaatacagttgaactcatcattgtacgagaagtttcctcataagcactgtggacaaaaaaagcggggaagacagcaag

SEQ ID NO: 6704 - DNA, 4374 bp, Homo sapiens
  source 1..4374: mol_type = unassigned DNA; mol_type = unassigned DNA
agaatgttggctcaattaagaaacatcagggagataaattcaacccagtgtgtctaaaaatgactacaaaacgaagtttgtttgtgcggttggtaccatgtcgctgtctacgaggggaagaggagactgtcactactcttgattattctcattgcagcttagaacaagttccgaaagagatttttacttttgaaaaaaccttggaggaactctatttagatgctaatcagattgaagagcttccaaagcaactttttaactgtcagtctttacacaaactgagtttgccagacaatgatttaacaacgttaccagcatccattgcaaaccttattaatctcagggaactggatgtcagcaagaatggaatacaggagtttccagaaaatataaaaaattgtaaagttttgacaattgtggaggccagtgtaaaccctatttccaagctccctgatggattttctcagctgttaaacctaacccagttgtatctgaatgatgcttttcttgagttcttgccagcaaattttggcagattaactaaactccaaatattagagcttagagaaaaccagttaaaaatgttgcctaaaactatgaatagactgacccagctggaaagactggatttgggaagtaacgaattcacggaagtgcctgaagtacttgagcaactaagtggattgaaagagttttggatggatgctaatagactgacttttattccagggtttattggtagtttgaaacagctcacatatttggatgtttctaaaaataatattgaaatggttgaagaaggaatttcaacatgtgaaaaccttcaagacctcctattatcaagcaattcacttcagcagcttcctgagactattggttcgttgaagaatataacaacgcttaaaatagatgaaaaccagttaatgtatctgccagactctataggagggttaatatcagtagaagaactggattgtagtttcaatgaagttgaagctttgccttcatctattgggcagcttactaacttaagaacttttgctgctgatcataattacttacagcagttgcccccagagattggaagctggaaaaatataactgtgctgtttctccattccaataaacttgagacacttccagaggaaatgggtgatatgcaaaaattaaaagtcattaatttaagtgataatagattaaagaatttaccctttagctttacaaagctacagcaattgacagctatgtggctctcagataatcagtccaaacccctgatacctcttcaaaaagaaactgattcagagacccagaaaatggtgcttaccaactacatgttccctcaacagccaaggactgaggatgttatgtttatatcagataatgaaagttttaacccttcattgtgggaggaacagaggaaacagcgggctcaagttgcatttgaatgtgatgaagacaaagatgaaagggaggcacctcccagggagggaaatttaaaaagatatccaacaccatacccagatgagcttaagaatatggtcaaaactgttcaaaccattgtacatagattaaaagatgaagagaccaatgaagactcaggaagagatttgaaaccacatgaagatcaacaagatataaataaagatgtgggtgtgaagacctcagaaagtactactacagtaaaaagcaaagttgatgaaagagaaaaatatatgataggaaactctgtacagaagatcagtgaacctgaagctgagattagtcctgggagtttaccagtgactgcaaatatgaaagcctctgagaacttgaagcatattgttaaccatgatgatgtttttgaggaatctgaagaactttcttctgatgaagagatgaaaatggcggagatgcgaccaccattaattgaaacctctattaaccagccaaaagtcgtagcacttagtaataacaaaaaagatgatacaaaggaaacagattctttatcagatgaagttacacacaatagcaatcagaataacagcaattgttcttctccatctcggatgtctgattcagtttctcttaatactgatagtagtcaagacacctcactctgctctccagtgaaacaaactcatattgatattaattccaaaatcaggcaagaagatgaaaattttaacagccttttacaaaatggagatattttaaacagttcaacagaggaaaagttcaaagctcatgataaaaaagattttaacttacctgaatatgatttgaatgttgaagagcgattagttctaattgagaaaagtgttgactcaacagccacagctgatgacactcacaaattagatcatatcaatatgaatcttaataaacttataactaatgatacatttcaaccagagatcatggaaagatcaaaaacacaggatattgtgcttggaacaagctttttaagcattaattctaaagaggaaactgagcacttggaaaatggaaacaagtatcctaatttggaatccgtaaataaggtaaatggacattctgaggaaacttcccagtctcctaataggactgaaccacatgacagtgattgttctgttgacttaggtatttccaaaagcactgaagatctctcccctcagaaaagtggtccagttggatctgttgtgaaatctcatagcataactaatatggagattggagggctaaaaatctatgatattcttagtgataatggacctcagcagccaagtacaaccgttaaaatcacatctgctgttgatggaaaaaatatagtcaggagcaagtctgccacactgttgtatgatcaaccattgcaggtatttactggttcttcctcatcttctgatttaatatcaggaacaaaggcaattttcaagtttgattcaaatcataatcccgaagagccaaatataataagaggccccacaagtggcccacaatctgcacctcaaatatatggtcctccacagtataatatccaatacagtagcagtgctgcagtcaaagacactttgtggcactccaaacaaaatccccaaatagaccatgccagttttcctcctcagctccttcctagatcagagagcacagaaaatcaaagttatgctaaacattctgccaatatgaatttctctaatcataacaatgttcgagctaatactgcataccatttacatcagagacttggcccagcaagacatggggaaatgtgggccatctcaccaaacgaccgacttattcctgcagtaactcgaagtacaatccagcgacaaagtagtgtgtcctccacagcctctgtaaatcttggtgatccaggctctacaaggcgggctcagattcctgaaggagattatttatcatacagagagttccactcagcgggaagaactcctccaatgatgccaggatcacagagacccctttctgcacgaacatacagcatagatggtccaaatgcatcaagacctcagagtgctcgaccctctattaatgaaataccagagagaactatgtcagttagtgatttcaattattcacggactagtccttcaaaaagaccaaatgcaagggttggttctgagcattctttattagatcctccaggaaaaagtaaagttcctcgtgactggagagaacaagtacttcgacatattgaagccaaaaagttagaaaagattcgagtgagggttgaaaaggatccagaacttggatttagcatatcaggtggtgtcgggggtagaggaaacccattcagacctgatgatgatggtatatttgtaacaagggtacaacctgaaggaccagcatcaaaattactgcagccaggtgataaaattattcaggctaatggctacagttttataaatattgaacatggacaagcagtgtccttgctaaaaactttccagaatacagttgaactcatcattgtacgagaagtttcctcataagcactgtggacaaaaaaagcggggaagacagcaagatttattggaagatacttacaggggaaattaatattttgactatttttatatataaagaagaactcaaaaaattatgttcaaatttgtacattaatgaaataatggaacttgtggttagagggaaagaaccactgtacagaatataaaggagactgttgaattcataccatataaaacttgttaggtttttaaacatagcaatcaaggctacaaaaacaaacctgtgttgtttttgtatagattgtaggtttatttttggatttcatatacatgactgaactgtgtgcaaggcaatagttagccttgattttagcccagagacagatggcagagctatctctctcatagcttttatgcccttatttttatt

SEQ ID NO: 6705 - DNA, 561 bp, Homo sapiens
  source 1..561: mol_type = unassigned DNA; mol_type = unassigned DNA
tttgtaatttttctgttttctaaaagctgtatcttcttactgataatgcatgagtgcatatttttattgtatacttctaagcagtgagtcctattttttatttctttacaaattatataaaaacttgcccctgttgtgtaatccaaagcttaaatgtgttttttgtaatctactgctatggcatgtctctttgatttctccattaataattttctataataattttactgtagtaactataatgcagtagaaaggcttacatcctggctcttcttttttatttttccttctccctgctccttttatttaatgatttgaaactaaaggttattagaaattcccagggcttcttttgccagataaagacattcataaaaattaattgaattactgctatcccctaccctaatcccaacagcctgaagtacttgagcaactaagtggattgaaagagttttggatggatgctaatagactgacttttattccagggtttattggtagtttgaaacagctcacatatttggatgtttctaaaaataatattgaaatggttgaaga

SEQ ID NO: 6706 - DNA, 377 bp, Homo sapiens
  source 1..377: mol_type = unassigned DNA; mol_type = unassigned DNA
aaggacaggatgagggaatagaacattgggattgggagtggtatctcttttagatacgtttgttaggaaagttgtttctaattcttgtcagatgtagtatgtctcacactgactgttggtggacttgcttctattttaagctgaaaaattgtatgttgtttcttccctcattaggttcgttgaagaatataacaacgcttaaaatagatgaaaaccagttaatgtatctgccagactctataggagggttaatatcagtagaagaactggattgtagtttcaatgaagttgaagctttgccttcatctattgggcagcttactaacttaagaacttttgctgctgatcataattacttacagcagttgcccccagag

SEQ ID NO: 6707 - DNA, 589 bp, Homo sapiens
  source 1..589: mol_type = unassigned DNA; mol_type = unassigned DNA
atcatacagagagttccactcagcgggaagaactcctccaatgatgccaggatcacagagacccctttctgcacgaacatacagcatagatggtccaaatgcatcaagacctcagagtgctcgaccctctattaatgaaataccagagagaactatgtcagttagtgatttcaattattcacggactagtccttcaaaaagaccaaatgcaagggttggttctgagcattctttattagatcctccaggaaaaagtaaagttcctcgtgactggagagaacaagtacttcgacatattgaagccaaaaagttagaaaagagcatgctgtcaaggtcctttaattccaattttactactgtaagcagttttcactgtggcagctctagggatctgcatggcagccagggcagtcttgccttgagtgttgcagacagaagaggttctggtgggcacatttttcgaaagcatccccagacatccagttcaggagatccttgtcaagatggtatattcatttcaggacagcagaactactcatcagccacacttagtcacaaagatgttcctccagacagcttgatgaaagtg

SEQ ID NO: 6708 - DNA, 544 bp, Homo sapiens
  source 1..544: mol_type = unassigned DNA; mol_type = unassigned DNA
tttttctctggtactgggaatagagttccaaatttaaactcagccaggacaattgggatgataatattcgagtgagggttgaaaaggatccagaacttggatttagcatatcaggtggtgtcgggggtagaggaaacccattcagacctgatgatgatggtatatttgtaacaagggtacaacctgaaggaccagcatcaaaattactgcagccaggtgataaaattattcaggctaatggctacagttttataaatattgaacatggacaagcagtgtccttgctaaaaactttccagaatacagttgaactcatcattgtacgagaagtttcctcataagcactgtggacaaaaaaagcggggaagacagcaagatttattggaagatacttacaggggaaattaatattttgactatttttatatataaagaagaactcaaaaaattatgttcaaatttgtacattaatgaaataatggaacttgtggttagagggaaagaaccactgtacagaatataaaggagactgttgaattcatac

SEQ ID NO: 6709 - DNA, 474 bp, Homo sapiens
  source 1..474: mol_type = unassigned DNA; mol_type = unassigned DNA
agcatgctgtcaaggtcctttaattccaattttactactgtaagcagttttcactgtggcagctctagggatctgcatggcagccagggcagtcttgccttgagtgttgcagacagaagaggttctggtgggcacatttttcgaaagcatccccagacatccagttcaggagatccttgtcaagatggtatattcatttcaggacagcagaactactcatcagccacacttagtcacaaagatgttcctccagacagcttgatgaaaatgcctttgagtaatggacagatgggccagcctctcaggcctcaggcaaattatagtcaaatacatcacccccctcaggcatctgtggcaaggcatccctctagagaacaactaattgattacttgatgctgaaagtggcccaccagcctccatatacacagccccattgttctcctagacaaggccatgaactggcaaaacaagag

SEQ ID NO: 6710 - DNA, 367 bp, Homo sapiens
  source 1..367: mol_type = unassigned DNA; mol_type = unassigned DNA
cttgatgctgaaagtggcccaccagcctccatatacacagccccattgttctcctagacaaggccatgaactggcaaaacaagagattcgagtgagggttgaaaaggatccagaacttggatttagcatatcaggtggtgtcgggggtagaggaaacccattcagacctgatgatgatgtaagttttctttgtatattcttgaaacacctataaagttttatttaccgattgaatacttaaatgtaagtgaaaatctaatagatgtttatgtaaatctaggtagacatcacctggattccccactctattgcttacctttttgttttgtaatttgatcagttcaagttaaaacaatttaaccaaaaa

SEQ ID NO: 6711 - DNA, 641 bp, Homo sapiens
  source 1..641: mol_type = unassigned DNA; mol_type = unassigned DNA
ataatcccagctctgcctttaactcactaactcattaacataatattctatgttgtatttcacttcatctgaccaaatatttatttttgatgaattcttatgtttatgtttgcttggacttaaccaatcagtatttaaatatggatgttgttgcattataactttttctgaaatagtaagtttcctttattttcatattaactcagattcgagtgagggttgaaaaggatccagaacttggatttagcatatcaggtggtgtcgggggtagaggaaacccattcagacctgatgatgatggtatatttgtaacaagggtacaacctgaaggaccagcatcaaaattactgcagccaggtgataaaattattcaggctaatggctacagttttataaatattgaacatggacaagcagtgtccttgctaaaaactttccagaatacagttgaactcatcattgtacgagaagtttcctcataagcactgtggacaaaaaaagcggggaagacagcaagatttattggaagatacttacaggggaaattaatattttgactatttttatatataaagaagaactcaaaaaattatgttcaaatttgtacattaatgaaataatggaacttgtggttagaggga

SEQ ID NO: 6712 - DNA, 673 bp, Homo sapiens
  source 1..673: mol_type = unassigned DNA; mol_type = unassigned DNA
gtaagttttctttgtatattcttgaaacacctataaagttttatttaccgattgaatacttaaatgtaagtgaaaatctaatagatgtttatgtaaatctaggtagacatcacctggattccccactctattgcttacctttttgttttgtaatttgatcagttcaagttaaaacaatttaaccaaaaactatgaatgtttatgatataatgaaatgatttttaactttcttattgctttttcacacacctataaaagtaattttattactctcaagagaaatcactaaagtcagaattactagaggtaaaaataactagtttgttacagtattactcagagaagtcagggagaaaacttgtaccatgattcaaatatttgcatggtgtggaggaaaaattgctccttggtactctgttatttatacatactgtttttagttaaataattttttttgttgttaaagggtatatttgtaacaagggtacaacctgaaggaccagcatcaaaattactgcagccaggtgataaaattattcaggctaatggctacagttttataaatattgaacatggacaagcagtgtccttgctaaaaactttccagaatacagttgaactcatcattgtacgagaagtttcctcataagcactgtggacaaaaaaagcgggg

SEQ ID NO: 6713 - DNA, 6692 bp, Homo sapiens
  source 1..6692: mol_type = unassigned DNA; mol_type = unassigned DNA
cggcggagatcctcgttggggctgggaaactcctgcaaaactcgagaccaggaagccagcccgcaccccaacccccaccaaagccacctactcttcttctgtgggaggccagtccacatccgctctcacccgagagagatattcagctggatccaaagtgactgatgaagggaaggaaatcatgtcaagcgaagccttgaaaaagctgccctgagacggtgtcccgccgaaagaatgttggctcaattaagaaacatcagggagataaattcaacccagtgtgtctaaaaatgactacaaaacgaagtttgtttgtgcggttggtaccatgtcgctgtctacgaggggaagaggagactgtcactactcttgattattctcattgcagcttagaacaagttccgaaagagatttttacttttgaaaaaaccttggaggaactctatttagatgctaatcagattgaagagcttccaaagcaactttttaactgtcagtctttacacaaactgagtttgccagacaatgatttaacaacgttaccagcatccattgcaaaccttattaatctcagggaactggatgtcagcaagaatggaatacaggagtttccagaaaatataaaaaattgtaaagttttgacaattgtggaggccagtgtaaaccctatttccaagctccctgatggattttctcagctgttaaacctaacccagttgtatctgaatgatgcttttcttgagttcttgccagcaaattttggcagattaactaaactccaaatattagagcttagagaaaaccagttaaaaatgttgcctaaaactatgaatagactgacccagctggaaagactggatttgggaagtaacgaattcacggaagtgcctgaagtacttgagcaactaagtggattgaaagagttttggatggatgctaatagactgacttttattccagggtttattggtagtttgaaacagctcacatatttggatgtttctaaaaataatattgaaatggttgaagaaggaatttcaacatgtgaaaaccttcaagacctcctattatcaagcaattcacttcagcagcttcctgagactattggttcgttgaagaatataacaacgcttaaaatagatgaaaaccagttaatgtatctgccagactctataggagggttaatatcagtagaagaactggattgtagtttcaatgaagttgaagctttgccttcatctattgggcagcttactaacttaagaacttttgctgctgatcataattacttacagcagttgcccccagagattggaagctggaaaaatataactgtgctgtttctccattccaataaacttgagacacttccagaggaaatgggtgatatgcaaaaattaaaagtcattaatttaagtgataatagattaaagaatttaccctttagctttacaaagctacagcaattgacagctatgtggctctcagataatcagtccaaacccctgatacctcttcaaaaagaaactgattcagagacccagaaaatggtgcttaccaactacatgttccctcaacagccaaggactgaggatgttatgtttatatcagataatgaaagttttaacccttcattgtgggaggaacagaggaaacagcgggctcaagttgcatttgaatgtgatgaagacaaagatgaaagggaggcacctcccagggagggaaatttaaaaagatatccaacaccatacccagatgagcttaagaatatggtcaaaactgttcaaaccattgtacatagattaaaagatgaagagaccaatgaagactcaggaagagatttgaaaccacatgaagatcaacaagatataaataaagatgtgggtgtgaagacctcagaaagtactactacagtaaaaagcaaagttgatgaaagagaaaaatatatgataggaaactctgtacagaagatcagtgaacctgaagctgagattagtcctgggagtttaccagtgactgcaaatatgaaagcctctgagaacttgaagcatattgttaaccatgatgatgtttttgaggaatctgaagaactttcttctgatgaagagatgaaaatggcggagatgcgaccaccattaattgaaacctctattaaccagccaaaagtcgtagcacttagtaataacaaaaaagatgatacaaaggaaacagattctttatcagatgaagttacacacaatagcaatcagaataacagcaattgttcttctccatctcggatgtctgattcagtttctcttaatactgatagtagtcaagacacctcactctgctctccagtgaaacaaactcatattgatattaattccaaaatcaggcaagaagatgaaaattttaacagccttttacaaaatggagatattttaaacagttcaacagaggaaaagttcaaagctcatgataaaaaagattttaacttacctgaatatgatttgaatgttgaagagcgattagttctaattgagaaaagtgttgactcaacagccacagctgatgacactcacaaattagatcatatcaatatgaatcttaataaacttataactaatgatacatttcaaccagagatcatggaaagatcaaaaacacaggatattgtgcttggaacaagctttttaagcattaattctaaagaggaaactgagcacttggaaaatggaaacaagtatcctaatttggaatccgtaaataaggtaaatggacattctgaggaaacttcccagtctcctaataggactgaaccacatgacagtgattgttctgttgacttaggtatttccaaaagcactgaagatctctcccctcagaaaagtggtccagttggatctgttgtgaaatctcatagcataactaatatggagattggagggctaaaaatctatgatattcttagtgataatggacctcagcagccaagtacaaccgttaaaatcacatctgctgttgatggaaaaaatatagtcaggagcaagtctgccacactgttgtatgatcaaccattgcaggtatttactggttcttcctcatcttctgatttaatatcaggaacaaaggcaattttcaagtttgattcaaatcataatcccgaagagccaaatataataagaggccccacaagtggcccacaatctgcacctcaaatatatggtcctccacagtataatatccaatacagtagcagtgctgcagtcaaagacactttgtggcactccaaacaaaatccccaaatagaccatgccagttttcctcctcagctccttcctagatcagagagcacagaaaatcaaagttatgctaaacattctgccaatatgaatttctctaatcataacaatgttcgagctaatactgcataccatttacatcagagacttggcccagcaagacatggggaaatgtgggccatctcaccaaacgaccgacttattcctgcagtaactcgaagtacaatccagcgacaaagtagtgtgtcctccacagcctctgtaaatcttggtgatccaggctctacaaggcgggctcagattcctgaaggagattatttatcatacagagagttccactcagcgggaagaactcctccaatgatgccaggatcacagagacccctttctgcacgaacatacagcatagatggtccaaatgcatcaagacctcagagtgctcgaccctctattaatgaaataccagagagaactatgtcagttagtgatttcaattattcacggactagtccttcaaaaagaccaaatgcaagggttggttctgagcattctttattagatcctccaggaaaaagtaaagttcctcgtgactggagagaacaagtacttcgacatattgaagccaaaaagttagaaaagattcgagtgagggttgaaaaggatccagaacttggatttagcatatcaggtggtgtcgggggtagaggaaacccattcagacctgatgatgatggtatatttgtaacaagggtacaacctgaaggaccagcatcaaaattactgcagccaggtgataaaattattcaggctaatggctacagttttataaatattgaacatggacaagcagtgtccttgctaaaaactttccagaatacagttgaactcatcattgtacgagaagtttcctcataagcactgtggacaaaaaaagcggggaagacagcaagatttattggaagatacttacaggggaaattaatattttgactatttttatatataaagaagaactcaaaaaattatgttcaaatttgtacattaatgaaataatggaacttgtggttagagggaaagaaccactgtacagaatataaaggagactgttgaattcataccatataaaacttgttaggtttttaaacatagcaatcaaggctacaaaaacaaacctgtgttgtttttgtatagattgtaggtttatttttggatttcatatacatgactgaactgtgtgcaaggcaatagttagccttgattttagcccagagacagatggcagagctatctctctcatagcttttatgcccttatttttattcaactggtattaatgtttttctcctgaaactactttttttgatgtgggcaagagatttgaagtgttggcttttgctatgtgcatattgaattgaagagtgagtaggtgaaggtggtgctggtgggttcactttccaaggccagactaaaacagttattttctataaaaatctggaagcaaagaatggggatggggagagctacgtggtagtatgtttttattaggagaataatgcaataaaatatgtaatgtcttttttataaagcaaaaaagacaataattgcatttatgagctcggcaggatctgttcttgtcatagccattgactatacatttgctactggtgattcagtttttaattttttagtcacaggaaatttttaactctactgtagatgcatgtccatgcattttctgtgttatggaaatccactgatttttttttttttttcaaatggtggtacttgcaatctgttttataattagtgctccatttaaatctaatttataatttttattttaagcagcaaatgaaacaaaaatggccagttttaagattgtgttgcctgtaacacaaaatgttacgaaggtttaggaaagcctctttgatttttgtttggccttgcattgccttggtaaagtaaaaggaaacagtacacttggagctaggaaaccaaagcaagctttgtgaaactggcacagtgatagagaattgctgtggagagttatagagcaaagggatgggtccttgaggcctgccagtgtgtaaaggtgttcaaataaagggctgtttctacaggtaacattaaatgtgaactcaacacttccagagtctttaaagggtttctatgtgtatcagtgtaatagtgttttaccaccaactgcctttctttgttcctagttactgtaacaaatatttgatgatagaggtttattaattttgtttatccagaccattaattttatttgtttttgttctatgtaatcaaataaaatttgagtaacatgtaatggtaaggattaatgcatggttatttggaccagaaaaaagtgccatagaagaccaataactgtttagttgaggctagtctggaacctttcattagagcaatatttggttattgcacttcatttttatttactaagaaatgcaatttgggaatttttaatctgttatgctttgtttatcaaccttgattttaattaagacttttataagactagcttaaaacaccaaccaacattatttttgcaaaagtgagttggactcactttccattcttgctagtcagagtaagtaggcagcacttttaaaaatatgtgaactcaaatattgcacttctttcaagatgttatcaattggttattgtactgtatagttttaataattttgattgaaaccctttaacaactctttgtaaattttaactcattttagttgattttcagtactatttacataggaattgatttttatggatatagtagaagaaatgtgctgtattttgataaaattcacttattgtatgtgtgttgtaatctaaaaaaaaaaagaatgacaaacagcttctttaagacaagtctcggtgttccctttattcttagtttgtttttaaatattaattttggcattctaaaatagctaacatttcttttattgatttcagattttcacaggcacattctacttttaatcagaaatatatttaataagtataattgtgaagttttcaactactttaccttgaaccacatataccaattataattttggaaaaggaattaagcctcacggaacaatggatcttcagcaaaccttaacttcattgtctgcacattacattgaagtattataaatgcaacagatgttatatgcactggcattttatcctactctagttagttaaaattttatagtattcttgcaacacataaagttgcgtaagaaactttaccaagaggagtattatagccaagttttctttgaaagtattggaaaactaaaattaaatgacaaggactttgaattagaattttgctgtaataaagtttcaaaatttgaataaaataattaaattttttgagga

SEQ ID NO: 6714 - DNA, 6138 bp, Homo sapiens
  source 1..6138: mol_type = unassigned DNA; mol_type = unassigned DNA
gctcgctcggtctccggctccggcgccggctcctgctcctcctggccgcccggggccaaggcgacgagaggttgtaaaaatccatgtgggacggccccggggcgagcatcggaaagatctctgagtggagttattttctggtacggactgtgaaaagaatgcggtgaaaattctggacaatcgtggaaatattagctcaaaccccaacttaatatagcatttcttctcttcagtaacacctcataatacaagaaaaatgtatggaagtgcaagaacaatcaccaatctggaaggtagcccttccagatcccctcgtttgccaaggtctcctcgtttgggccaccgaagaacaagtagtgggggaggtggaggaacaggcaagactctgtctatggagaatatccagtccctcaatgcagcctatgctacgtctggacccatgtatctgagtgatcatgaaggggtggcttcaacaacctacccaaagggcactatgactctgggaagggctacaaatcgagctgtatatggaggccgtgtcacagccatggggagtagtcccaatattgcttctgctggactttcccacacagatgtcctttcatacacagatcaacatggtgggctgactggctcatcccatcatcaccaccaccaggtcccctccatgttgaggcaggtaagagacagcacaatgttagatcttcaggcccagctgaaagaactgcagagagagaatgacctcctccggaaagagctagacatcaaggacagcaaattgggatcttccatgaacagtattaagactttctggagtcctgagcttaagaaggagagagtcttgaggaaagaagaggcagcgcggatgtctgtcctcaaggagcagatgagggtttcccatgaagaaaatcagcacctacagttgacaatccaggcccttcaagatgagctgcgaacccagagagacctcaaccacctcctccagcaagagagtggcaaccgaggagcggagcacttcaccatcgagctgaccgaggagaactttaggcggctccaagccgagcatgacaggcaggctaaggagctgttccttttgaggaagacattagaggaaatggagctgagaattgaaacgcagaaacaaaccctcaatgcccgagatgagtcaattaaaaaacttcttgagatgttgcaaagtaaaggcttgccatccaaaagcctggaggatgacaatgagcgaacgcggcggatggcagaggctgagtctcaggtcagccacttggaagtgattttagatcagaaagagaaggaaaacatacatcttagagaggaattgcaccgaagaagccaacttcagccggagccagccaagacgaaggctctccagactgtcatcgaaatgaaggacacaaaaatcgcttcattggaacgaaacataagggatcttgaggatgagatccagatgttaaaagccaatggtgtgctgaacactgaggaccgcgaagaagagatcaaacaaattgaggtttacaaaagtcactccaagtttatgaagaccaagattgatcagctgaagcaggaactttcaaagaaagagtcggaacttcttgccttacaaacaaagcttgaaaccctcagcaatcaaaattcagattgcaagcaacacattgaagtgctcaaagagtcacttactgccaaagaacagagggctgccatccttcagactgaggtagatgcgctgagattacgactggaagaaaaagaatctttcctcaataaaaaaacaaaacagctacaggacctcacagaagagaaggggacactggccggtgaaattcgtgacatgaaagatatgttagaagtgaaggaaagaaaaatcaatgttcttcagaaaaagattgaaaacttgcaagaacaacttagggataaagacaagcaactgaccaacctgaaagacagagtgaagtccttgcagacggattccagtaatacagatactgcactggcgacgctagaggaagctctgtcagagaaggagagaataattgagcgcttgaaagaacagcgagaaagagatgatcgggaaagactagaagagatagaatccttccgaaaagagaacaaagacctgaaagagaaggtcaatgctttacaggctgaactgactgagaaagagtctagtttaattgacctcaaagaacatgcatcttcattagcctctgcggggctgaaaagggattccaaattaaaatctctagaaatagccattgaacaaaagaaagaggaatgtagcaaattggaagcacagttaaaaaaggcacataatattgaagatgactccaggatgaaccctgagtttgcagaccaaataaaacagctcgataaagaggcgtcttactaccgcgacgagtgtggcaaggcccaagcggaagtggaccggttgctggagatcctcaaggaggtggagaatgagaagaatgacaaggacaagaagatcgcagaactggagagcttgactctcaggcatatgaaagatcagaataagaaggtggccaacctcaagcacaatcaacagttggaaaagaagaaaaatgctcagttactagaagaagtgcgcaggcgagaagacagcatggctgacaactcacagcatttgcagatagaggaactgatgaatgcactggagaagaccagacaggaactggatgccaccaaagcacgcctcgcctccacacaacagtccctggccgaaaaagaagcgcacttggccaacctccggattgagaggaggaaacagctggaggagatcctggagatgaaacaggaagcactacttgcagccatcagtgaaaaagatgcaaacattgccttgctggaattgtctgcctccaaaaagaaaaagacgcaggaagaagtcatggccctcaagcgggaaaaagaccgactagtacatcaattaaagcagcagacccagaacagaatgaagttgatggcagacaactatgatgatgaccatcaccattaccaccaccaccaccatcaccaccaccatcgatctcctgggaggtcgcaacattccaatcacaggccctctccggaccaggatgacgaggagggcatatgggcatagccgggcctgtaaaccaaagttccagttttgttttgagggctattagaagggctgaataaagggaacatgcagctctgcagcaatattctgataatgtattgcagtgcggctcacatcactgtccaccaccacctggagcggctcatcagaactgaaggggagttttcacttaccttattgagcgtgattctgttctacttgatatttccttcaccacctcatgtcatttctcatggatttggttatgatggaaaggaagaatgcagaggaggagaaaagtgacagatcctccatttttgttgggatgcgggcattttgaatgtgatcatctttgctgaatgtcattatttgataacattttgtttatgttacttaaacatcattggataaatttgaactccatgggattttatctgtggattcagcttctgttggacaactagcctcatctccagtatcctgctggttcactctaattggtcattcctaatgcattagattatcaaaaagtataaattcgctgtgagtgagtggtgttggcagtgtttgtataccatgatgcatggagtgtttgacgaagaaacaaaaaacaccaaaaattgcgagcctttaccctcctctatttctttaatctgttgtttgaagaaccgcattttgagggtgtaaccagtagtcacctctgggccaggttggaaaagaaatcaattttttaaaccactaatgcttgccaagaaatcgccttatgagaacatggtgtgtgtctctgacaatgcgtggcacatctaaattgatcattcataattttatctacccagtcatgtactggagagtggcaaaagtctgaggcacctgcatatctctagtccctgtgttctgcacatccccacggtggggacgccaccaagcctcagactcttaccatcccggtgcatgcaggtctccatgaagaagctgggactcattcacatttcaagatccaaatgctgtgcaaacagtgtaagcttagattttctgtaaatgaagggtcatttctctttttttttttttttaaagaaaatgtgtctgcaacatggattccaaagcattttcagcatcaaacatgaaaacattgatgaatgaggaacaatcacaaaagctgtgtctctgtatatagctctacacaacatgtatgtggatacagtcattatttaaagcacatgccagggaaaaagaccaaattttgaggtcttttacatacagtgatatggtactaaggagaattaaactcctactgcttcctctgaatattaagaaacaatttaaattgttataacttcataaaactcatgactgagtctggcaaacatgtgcaactcttgtattgctccattttcttgtcaatggaagaaacccttccacgtgtatgcaagtgggagatgaaaacctgcatttttaaaggacaaacagtgaatttaagcatgagtggccttaataaatatagttgtctttctttgctgctgtggaaaggattctaaacagatgtccctgaagtcttgcattgaatttagtcattattattactttttaaaatgttggtgcaattaactctggacctctcttgtgagccatagagatatttaaaagacaaacaccttatttgtcggggaagatgaaaccgtccctgagttgcaccattctttcttggtgcattcgcggttaagatactcaagcaggtttcttgcttctggctttgttcttgtcatcagtaagtataacaaactatgtaatgcttatgtgttgcataaacaatccaaatgcattcatgttttaaaagtttgtcctttaactatcagagggatctaggtcttggttagagaagtaagcagagttctttgcaagcttatttagcacattttgacacaatgttgcactgaaaacccaggccacaaatgtgtcccagtgaacagtttggatgtcctcaaagaagtggttctcactgcctcctacaaccaggtcttgacctgaactctgcaactgaatacttgaagtaggaagtaggaaatccagtagggaaaatagggtccttgaaacagaaaaaaaaaaccaacccatgtatagctagctatttctatgtatgtgccaattttgtcacagctcttgtttggagggatcattttctgcccaactttcattggttaaaatattactgatcttacctttatgaggtcgtataatttagtcccttaaaaattaaattctctctaacataacaacctttcccatttcgtgtaatattctctgatgtttgggggttaccaaaaatatccctttttcacatattaagaatagtctctgggtttacaacaaacactgtgatgttgggaagctatttcctttgcgcaaactttaacaggttttcttctaatcataacatagttgaaaaaagaagtttgggctaacatttaggagaagttggtcttactttgtgcaaaagcaggcttgtgctttataccccatttgatttcgatgtacagtctcaattttgtatttaatgatttttgtgtatccagtatgcacgttaacagcgtgtcaactttcatttgaaagtgggtttcaatttactttttaaacagtgtttatgacgagacctcagatgtgttgacgtaagctctatctgcaatgtttttgtgtagagtggcgattgaatgctgcccagggtcagtgtatctaattccccgagaccctcgtttgatagtgcttcttgtaatatttcttcaagtgagtggcatgtgggttgtgatattgaccatgtgattatggacatcgatatgaaaaataaataaataaaactaaggaaccctggaaactaccagtgggcatgtattagccagtcattgtaacctcgtgtctagtagaacaatgtacaaggtatgtacagttcataaatttgttgtcatgtgtatgagaagtactttgtgctgatcgccttatttatattcatcaaataaaccttgtttctttctgaagtg

SEQ ID NO: 6715 - DNA, 3488 bp, Homo sapiens
  source 1..3488: mol_type = unassigned DNA; mol_type = unassigned DNA
gagaagctgagcacccatgctggaactcaccatatagatgcctcactgcttttcatttctaagtttctcctccatgtctttttcctcttgccagtgtttagataaaattatttctatttgatacatttttcttcactcttgtccttaatgggtcaagtctcatgtggcttcatagccctgacagacagtagtattgctattttggagtcaaggtctcgttctgtcggccaagctggagtgcagtggcaccatcagggctcactgcagccttgacctccgaggctcaaggaatcctcccacctcagcctcagccttccggatagttggtactacagatgatccagctctgtcggaggcacgtaggcacagccaaatctcatgctgtacattgatcacctgtccaacctttgcctagagtgggagcccccagttccttcgagatccaacattacctgtctgtaaagaagaagaggaggagggagacagcggggaggatccggtggcagtttaacaccagagcagctattagaagggctgaataaagggaacatgcagctctgcagcaatattctgataatgtattgcagtgcggctcacatcactgtccaccaccacctggagcggctcatcagaactgaaggggagttttcacttaccttattgagcgtgattctgttctacttgatatttccttcaccacctcatgtcatttctcatggatttggttatgatggaaaggaagaatgcagaggaggagaaaagtgacagatcctccatttttgttgggatgcgggcattttgaatgtgatcatctttgctgaatgtcattatttgataacattttgtttatgttacttaaacatcattggataaatttgaactccatgggattttatctgtggattcagcttctgttggacaactagcctcatctccagtatcctgctggttcactctaattggtcattcctaatgcattagattatcaaaaagtataaattcgctgtgagtgagtggtgttggcagtgtttgtataccatgatgcatggagtgtttgacgaagaaacaaaaaacaccaaaaattgcgagcctttaccctcctctatttctttaatctgttgtttgaagaaccgcattttgagggtgtaaccagtagtcacctctgggccaggttggaaaagaaatcaattttttaaaccactaatgcttgccaagaaatcgccttatgagaacatggtgtgtgtctctgacaatgcgtggcacatctaaattgatcattcataattttatctacccagtcatgtactggagagtggcaaaagtctgaggcacctgcatatctctagtccctgtgttctgcacatccccacggtggggacgccaccaagcctcagactcttaccatcccggtgcatgcaggtctccatgaagaagctgggactcattcacatttcaagatccaaatgctgtgcaaacagtgtaagcttagattttctgtaaatgaagggtcatttctctttttttttttttttaaagaaaatgtgtctgcaacatggattccaaagcattttcagcatcaaacatgaaaacattgatgaatgaggaacaatcacaaaagctgtgtctctgtatatagctctacacaacatgtatgtggatacagtcattatttaaagcacatgccagggaaaaagaccaaattttgaggtcttttacatacagtgatatggtactaaggagaattaaactcctactgcttcctctgaatattaagaaacaatttaaattgttataacttcataaaactcatgactgagtctggcaaacatgtgcaactcttgtattgctccattttcttgtcaatggaagaaacccttccacgtgtatgcaagtgggagatgaaaacctgcatttttaaaggacaaacagtgaatttaagcatgagtggccttaataaatatagttgtctttctttgctgctgtggaaaggattctaaacagatgtccctgaagtcttgcattgaatttagtcattattattactttttaaaatgttggtgcaattaactctggacctctcttgtgagccatagagatatttaaaagacaaacaccttatttgtcggggaagatgaaaccgtccctgagttgcaccattctttcttggtgcattcgcggttaagatactcaagcaggtttcttgcttctggctttgttcttgtcatcagtaagtataacaaactatgtaatgcttatgtgttgcataaacaatccaaatgcattcatgttttaaaagtttgtcctttaactatcagagggatctaggtcttggttagagaagtaagcagagttctttgcaagcttatttagcacattttgacacaatgttgcactgaaaacccaggccacaaatgtgtcccagtgaacagtttggatgtcctcaaagaagtggttctcactgcctcctacaaccaggtcttgacctgaactctgcaactgaatacttgaagtaggaagtaggaaatccagtagggaaaatagggtccttgaaacagaaaaaaaaaaccaacccatgtatagctagctatttctatgtatgtgccaattttgtcacagctcttgtttggagggatcattttctgcccaactttcattggttaaaatattactgatcttacctttatgaggtcgtataatttagtcccttaaaaattaaattctctctaacataacaacctttcccatttcgtgtaatattctctgatgtttgggggttaccaaaaatatccctttttcacatattaagaatagtctctgggtttacaacaaacactgtgatgttgggaagctatttcctttgcgcaaactttaacaggttttcttctaatcataacatagttgaaaaaagaagtttgggctaacatttaggagaagttggtcttactttgtgcaaaagcaggcttgtgctttataccccatttgatttcgatgtacagtctcaattttgtatttaatgatttttgtgtatccagtatgcacgttaacagcgtgtcaactttcatttgaaagtgggtttcaatttactttttaaacagtgtttatgacgagacctcagatgtgttgacgtaagctctatctgcaatgtttttgtgtagagtggcgattgaatgctgcccagggtcagtgtatctaattccccgagaccctcgtttgatagtgcttcttgtaatatttcttcaagtgagtggcatgtgggttgtgatattgaccatgtgattatggacatcgatatgaaaaataaataaataaaactaaggaaccctggaaactaccagtgggcatgtattagccagtcattgtaacctcgtgtctagtagaacaatgtacaaggtatgtacagttcataaatttgttgtcatgtgtatgagaagtactttgtgctgatcgccttatttatattcatcaaataaaccttgtttctttctgaa

SEQ ID NO: 6716 - DNA, 2594 bp, Homo sapiens
  source 1..2594: mol_type = unassigned DNA; mol_type = unassigned DNA
gagaagctgagcacccatgctggaactcaccatatagatgcctcactgcttttcatttctaagtttctcctccatgtctttttcctcttgccagtgtttagataaaattatttctatttgatacatttttcttcactcttgtccttaatgggtcaagtctcatgtggcttcatagccctgacagacagtagtattgctattttggagtcaaggtctcgttctgtcggccaagctggagtgcagtggcaccatcagggctcactgcagccttgacctccgaggctcaaggaatcctcccacctcagcctcagccttccggatagttggtactacagatgatccagctctgtcggaggcacgtaggcacagccaaatctcatgctgtacattgatcacctgtccaacctttgcctagagtgggagcccccagttccttcgagatccaacattacctgtctgtaaagaagaagaggaggagggagacagcggggaggatccggtggcagtttaacaccagagcaggtccaatgtttacttttacccttttggagctattagaagggctgaataaagggaacatgcagctctgcagcaatattctgataatgtattgcagtgcggctcacatcactgtccaccaccacctggagcggctcatcagaactgaaggggagttttcacttaccttattgagcgtgattctgttctacttgatatttccttcaccacctcatgtcatttctcatggatttggttatgatggaaaggaagaatgcagaggaggagaaaagtgacagatcctccatttttgttgggatgcgggcattttgaatgtgatcatctttgctgaatgtcattatttgataacattttgtttatgttacttaaacatcattggataaatttgaactccatgggattttatctgtggattcagcttctgttggacaactagcctcatctccagtatcctgctggttcactctaattggtcattcctaatgcattagattatcaaaaagtataaattcgctgtgagtgagtggtgttggcagtgtttgtataccatgatgcatggagtgtttgacgaagaaacaaaaaacaccaaaaattgcgagcctttaccctcctctatttctttaatctgttgtttgaagaaccgcattttgagggtgtaaccagtagtcacctctgggccaggttggaaaagaaatcaattttttaaaccactaatgcttgccaagaaatcgccttatgagaacatggtgtgtgtctctgacaatgcgtggcacatctaaattgatcattcataattttatctacccagtcatgtactggagagtggcaaaagtctgaggcacctgcatatctctagtccctgtgttctgcacatccccacggtggggacgccaccaagcctcagactcttaccatcccggtgcatgcaggtctccatgaagaagctgggactcattcacatttcaagatccaaatgctgtgcaaacagtgtaagcttagattttctgtaaatgaagggtcatttctctttttttttttttttaaagaaaatgtgtctgcaacatggattccaaagcattttcagcatcaaacatgaaaacattgatgaatgaggaacaatcacaaaagctgtgtctctgtatatagctctacacaacatgtatgtggatacagtcattatttaaagcacatgccagggaaaaagaccaaattttgaggtcttttacatacagtgatatggtactaaggagaattaaactcctactgcttcctctgaatattaagaaacaatttaaattgttataacttcataaaactcatgactgagtctggcaaacatgtgcaactcttgtattgctccattttcttgtcaatggaagaaacccttccacgtgtatgcaagtgggagatgaaaacctgcatttttaaaggacaaacagtgaatttaagcatgagtggccttaataaatatagttgtctttctttgctgctgtggaaaggattctaaacagatgtccctgaagtcttgcattgaatttagtcattattattactttttaaaatgttggtgcaattaactctggacctctcttgtgagccatagagatatttaaaagacaaacaccttatttgtcggggaagatgaaaccgtccctgagttgcaccattctttcttggtgcattcgcggttaagatactcaagcaggtttcttgcttctggctttgttcttgtcatcagtaagtataacaaactatgtaatgcttatgtgttgcataaacaatccaaatgcattcatgttttaaaagtttgtcctttaactatcagagggatctaggtcttggttagagaagtaagcagagttctttgcaagcttatttagcacattttgacacaatgttgcactgaaaacccaggccacaaatgtgtcccagtgaacagtttggatgtcctcaaagaagtggttctcactgcctcctacaaccaggtcttgacctgaactctgcaactgaatacttgaagtaggaagtaggaaatccagtagggaaaatagggtccttgaaacagaaaaaaaaaa

SEQ ID NO: 6717 - DNA, 968 bp, Homo sapiens
  source 1..968: mol_type = unassigned DNA; mol_type = unassigned DNA
tcatgtctgcgatagccttttagacgtcaacaccaaggatgatccagctctgtcggaggcacgtaggcacagccaaatctcatgctgtacattgatcacctgtccaacctttgcctagagtgggagcccccagttccttcgagatccaacattacctgtctgtaaagaagaagaggaggagggagacagcggggaggatccggtggcagtttaacaccagagcaggtccaatgtttacttttacccttttggagctattagaagggctgaataaagggaacatgcagctctgcagcaatattctgataatgtattgcagtgcggctcacatcactgtccaccaccacctggagcggctcatcagaactgaaggggagttttcacttaccttattgagcgtgattctgttctacttgatatttccttcaccacctcatgtcatttctcatggatttggttatgatggaaaggaagaatgcagaggaggagaaaagtgacagatcctccatttttgttgggatgcgggcattttgaatgtgatcatctttgctgaatgtcattatttgataacattttgtttatgttacttaaacatcattggataaatttgaactccatgggattttatctgtggattcagcttctgttggacaactagcctcatctccagtatcctgctggttcactctaattggtcattcctaatgcattagattatcaaaaagtataaattcgctgtgagtgagtggtgttggcagtgtttgtataccatgatgcatggagtgtttgacgaagaaacaaaaaacaccaaaaattgcgagcctttaccctcctctatttctttaatctgttgtttgaagaaccgcattttgagggtgtaaccagtagtcacctctgggccaggttggaaaagaaatcaattttttaaaccactaatgcttgccaagaaatcgccttatgagaacatg

SEQ ID NO: 6718 - DNA, 904 bp, Homo sapiens
  source 1..904: mol_type = unassigned DNA; mol_type = unassigned DNA
agttcatcgggaggcggggattgtagtgcaggaaacgagaactgggcaggggaggtcactaaatactaatgaagactgccagcagaggaacctacagaggatttttgttcaaagaggacagtttgaggaggaggatgggtaacaaaaatgtgtccttcagcagtcggcctgtggtgagctgaagaagcagctattagaagggctgaataaagggaacatgcagctctgcagcaatattctgataatgtattgcagtgcggctcacatcactgtccaccaccacctggagcggctcatcagaactgaaggggagttttcacttaccttattgagcgtgattctgttctacttgatatttccttcaccacctcatgtcatttctcatggatttggttatgatggaaaggaagaatgcagaggaggagaaaagtgacagatcctccatttttgttgggatgcgggcattttgaatgtgatcatctttgctgaatgtcattatttgataacattttgtttatgttacttaaacatcattggataaatttgaactccatgggattttatctgtggattcagcttctgttggacaactagcctcatctccagtatcctgctggttcactctaattggtcattcctaatgcattagattatcaaaaagtataaattcgctgtgagtgagtggtgttggcagtgtttgtataccatgatgcatggagtgtttgacgaagaaacaaaaaacaccaaaaattgcgagcctttaccctcctctatttctttaatctgttgtttgaagaaccgcattttgagggtgtaaccagtagtcacctctgggccaggttggaaaagaaatcaattttttaaaccactaatgcttgccaagaaatcgccttatgagaacatg

SEQ ID NO: 6719 - DNA, 3831 bp, Homo sapiens
  source 1..3831: mol_type = unassigned DNA; mol_type = unassigned DNA
cggctcctgctcctcctggccgcccggggccaaggcgacgagaggttgtaaaaatccatgtgggacggccccggggcgagcatcggaaagatctctgagtggagttattttctggtacggactgtgaaaagaatgcggtgaaaattctggacaatcgtggaaatattagctcaaaccccaacttaatatagcatttcttctcttcagtaacacctcataatacaagaaaaatgtatggaagtgcaagaacaatcaccaatctggaaggtagcccttccagatcccctcgtttgccaaggtctcctcgtttgggccaccgaagaacaagtagtgggggaggtggaggaacaggcaagactctgtctatggagaatatccagtccctcaatgcagcctatgctacgtctggacccatgtatctgagtgatcatgaaggggtggcttcaacaacctacccaaagggcactatgactctgggaagggctacaaatcgagctgtatatggaggccgtgtcacagccatggggagtagtcccaatattgcttctgctggactttcccacacagatgtcctttcatacacagatcaacatggtgggctgactggctcatcccatcatcaccaccaccaggtcccctccatgttgaggcaggtaagagacagcacaatgttagatcttcaggcccagctgaaagaactgcagagagagaatgacctcctccggaaagagctagacatcaaggacagcaaattgggatcttccatgaacagtattaagactttctggagtcctgagcttaagaaggagagagtcttgaggaaagaagaggcagcgcggatgtctgtcctcaaggagcagatgagggtttcccatgaagaaaatcagcacctacagttgacaatccaggcccttcaagatgagctgcgaacccagagagacctcaaccacctcctccagcaagagagtggcaaccgaggagcggagcacttcaccatcgagctgaccgaggagaactttaggcggctccaagccgagcatgacaggcaggctaaggagctgttccttttgaggaagacattagaggaaatggagctgagaattgaaacgcagaaacaaaccctcaatgcccgagatgagtcaattaaaaaacttcttgagatgttgcaaagtaaaggcttgccatccaaaagcctggaggatgacaatgagcgaacgcggcggatggcagaggctgagtctcaggtcagccacttggaagtgattttagatcagaaagagaaggaaaacatacatcttagagaggaattgcaccgaagaagccaacttcagccggagccagccaagacgaaggctctccagactgtcatcgaaatgaaggacacaaaaatcgcttcattggaacgaaacataagggatcttgaggatgagatccagatgttaaaagccaatggtgtgctgaacactgaggaccgcgaagaagagatcaaacaaattgaggtttacaaaagtcactccaagtttatgaagaccaagattgatcagctgaagcaggaactttcaaagaaagagtcggaacttcttgccttacaaacaaagcttgaaaccctcagcaatcaaaattcagattgcaagcaacacattgaagtgctcaaagagtcacttactgccaaagaacagagggctgccatccttcagactgaggtagatgcgctgagattacgactggaagaaaaagaatctttcctcaataaaaaaacaaaacagctacaggacctcacagaagagaaggggacactggccggtgaaattcgtgacatgaaagatatgttagaagtgaaggaaagaaaaatcaatgttcttcagaaaaagattgaaaacttgcaagaacaacttagggataaagacaagcaactgaccaacctgaaagacagagtgaagtccttgcagacggattccagtaatacagatactgcactggcgacgctagaggaagctctgtcagagaaggagagaataattgagcgcttgaaagaacagcgagaaagagatgatcgggaaagactagaagagatagaatccttccgaaaagagaacaaagacctgaaagagaaggtcaatgctttacaggctgaactgactgagaaagagtctagtttaattgacctcaaagaacatgcatcttcattagcctctgcggggctgaaaagggattccaaattaaaatctctagaaatagccattgaacaaaagaaagaggaatgtagcaaattggaagcacagttaaaaaaggcacataatattgaagatgactccaggatgaaccctgagtttgcagaccaaataaaacagctcgataaagaggcgtcttactaccgcgacgagtgtggcaaggcccaagcggaagtggaccggttgctggagatcctcaaggaggtggagaatgagaagaatgacaaggacaagaagatcgcagaactggagagcttgactctcaggcatatgaaagatcagaataagaaggtggccaacctcaagcacaatcaacagttggaaaagaagaaaaatgctcagttactagaagaagtgcgcaggcgagaagacagcatggctgacaactcacagcatttgcagatagaggaactgatgaatgcactggagaagaccagacaggaactggatgccaccaaagcacgcctcgcctccacacaacagtccctggccgaaaaagaagcgcacttggccaacctccggattgagaggaggaaacagctggaggagatcctggagatgaaacaggaagcactacttgcagccatcagtgaaaaagatgcaaacattgccttgctggaattgtctgcctccaaaaagaaaaagacgcaggaagaagtcatggccctcaagcgggaaaaagaccgactagtacatcaattaaagcagcagacccagaacagaatgaagttgatggcagacaactatgatgatgaccatcaccattaccaccaccaccaccatcaccaccaccatcgatctcctgggaggtcgcaacattccaatcacaggccctctccggaccaggatgacgaggagggcatatgggcatagccgggcctgtaaaccaaagttccagttttgttttgagggatgatccagctctgtcggaggcacgtaggcacagccaaatctcatgctgtacattgatcacctgtccaacctttgcctagagtgggagcccccagttccttcgagatccaacattacctgtctgtaaagaagaagaggaggagggagacagcggggaggatccggtggcagtttaacaccagagcagctattagaagggctgaataaagggaacatgcagctctgcagcaatattctgataatgtattgcagtgcggctcacatcactgtccaccaccacctggagcggctcatcagaactgaaggggagttttcacttaccttattgagcgtgattctgttctacttgatatttccttcaccacctcatgtcatttctcatggatttggttatgatggaaaggaagaatgcagaggaggagaaaagtgacagatcctccatttttgttgggatgcgggcattttgaatgtgatcatctttgctgaatgtcattatttgataacattttgtttatgttacttaaacatcattggataaatttgaactccatgggattttatctgtggattcagcttctgttggacaactagcctcatctccagtatcctgctggttcactctaattggtcattcctaatgcattagattatcaaaaagtataaattcgctgtgagtgagtggtgttgg

SEQ ID NO: 6720 - DNA, 580 bp, Homo sapiens
  source 1..580: mol_type = unassigned DNA; mol_type = unassigned DNA
gcacagacccagaacagaatgaagttgatggcagacaactatgatgatgaccatcaccattaccaccaccaccaccatcaccaccaccatcgatctcctgggaggtcgcaacattccaatcacaggccctctccggaccaggatgacgaggagggcatatgggcatagccgggcctgtaaaccaaagttccagttttgttttgagggctattagaagggctgaataaagggaacatgcagctctgcagcaatattctgataatgtattgcagtgcggctcacatcactgtccaccaccacctggagcggctcatcagaactgaaggggagttttcacttaccttattgagcgtgattctgttctacttgatatttccttcaccacctcatgtcatttctcatggatttggttatgatggaaaggaagaatgcagaggaggagaaaagtgacagatcctccatttttgttgggatgcgggcattttgaatgtgatcatctttgctgaatgtcattatttgataacattttgtttatgttacttaaacatcattggataaatttgaactccatgggatttta

SEQ ID NO: 6721 - DNA, 532 bp, Homo sapiens
  source 1..532: mol_type = unassigned DNA
tttcagagaaggtgaattctgggttatagtcctagagctgtgtccataactgcatctcagtgttcctggtgtcttcaagattgccagcccttcccaacctgtgccagacataagaggaagcactacttgcagccatcagtgaaaaagatgcaaacattgccttgctggaattgtctgcctccaaaaagaaaaagacgcaggaagaagtcatggccctcaagcgggaaaaagaccgactagtacatcaattaaagcagcagacccagaacagaatgaagttgatggcagacaactatgatgatgaccatcaccattaccaccaccaccaccatcaccaccaccatcgatctcctgggaggtcgcaacattccaatcacaggccctctccggaccagctattagaagggctgaataaagggaacatgcagctctgcagcaatattctgataatgtattgcagtgcggctcacatcactgtccaccaccacctggagcggctcatcagaactgaaggggagttttcacttacctt

SEQ ID NO: 6722 - DNA, 689 bp, Homo sapiens
  source 1..689: mol_type = unassigned DNA
tgctggaactcaccatatagatgcctcactgcttttcatttctaagtttctcctccatgtctttttcctcttgccagtgtttagataaaattatttctatttgatacatttttcttcactcttgtccttaatgggtcaagtctcatgtggcttcatagccctgacagacagtagtattgctattttggagtcaaggtctcgttctgtcggccaagctggagtgcagtggcaccatcagggctcactgcagccttgacctccgaggctcaaggaatcctcccacctcagcctcagccttccggatagttggtactacagatgatccagctctgtcggaggcacgtaggcacagccaaatctcatgctgtacattgatcacctgtccaacctttgcctagagtgggagcccccagttccttcgagatccaacattacctgtctgtaaagaagaagaggaggagggagacagcggggaggatccggtggcagtttaacaccagagcaggtccaatgtttacttttacccttttggaggtgggtaacggcaaatgctgggtgctgggtttcagagagactctgcataatgagcttggatttgggggctcacatgtactttacattttgctagagtgtaggagttgctatttttgtatttaattcacagccagactgttccatgattcccacca

SEQ ID NO: 6723 - DNA, 1585 bp, Homo sapiens
  source 1..1585: mol_type = unassigned DNA
gaagaagccaacttcagccggagccagccaagacgaaggctctccagactgtcatcgaaatgaaggacacaaaaatcgcttcattggaacgaaacataagggatcttgaggatgagatccagatgttaaaagccaatggtgtgctgaacactgaggaccgcgaagaagagatcaaacaaattgaggtttacaaaagtcactccaagtttatgaagaccaagattgatcagctgaagcaggaactttcaaagaaagagtcggaacttcttgccttacaaacaaagcttgaaaccctcagcaatcaaaattcagattgcaagcaacacattgaagtgctcaaagagtcacttactgccaaagaacagagggctgccatccttcagactgaggtagatgcgctgagattacgactggaagaaaaagaatctttcctcaataaaaaaacaaaacagctacaggacctcacagaagagaaggggacactggccggtgaaattcgtgacatgaaagatatgttagaagtgaaggaaagaaaaatcaatgttcttcagaaaaagattgaaaacttgcaagaacaacttagggataaagacaagcaactgaccaacctgaaagacagagtgaagtccttgcagacggattccagtaatacagatactgcactggcgacgctagaggaagctctgtcagagaaggagagaataattgagcgcttgaaagaacagcgagaaagagatgatcgggaaagactagaagagatagaatccttccgaaaagagaacaaagacctgaaagagaaggtcaatgctttacaggctgaactgactgagaaagagtctagtttaattgacctcaaagaacatgcatcttcattagcctctgcggggctgaaaagggattccaaattaaaatctctagaaatagccattgaacaaaagaaagaggaatgtagcaaattggaagcacagttaaaaaagcaagctgagcagttgttcaatcagatgtacaacccagcacataatattgaagatgactccaggatgaaccctgagtttgcagaccaaataaaacagctcgataaagaggcgtcttactaccgcgacgagtgtggcaaggcccaagcggaagtggaccggttgctggagatcctcaaggaggtggagaatgagaagaatgacaaggacaagaagatcgcagaactggagaggcatatgaaagatcagaataagaaggtggccaacctcaagcacaatcaacagttggaaaagaagaaaaatgctcagttactagaagaagtgcgcaggcgagaagacagcatggctgacaactcacagcatttgcagatagaggaactgatgaatgcactggagaagaccagacaggaactggatgccaccaaagcacgcctcgcctccacacaacagtccctggccgaaaaagaagcgcacttggccaacctccggattgagaggaggaaacagctggaggagatcctggagatgaaacaggaagcactacttgcagccatcagtgaaaaagatgcaaacattgccttgctggaattgtctgcctccaaaaagaaaaa

SEQ ID NO: 6724 - DNA, 599 bp, Homo sapiens
  source 1..599: mol_type = unassigned DNA
attttctttcctctgtttccttgctgtgtttgtattgggagcacagagtaatgtaatttagtaaattatgatttgatggctgggcatcagccccagtgttgaacagtatttggactatgattacttgctggctttgtcacagttgacattaattattgatggaagtttcagaaatagcgcatgtgccaggagcttttcaccggaacgcaggctccaggcaggagggatgctaaagagtgtgggggaagagacacctgtggcttgtttatgtctgtgcaaggggaaccaggacccagcaggctgtgtagtacctgtgtaaaggttgtggtgtaacggaaggatgaaccgtcaggcttatttctatcgtgttcctccccaggaattgcaccgaagaagccaacttcagccggagccagccaagacgaaggctctccagactgtcatcgaaatgaaggacacaaaaatcgcttcattggaacgaaacataagggatcttgaggatgagatccagatgttaaaagccaatggtgtgctgaacactgaggaccgcgaagaagagatcaaacaaattgaggtttacaaaagtcactccaagttta

SEQ ID NO: 6725 - DNA, 658 bp, Homo sapiens
  source 1..658: mol_type = unassigned DNA
tcgagctgtatatggaggccgtgtcacagccatggggagtagtcccaatattgcttctgctggactttcccacacagatgtcctttcatacacagatcaacatggtgggctgactggctcatcccatcatcaccaccaccaggtcccctccatgttgaggcaggtaagagacagcacaatgttagatcttcaggcccagctgaaagaactgcagagagagaatgacctcctccggaaagagctagacatcaaggacagcaaattgggatcttccatgaacagtattaagactttctggagtcctgagcttaagaaggagagagtcttgaggaaagaagaggcagcgcggatgtctgtcctcaaggagcagatgagggtttcccatgaagaaaatcagcagttgcaacagctgttcagatgtacctccttctgaatagaagaagaaaatgttaatttctgtaagaataaagactttaagagcaacatttagtgggccacatttgactggtgaattgatttttattttgaagcaccagcaccattatttcccactagaatgagtgaagttgttctctaagtagcagattgaacaatatgaaatggaattggatcaaatgggtttgttatgttagagatacacaataaatttttaacttgg

SEQ ID NO: 6726 - DNA, 629 bp, Homo sapiens
  source 1..629: mol_type = unassigned DNA
ggggatacagctgtgagaggcagacaagcgggaagaaaactctttgaaaatggacttttagaaatctctgagtggagttattttctggtacggactgtgaaaagaatgcggtgaaaattctggacaatcgtggaaatattagctcaaaccccaacttaatatagcatttcttctcttcagtaacacctcataatacaagaaaaatgtatggaagtgcaagaacaatcaccaatctggaaggtagcccttccagatcccctcgtttgccaaggtctcctcgtttgggccaccgaagaacaagtagtgggggaggtggaggaacaggcaagactctgtctatggagaatatccagtccctcaatgcagcctatgctacgtctggacccatgtatctgagtgatcatgaaggggtggcttcaacaacctacccaaagggcactatgactctgggaagggctacaaatcgagctgtatatggaggccgtgtcacagccatggggagtagtcccaatattgcttctgctggactttcccacacagatgtcctttcatacacagatcaacatggtgggctgactggctcatcccatcatcaccaccaccaggtcccctccatgttgaggcaggta

SEQ ID NO: 6727 - DNA, 3831 bp, Homo sapiens; identical to SEQ ID NO: 6719
  source 1..3831: mol_type = unassigned DNA; mol_type = unassigned DNA

SEQ ID NO: 6728 - DNA, 2881 bp, Homo sapiens
  source 1..2881: mol_type = unassigned DNA; mol_type = unassigned DNA
ggcgagtggcgagtggcgagtgtcaggggggcggccggcgggggcggggcggccggaggaggcgttggcagcgggctcggacccacgcggcgccgcggcccgcctggcctgcagcgctcccacccccggcggcggcacgatgccctttgacttcaggaggtttgacatctacaggaaggtgcccaaggaccttacgcagccaacgtacaccggggccattatctccatctgctgctgcctcttcatcctcttcctcttcctctcggagctcaccggatttataacgacagaagttgtgaacgagctctatgtcgatgacccagacaaggacagcggtggcaagatcgacgtcagtctgaacatcagtttacccaatctgcactgcgagttggttgggcttgacattcaggatgagatgggcaggcacgaagtgggccacatcgacaactccatgaagatcccgctgaacaatggggcaggctgccgcttcgaggggcagttcagcatcaacaaggtccccggcaacttccacgtgtccacacacagtgccacagcccagccacagaacccagacatgacgcatgtcatccacaagctctcctttggggacacgctacaggtccagaacatccacggagctttcaatgctctcgggggagcagacagactcacctccaaccccctggcctcccacgactacatcctgaagattgtgcccacggtttatgaggacaagagtggcaagcagcggtactcctaccagtacacggtggccaacaaggaatacgtcgcctacagccacacgggccgcatcatccctgcaatctggttccgctacgacctcagccccatcacggtcaagtacacagagagacggcagccgctgtacagattcatcaccacgatctgtgccatcattggcgggaccttcaccgtcgccggcatcctggactcatgcatcttcacagcctctgaggcctggaagaagatccagctgggcaagatgcattgacgccacacccagcctaatggccgaggaccctgggcatcgccagccttgcctccagtgccctgtctcctttggccctcaatctggtcccaaatctggctgtgtcccaaagggtgtgtgggaagtggggggaaagtagaggatggctcgatgttttgcagctacctcttttccccgtgtttctttttagacaaattacactgcctgaagttgcagttcccctttccctggggagccccaagaacagagtcaggcaaggggtggggagtccagggatcttggggacccctcctaggagagctgcagtctcttccctcaggggaacatcccagaatgcatatcgatcagctctcagccaggcttcgacaatctcgcagcccccactaggtggacacattaatgatttggtttctcccctgggcagccaacctgccccagaggcaccagacctgggctttcagctttgggaccaggctgcccaaaggtactcctttatacacccggcaccttccacgaaagatggtacttcccaagcaagcccctatgatttgtcactatagatggaaccctgacttctgccccatcccttcctgcccaacctagaacccaggcctcaagtctttaccccacccctttcttgttcttccaagaagcagatgcccagttgctcagcagcagcggtagagacttgaatctgcccaccagtcacaaggcgggtcacagattcctcttcctctcttctcctcgttcctctgaaccctccaccaatgtgcctcagcctgtgtgctgtgtggcaacagcattctggttcccactgccaagatctcccaccactctgctgggatctgcagtggcagggagtgggggttgtgtaaaggggaagtcatcttttgagatccagatagacatggtttgtgcacttacgtccagatgggaagcatccttcctgcaaccctaaaataatcatgcagcctctcagacggacgccatcggtcccaaggccttaggtggaggaagcaaagcaggccaggcctgtcctgtccgtggacctctaccttctggactccctacgggtgcagagcacttgggtttctctacagccatcgtggcccacttgacactgtgctcctccatcagctggtcacatgccaacacgttcccagcccctgaggcagctccagggtgccccacctgctcctgaggtgggtccctaccctgctgctcctcttcatcctttcccttttgtcctgaaagggaggagcaatggtccaggcattaattccacccagggaattttagctatgccctcatgtcccagggagagagccacacgcctgttttccatttatagcaagattgtttgcatacttttgtaatgaaggggagtgtccagtggaaggatttttaaaattatcttatggatagctcaagtctctgccatttgtaatttttggctctaagctccgattggagacgcttctccttgtgcatgtgagttgactgatgttgtgagtgtaaatgcatttggttatttctggtatcggtggccacttggatggatttttttacattctgttccccagttacaggaaggagtccctttggtgtgtgaatatgtgtgcctgtagagggtggggcagggtggggtggggatggaaatgtgtggcatgcacatgagttgaaattcttttatgcatttttttgaagaaaaaaaaaaaaacaactctgaggacataggggatgtcagtttcctatggaagagacacctctgacccgttattcttataatcaaaatctgaagggaaaaaaatgttttagttctttccccactcgttgggttcaactagattaaaaggctgattttcagaaata

SEQ ID NO: 6729 - DNA, 1000 bp, Homo sapiens
  source 1..1000: mol_type = unassigned DNA; mol_type = unassigned DNA
cggggcggccggaggaggcgttggcagcgggctcggacccacgcggcgccgcggcccgcctggcctgcagcgctcccacccccggcggcggcacgatgccctttgacttcaggaggtttgacatctacaggaaggtgcccaaggaccttacgcagccaacgtacaccggggccattatctccatctgctgctgcctcttcatcctcttcctcttcctctcggagctcaccggatttataacgacagaagtgcccacacttggtgaggaatcggtgcaggcttcctggcagtggctgacgcagagttaaaccattcctgattcctagaattatctgttgtctggataacctagtaaacgctctggggtgtgtgtaacagaatgccattaggattatgcagtcacgacctcatcggacgcccctctgtgatggaattagacccaggagcttcctgcctttggcactggcttgaggcttcaaagcctcttcatttctgtgtttacagcccggaaagtcatcacggagctcggccctggccacccactctcctgctcaacactggaattttctttttcactaatgggatttcttggtttcctttgcctccactcagccacaagacaataggaaactaaatacatagctgcttagcccaagaagactctcattatacaagcattaccacctttagttctcaaacagcctcaggagggagctgccccctctttacaaagaggaaattgaggcccagggaggtggagggacctgcccacagccatacagttaggagctggctcccagccctgcctatctccctagcccacatgtgtttgaccagcacactgaaaggcctatgagacaggagggctggtctcaccttgtttctgggtatacctttcagccctcccctggcatgggagagtttgcctttcctggtcactctgatcctgttttaaccctgatggcgccaaagcccaggggaccttttacagtggtgggaa

SEQ ID NO: 6730 - DNA, 647 bp, Homo sapiens
  source 1..647: mol_type = unassigned DNA; mol_type = unassigned DNA
ggcgttggcagcgggctcggacccacgcggcgccgcggcccgcctggcctgcagcgctcccacccccggcggcggcacgatgccctttgacttcaggaggtttgacatctacaggaaggtgcccaaggaccttacgcagccaacgtacaccggggccattatctccatctgctgctgcctcttcatcctcttcctcttcctctcggagctcaccggatttataacgacagaagttgtgaacgagctctatgtcgatgacccagacaaggacagcggtggcaagatcgacgtcagtctgaacatcagtttacccaatctgcactgcgagttggttgggcttgacattcaggatgagatgggcaggcacgaagtgggccacatcgacaactccatgaagatcccgctgaacaatggggcaggctgccgcttcgaggggcagttcagcatcaacaagaaccaggagcttcagatcctaagtcaagtgggtgaacgcagtgcccttgggagggccgaggcacccggtggcagctggcagggttttgctcagcacgtgccggccttcctcgaagctcggtactgtcacagtggagcctctcaacaacgctgtgaggcagcaccatttgacaggtccccggcaacttccacgt

SEQ ID NO: 6731 - DNA, 539 bp, Homo sapiens
  source 1..539: mol_type = unassigned DNA; mol_type = unassigned DNA
gcagcgctcccacccccggcggcggcacgatgccctttgacttcaggaggtttgacatctacaggaaggtgcccaaggaccttacgcagccaacgtacaccggggccattatctccatctgctgctgcctcttcatcctcttcctcttcctctcggagctcaccggatttataacgacagaagttggttgggcttgacattcaggatgagatgggcaggcacgaagtgggccacatcgacaactccatgaagatcccgctgaacaatggggcaggctgccgcttcgaggggcagttcagcatcaacaagaaccaggagcttcagatcctaagtcaagtgggtgaacgcagtgcccttgggagggccgaggcacccggtggcagctggcagggttttgctcagcacgtgccggccttcctcgaagctcggtactgtcacagtggagcctctcaacaacgctgtgaggcagcaccatttgacaggtccccggcaacttccacgtgtccacacacagtgccacagcccagccacagaaccca

SEQ ID NO: 6732 - DNA, 586 bp, Homo sapiens
  source 1..586: mol_type = unassigned DNA; mol_type = unassigned DNA
acgatgccctttgacttcaggaggtttgacatctacaggaaggtgcccaaggaccttacgcagccaacgtacaccggggccattatctccatctgctgctgcctcttcatcctcttcctcttcctctcggagctcaccggatttataacgacagaagttgtgaacgagctctatgtcgatgacccagacaaggacagcggtggcaagatcgacgtcagtctgaacatcagtttacccaatctgcactgcgagttggttgggcttgacattcaggatgagatgggcaggcacgaagtgggccacatcgacaactccatgaagatcccgctgaacaatggggcaggctgccgcttcgaggggcagttcagcatcaacaaggaagttgaccagcagccagatgtcagagtttgcgtgttttgagcagcagcggcagcctcaccagagaccccacggtgacctcgtttcatcagccagccccgcaggaggaggacaggatggggtgaggggtatggggcctggctccagctatatgtttttaaaatccatcagagacactgacgtaggttcctaagtcacaggctctaaa

SEQ ID NO: 6733 - DNA, 554 bp, Homo sapiens
  source 1..554: mol_type = unassigned DNA; mol_type = unassigned DNA
aggcagcttcctggctgggaagggaagcccaggctctccttagttgactgtgtgttaatcacccagcaatttcattactcaacagctctccagagttgcacattacagctggggtagaaattgggtgctgaaggccaggcagagcatttggctgtagggaggccgatcctcctcgggcctgttaccggcgggtctttgttcttagacctggggttcttggcctcacggattccaaggaatggaacgttgggccatgcgtgtgaacgagctctatgtcgatgacccagacaaggacagcggtggcaagatcgacgtcagtctgaacatcagtttacccaatctgcactgcgagttggttgggcttgacattcaggatgagatgggcaggcacgaagtgggccacatcgacaactccatgaagatcccgctgaacaatggggcaggctgccgcttcgaggggcagttcagcatcaacaaggtccccggcaacttccacgtgtccacacacagtgccacagcccagccacagaacccagacatgacgcatgtcatcc

SEQ ID NO: 6734 - DNA, 3952 bp, Homo sapiens
  source 1..3952: mol_type = unassigned DNA; mol_type = unassigned DNA
gaagcccaggctctccttagttgactgtgtgttaatcacccagcaatttcattactcaacagctctccagagttgcacattacagctggggtagaaattgggtgctgaaggccaggcagagcatttggctgtagggaggccgatcctcctcgggcctgttaccggcgggtctttgttcttagacctggggttcttggcctcacggattccaaggaatggaacgttgggccatgcgtgtgaacgagctctatgtcgatgacccagacaaggacagcggtggcaagatcgacgtcagtctgaacatcagtttacccaatctgcactgcgagttggttgggcttgacattcaggatgagatgggcaggcacgaagtgggccacatcgacaactccatgaagatcccgctgaacaatggggcaggctgccgcttcgaggggcagttcagcatcaacaaggtatggaagccctgcctcagccctttctacctgctcccctttcctgctgtctccccgctccctggaaactggttgtggaggcactcactcgacctgaccctgacacagcccccagcaagcgagggttcgtgtccagctgcctggccgttcctgctgagaatctggatgggggtccaggctccctggggttttaagcccctgatggctggttcaggaaggagctactcttctctccagtgagggggacaatgatgagaagacctgaggatttgcagcccccagccctgggttcaagtcccagctctaccccttcttggcccctacaagtcacttgacccatcttaggctgagggtgtgatggcgataatagtatcacgataccacccacttcacaaagtttgtgtggggattaaatgagctaatgcagattcattcattcagaaaaatttttgaatggcacgttctgtgttccagggtcggtgataggctctggggcagcgttcctgggctggtggggctcccattctggtagagggagacagtctacaaaccagaaagcatcagggatgctaagtgcagtgatgaggaataaagccaaggggagtgagatgaggtgggcttgaaagtaccttgtccgctcagaaggaccattcaaggttcactgttgttttgtcctcagaaccaggagcttcagatcctaagtcaagtgggtgaacgcagtgcccttgggagggccgaggcacccggtggcagctggcagggttttgctcagcacgtgccggccttcctcgaagctcggtactgtcacagtggagcctctcaacaacgctgtgaggcagcaccatttgacaggttaggatgctggggcccagagaggttaagtgtcttgcccgaggtcacacagctatctgcatgtcccacaactccccttcccagccccagccaaactgagccactggccactcctggcttctccttgtccctcctgcagcctctgctcagaacgcccttcctccagaccctgacacctgagctggggttgcaaagtcactggccacatccagcccaaagataaattttgtttgtccagtatagcatttaactgcatcagaaccagtatgaaaagaccaggaatccagatttctggcttttaaaagtcagaggctctcactacactgggtccgtgttcccgctatgacaatgacctggcaccaatgggcagtgttcccctttagagagggtgtgtgctgtcccttcccacagtccctggcaggcggctggaaggccaggcctggtcatctgtcaagcagggtggacttcttacgtgacagttcagggctcccttaagtgctaaagcagaagctgcaaggctttcttaaggtttcgagtgttgctgggagaaatctgctgcatgttgtgggttaaagggagtctctcaccagcccaggccctcaggaggaggagataccaggaggcagggatgctgggggtcgtggttcactgggggctctctctgcccatgagctgccacacagcacctttgccatgccccgtaatttggattttatggtggttgtgatggaaagccatttgagggttttgaacagggaggcaatgtaatcagatttatgccttagaactggactatccaataggttgccaccagccacataaggctatttaaattaattcaaattaaatgtacaattcagtcactcattctcatcaaccacatttcaagtgctcaaagccacgtgctggctaggggccacagcgttagacagtgcagagagaaagcacttccatcgctgaggaaagttctgctggaccgcacacccttagaaggatggctctggtggccgggcgcggtggctcaaacctgtaatcccagcactttgggaggccgaggtgggtggatcacgaggtcaggagatcgagaccatcccggctaacatggtgaaaccctgcctctactaaaaatacaaaaaaaaacaaaattagccgggcgtggttgcgggcacctgtagtcccagctactcaggaggctgaggcgggagaatggcatgaacccgggaggtggagcttgcagtgagccaagatcgtaccactgcactccagtctgggcgacagagtgagactccatctcaaaacaaacaaaaaaaggatggggctgggctggagagggtggcaggcagtggttgtggcagtggagctggggagatgtggtcggattagggaggtagaatcaataagactcagtgaagaatcggatgtgggggtaagggcacatgtggaagcaaagaaacctttgacgtctttgtcttgacaaccgggtggtcctgtttctagacatggaagcttagaaaagcctggagtctgtgggaagtaggtagggctgggcactggtcattccactctggtttcctttggggttcccattaggtgtctacagggagaggtgaaattggaagttggaggtgtggagagttcaggagagggttctggaccacagatgttgaggtgggagtcattagtgaatagatgatgttggaagtcatgggtcctcagagtgggggctccttaagcctccaggccagcagcatcagcatcacctgggagattgttaggaatgcagattctcaggcccccctaagacccaccgactctgtgctagaacaagcgcccctcagagattctgatgccactgaagtttgaggagcattggtttaagcaagattacctacggagaggctgtagatccgtgttctaaacctggggtccacagacacccccaagaagagcggattgaatgcaagagatctatgaagttggatgggggaaaaattgacatctttatttttgctaaactcgatctaaagtttagcatttccatctgcgatgaatgtaggccacaaaccacagtagtattagcagtgcctgggacctcctcaacaacagaaattgccggtatttatagcacgttacagttgttgcagataatttccagagactgtttatatgcaccactgttttaaaattacggtgattggccaggtgcagtggctcacacctgtaatcccagcactttgggaggccaaagtgggtggatcacttgaggagttcaagaccagcctggtcaacatgtcaaaaccctgtacctacaaaaaaatacaaaagttaaccaagcctatgcttgtagtcacagctactcgggaggccgaggtgggagggtcttctgagcccagggaggtagaggcttcagtgagctgagatcgcaccaccacactccagcctgggtgacagagtgaaacccttaatcaatcagtcaataaaaattacagtaattattagacccaccactaggtcatcttatttgatgcatcagtaaagcagcatattcaaatgtggatttttaaatattttaattactatttaaatatctctttactttgtaatcctatgcattttacgcattaaaacattttaagcatttaaaa

SEQ ID NO: 6735 - DNA, 501 bp, Homo sapiens
  source 1..501: mol_type = unassigned DNA; mol_type = unassigned DNA
gaaatccagctagtcctgtctgtcataacctcctgggctcctgtttgcctctctccctccagctcctttgctcttggtggcctctgattggggccaacactacaagcaaggtcaagcgcagtgtgaacgagctctatgtcgatgacccagacaaggacagcggtggcaagatcgacgtcagtctgaacatcagtttacccaatctgcactgcgagttggttgggcttgacattcaggatgagatgggcaggcacgaagtgggccacatcgacaactccatgaagatcccgctgaacaatggggcaggctgccgcttcgaggggcagttcagcatcaacaaggtccccggcaacttccacgtgtccacacacagtgccacagcccagccacagaacccagacatgacgcatgtcatccacaagctctcctttggggacacgctacaggtccagaacatccacggagctttcaatgctctcgggggagcagacagactcacct

SEQ ID NO: 6736 - DNA, 578 bp, Homo sapiens
  source 1..578: mol_type = unassigned DNA
tgtgaacgagctctatgtcgatgacccagacaaggacagcggtggcaagatcgacgtcagtctgaacatcagtttacccaatctgcactgcgagttctttggaccccagaccatgagctcctggaggtccccagcccggcctgcccctgcaatggatgaatgaaggctcccagagagaacaggctggcccccatcctcccgcgtctctgggtttgtgactgttgtctccctttggctcctgcagtggttgggcttgacattcaggatgagatgggcaggcacgaagtgggccacatcgacaactccatgaagatcccgctgaacaatggggcaggctgccgcttcgaggggcagttcagcatcaacaaggtccccggcaacttccacgtgtccacacacagtgccacagcccagccacagaacccagacatgacgcatgtcatccacaagctctcctttggggacacgctacaggtccagaacatccacggagctttcaatgctctcgggggagcagacagactcacctccaaccccctggcctcccacgactacatcctgaagattgtgcccacggt

SEQ ID NO: 6737 - DNA, 488 bp, Homo sapiens
  source 1..488: mol_type = unassigned DNA; mol_type = unassigned DNA
gaagttgaccagcagccagatgtcagagtttgcgtgttttgagcagcagcggcagcctcaccagagaccccacggtgacctcgtttcatcagccagccccgcaggaggaggacaggatgggacatgcttacaaaatcagactttgatgggctgctgcacgataagctatattccctcctcggacacagctcgcacagtcttcttcattgggctggaataaggtccccggcaacttccacgtgtccacacacagtgccacagcccagccacagaacccagacatgacgcatgtcatccacaagctctcctttggggacacgctacaggtccagaacatccacggagctttcaatgctctcgggggagcagacagactcacctccaaccccctggcctcccacgactacatcctgaagattgtgcccacggtttatgaggacaagagtggcaagcagcggtactcctaccagtacacggtggccaacaag

SEQ ID NO: 6738 - DNA, 566 bp, Homo sapiens
  source 1..566: mol_type = unassigned DNA
agatggcatccaggcatcagaggagggagcagtgcgtccaacagacgtgagctgagactgcagctctcgacatgtgaccttagcaagtttcttcactgctctgagcctccattttcttttctgtaaaatgggaattatcagatgacaaagtcaaaggattcagtgttgtttgtttagtcattcattcattcaaaaagtgtctattgagcacctgctatgtgtcggagtctggggagcacagcagggcgtggacatgctaatgggaggaggcagacgagaacaggatgggtatgagatggcaggtgatcccagaggctgtagcaggtccccggcaacttccacgtgtccacacacagtgccacagcccagccacagaacccagacatgacgcatgtcatccacaagctctcctttggggacacgctacaggtccagaacatccacggagctttcaatgctctcgggggagcagacagactcacctccaaccccctggcctcccacgactacatcctgaagattgtgcccacggtttatgaggacaagagtggcaagcagcggtactc

SEQ ID NO: 6739 - DNA, 456 bp, Homo sapiens
  source 1..456: mol_type = unassigned DNA
gctacaggtccagaacatccacggagctttcaatgctctcgggggagcagacagactcacctccaaccctaaccagtgggaaggtggacccagccccgtccagacccagaccctgatggagaaggaagaaggcttgtcccggggcacagcagacgcacgcacgcagtggataccagctattaccattattgttgctctcatcacagccacatcatcatccttagttgaactaattacctaagatcccacagggagctatggcagaaccaggatctgttctgcctccaggtcgcaccgtgagaacaggtctgtgggtggcccagtcagctgtgaccacatggctgcctcccccacacctcactctcctcctgctcagactcctcccatcgatagtggctcctcctagagtcctcgccctccttagctccctggcaccttggcccagatcaaagagaa

SEQ ID NO: 6740 - DNA, 5687 bp, Homo sapiens
  source 1..5687: mol_type = unassigned DNA
agaagaggactgactcgactctgcgaccaggcttagaacccacaggcctaaatttctgtgttattttagctctgtagtccgtgacccgagattgtggaaggcccatgagcttcctccctggcctcccacgactacatcctgaagattgtgcccacggtttatgaggacaagagtggcaagcagcggtactcctaccagtacacggtggccaacaaggtgcgcgggcggtggctgggccgagctgtgtgcggcggcgccctctgctgacggagagcagagatgacaggcggctgcaccgacgcactttcttctgattcctttctggaggcctttcctgggggttagcttgggccaggcgctgtccctgggtaaaattgaaaagcccagtccctgccatgtggcagtctcagagtcaaggagaacagatctaaccaggagatagggtgtgatgcgtttgacaaagagcaggtagtctctgtcctacaaaggtcctggggttgcaggtctcaaacagccctgcatctggtccgagtccttcagacacagacccctgggtgctcaacacagacagacactcctgctctcagggcacaggcactttacccaaactcatgaggctactgagtcacaccaagatggctgttgattaatttgctgttgattgacaggggtgtccccaggaccccaacactcaaagtcatggagaagacgccaggccttagtgggcagcagagcatggtcagagtctgcagagtgggatgacccagcaattagtggtctcaagacaagacagccttgggcttccctgggggtatcccaccaatgggacatgaatacttgaaacctgttggttgaaatgcccctgctagaccctggcggatgggtttttcccacttaccaccaggactgtcctttttcttctgttccaaggctgcccaaaccccttataagtgatacctgtttagctcagttaattataacaacagtaggaggcatagctgtcactcattgagtacttcctgggggctagacatgctaagctctcttcttccgtcttctcaatcatcatgacagctctgatgttgagactgttattgagcccattttgttgatttgaccattgaggcactgagaggtggttgtagagctataaagtggctgagtggggattagaacaggttttccttgggctccagagcctggcttcttgatcacctcacgcctcggtctgaggaaggggctgtgagtctgcccacctgcgagctgctctctgtccaatgacttagtccctctgttctgactcaccctaaattgatgttcccgggagcccctgtttcttttattcactgtttcacagggggcatctcattgtaaccctcacatgctcatagcagctaacagatggaaaagcacagatgcaagctcaggaccacgctgcagttcaaattccagctcagtcattcactagctattgaccccggacatgtcacatagccactgtgtgcctcagtttactcattcataaaatggagatgatactttataagagtgctgtcacatgaggcaatgttttcaaaaatgcctagcccaccaaaaaaaaaaagcctttaggtaagtgatactgactgctgctatttttcactctttttctctgtccctcagctctgggttgtgacccagacagtcatcctgccccagcagctctcctggagaaagctggtcttcccttgcacaaagctccttttcccaatgctttggcaaggcccagcagccaaatacagcttgcttagcttctctatggctgcagccgcactctgccctgggagcaggcagcagcgacccagcgggaggtcagggctcagtgttacttacccccggagtggcctgggctcctcaggctcagcatgtggggttgggggtaccccagtggttcaatttggcctccagttgttgcagactttagcaccttgaagtgcccaaactggagagatcccagggatcatcatcccaggcccatccgtgtttagatggggaagccaagtccctgagggagggaggggctggcccaaggatgcactgttagctcagcctcgtagtatccttagtccctgctgtgtgcattctcaggaaggttggtggcagggcggggccttctggctttgcagttcagtctattcctctgaagaagctagcccactccccacgtggcatttacacccatcacacacacacacacactgggactcctgcttattcatcatgtgtggctcagaatgtcccctccccagtctcccagatgccgcccgggagaatgggtcattcattcattcccctcaactctccatgttcctccatcccacatgcatgatgtcacagtgttagggatattcttatgtcttcctccttctgcagactgcgactccctctgggtaaagggcaggacttgctcacctcggggtccccagcagccagccatgggccaccacagtggaggcgttcagcaaaccattgttgaataaatgaatggatttcgcgtggcccagaggttgaaggaggcaatagccaaaaattgcacttttccttttacagctctgctttctaatttattttctgattctggtgctgcttgcagctcacttggtcaatttctaaacaaccaagggtatcaaaaatgcccagctgtgcacggcagagttcagggcctccaggggaagggatgtgagagagggagtgggggagtctggcttcgtggggcagagagggaggaaagccctttctggagggttgctggggggccctctgcaatccagtccccgccccccctgagacacagtttgtacttctgattcttatatcctctaccccaggaatacgtcgcctacagccacacgggccgcatcatccctgcaatctggttccgctacgacctcagccccatcacggtcaagtacacagagagacggcagccgctgtacagattcatcaccacggtgagtggcctggggcagtgggtggggccctgagccagccaccctgcgcctgctctgggcccctttccttggcacccctcacctgttctcgctgaaacaggaggcagcctgcagggctaggggctctggctgggcacaggaggcttcgaccccaaggatgctgagaaatgttgtcagaaacacatcagtatcgatgacgttttgtctagaaagtattttccagaggggaatgccctgaaatccatttaattcctgaagcaaatctccatatggttccactagatgtttaggattttctccagctttttattgttatggaaattattcttagcagagtttatcctttaatgtgtaaattttgcaccaaagattgaactcatttttttttccaggtctaatttccagttatagctgctgatagggtccgatttttccctttccttcctctctgttctctcttttttgccatggtctctaccacatccagttttctctagggcagattcaagctgatgttagttttcctttatgctgattatttctatcatgtctactgtttcctggcctcccattcagaaggtccttagggtcagaacaggagggtcagggtgcccttcttcacccaagaggcccaggaggtactgaagaagccagagttagctgaggtggaagagacagggtggctatccctacttcacagatttggaaactgagacctaaagataaatatggcattgggaggcccttatgcttctgtacttcttcatgcttgtaatgatggttcaagatcaagggccttggctctttcatttcccgcaataactaggtcagtattagtcaggactctgttaccgaagatccagaaccagaccttgagctggcctgaggagtagaaggcctcaggcatggctggatccagcctccaacattgccaggagtaggtctctatcttcggatctgctttccgctacactggcttcatcttcaagtagaatttaccagtagaaatggcctctttctcagtcattctaaccaagtcctagataggacagagctctcactggcccagctcaggcctcatgccatccttgtggcctgggaaatcaaatgctctggttggccaggcttaggccctgtaccctctctggtgtcaaccccatccaaaccgcagggacacagattgtgaggaatgaggtttctcaagagaaaaggcaggggccagctactggaagaggaaagagtgggtgccaggaggcagaacagtgggatgttgtgacagggtctctgccttctcatctgtgaagtaagaacgatcatctctgttcctgccacctcccagggccttgtgggactcagaggagattgtgaaaggagaagctgtttgcagatgtgaaaagccaagtaggacggggcacagtggctcacacttgtagtcccagcagtttgggaggctgaggcgggaggatcgcttgaggccaggagtttgaaaccagcctgggcaacattgtgaaggcttgtctctaagaatcttcttaaattagctggatacggtggtatatgcacctgtagtcccagctacttaggaggctgaggtgagaggatcacttgagcccaggattttaaggttagagtgagtcatgatcgtgccacttcactctagcctgggcaacagagcgagaccctttctctaaaaaacaaaaatccccagaaaacagacagagagatacaaagggtgtcataagtctggtgcttacatgagcctcagaacagttttttgctgttctctttgaccacataaaagttagaaactcctgttcaacaaacggcacataacataaagcaaaaatctcacacgcagcctgggaaaagatacttgccatccaaatgggaaaggggtagccttcagaattcatatgtaaagaactcctacagatcagtaagaaaaagttaacaaccaaaaaagcagacaaggccaaggaccagctcttcacagaggaggtgatattggcagtgaaaagatgcccaagttcactagaaattggagggatgggatttaaaacaagactcaattcaggccagacgtggtagctcacacctgtaatcccagcactctgggaggtggaagcaggaggatgacttgaggccaggagtttgaaaccagcctggtcaccgcagcaagaccccctccctacaaaagaaaagttaaaaaattagctagacatagtggtgcatgcctgtagtttcagctagttgggaggctgaggtgggaggattgcttgagcgtgggaggttgacactgcagtgggccatgatggcgccactgccctccagcctgggcaacagtgagacccggtctcagaaaaataaaaaaattaaaagacccagttgaatcctattggactgacagaaattgaaaacttgcccggctcacacctgtaattccaggactttgggaggccgaggcgggcagatcacctgaggtcaggagttcaagaccagcctagccaacatgacaaaacactactaaaaatacaaaaattagcggggcatggtggtgggcgcctgtaatcccagctacttgggaggctgaggtgggagaattacttgaacctgggagggagaggttgcggtgagccaggatcactccagtgcactccagcctgggcaacagagtgagactccgtctcaaaaaaaaaa

SEQ ID NO: 6741 - DNA, 3621 bp, Homo sapiens
  source 1..3621: mol_type = unassigned DNA
attcactgtttcacagggggcatctcattgtaaccctcacatgctcatagcagctaacagatggaaaagcacagatgcaagctcaggaccacgctgcagttcaaattccagctcagtcattcactagctattgaccccggacatgtcacatagccactgtgtgcctcagtttactcattcataaaatggagatgatactttataagagtgctgtcacatgaggcaatgttttcaaaaatgcctagcccaccaaaaaaaaaaagcctttaggtaagtgatactgactgctgctatttttcactctttttctctgtccctcagctctgggttgtgacccagacagtcatcctgccccagcagctctcctggagaaagctggtcttcccttgcacaaagctccttttcccaatgctttggcaaggcccagcagccaaatacagcttgcttagcttctctatggctgcagccgcactctgccctgggagcaggcagcagcgacccagcgggaggtcagggctcagtgttacttacccccggagtggcctgggctcctcaggctcagcatgtggggttgggggtaccccagtggttcaatttggcctccagttgttgcagactttagcaccttgaagtgcccaaactggagagatcccagggatcatcatcccaggcccatccgtgtttagatggggaagccaagtccctgagggagggaggggctggcccaaggatgcactgttagctcagcctcgtagtatccttagtccctgctgtgtgcattctcaggaaggttggtggcagggcggggccttctggctttgcagttcagtctattcctctgaagaagctagcccactccccacgtggcatttacacccatcacacacacacacacactgggactcctgcttattcatcatgtgtggctcagaatgtcccctccccagtctcccagatgccgcccgggagaatgggtcattcattcattcccctcaactctccatgttcctccatcccacatgcatgatgtcacagtgttagggatattcttatgtcttcctccttctgcagactgcgactccctctgggtaaagggcaggacttgctcacctcggggtccccagcagccagccatgggccaccacagtggaggcgttcagcaaaccattgttgaataaatgaatggatttcgcgtggcccagaggttgaaggaggcaatagccaaaaattgcacttttccttttacagctctgctttctaatttattttctgattctggtgctgcttgcagctcacttggtcaatttctaaacaaccaagggtatcaaaaatgcccagctgtgcacggcagagttcagggcctccaggggaagggatgtgagagagggagtgggggagtctggcttcgtggggcagagagggaggaaagccctttctggagggttgctggggggccctctgcaatccagtccccgccccccctgagacacagtttgtacttctgattcttatatcctctaccccaggaatacgtcgcctacagccacacgggccgcatcatccctgcaatctggttccgctacgacctcagccccatcacggtcaagtacacagagagacggcagccgctgtacagattcatcaccacgatctgtgccatcattggcgggaccttcaccgtcgccggcatcctggactcatgcatcttcacagcctctgaggcctggaagaagatccagctgggcaagatgcattgacgccacacccagcctaatggccgaggaccctgggcatcgccagccttgcctccagtgccctgtctcctttggccctcaatctggtcccaaatctggctgtgtcccaaagggtgtgtgggaagtggggggaaagtagaggatggctcgatgttttgcagctacctcttttccccgtgtttctttttagacaaattacactgcctgaagttgcagttcccctttccctggggagccccaagaacagagtcaggcaaggggtggggagtccagggatcttggggacccctcctaggagagctgcagtctcttccctcaggggaacatcccagaatgcatatcgatcagctctcagccaggcttcgacaatctcgcagcccccactaggtggacacattaatgatttggtttctcccctgggcagccaacctgccccagaggcaccagacctgggctttcagctttgggaccaggctgcccaaaggtactcctttatacacccggcaccttccacgaaagatggtacttcccaagcaagcccctatgatttgtcactatagatggaaccctgacttctgccccatcccttcctgcccaacctagaacccaggcctcaagtctttaccccacccctttcttgttcttccaagaagcagatgcccagttgctcagcagcagcggtagagacttgaatctgcccaccagtcacaaggcgggtcacagattcctcttcctctcttctcctcgttcctctgaaccctccaccaatgtgcctcagcctgtgtgctgtgtggcaacagcattctggttcccactgccaagatctcccaccactctgctgggatctgcagtggcagggagtgggggttgtgtaaaggggaagtcatcttttgagatccagatagacatggtttgtgcacttacgtccagatgggaagcatccttcctgcaaccctaaaataatcatgcagcctctcagacggacgccatcggtcccaaggccttaggtggaggaagcaaagcaggccaggcctgtcctgtccgtggacctctaccttctggactccctacgggtgcagagcacttgggtttctctacagccatcgtggcccacttgacactgtgctcctccatcagctggtcacatgccaacacgttcccagcccctgaggcagctccagggtgccccacctgctcctgaggtgggtccctaccctgctgctcctcttcatcctttcccttttgtcctgaaagggaggagcaatggtccaggcattaattccacccagggaattttagctatgccctcatgtcccagggagagagccacacgcctgttttccatttatagcaagattgtttgcatacttttgtaatgaaggggagtgtccagtggaaggatttttaaaattatcttatggatagctcaagtctctgccatttgtaatttttggctctaagctccgattggagacgcttctccttgtgcatgtgagttgactgatgttgtgagtgtaaatgcatttggttatttctggtatcggtggccacttggatggatttttttacattctgttccccagttacaggaaggagtccctttggtgtgtgaatatgtgtgcctgtagagggtggggcagggtggggtggggatggaaatgtgtggcatgcacatgagttgaaattcttttatgcatttttttgaagaaaaaaaaaaaaacaactctgaggacataggggatgtcagtttcctatggaagagacacctctgacccgttattcttataatcaaaatctgaagggaaaaaaatgttttagttctttccccactcgttgggttcaactagattaaaaggctgattttcag

SEQ ID NO: 6742 - DNA, 1761 bp, Homo sapiens
  source 1..1761: mol_type = unassigned DNA
ccccctgacatcctccctatccctgctttaggggcttttcctctcttactgtgccataccctccaccgtctcccctcctgtctcctgggctctactcctccctgccctcctctgcgtcctggccctcccgctctcttccgctttgcgctcccaggctccttccacctcctgccagctcccttcctcctccaggtgcgcaccccctaccattagccccgctgcgcgcttgcgctctacgcccaagggagccgggctgcagagctggagaaacttccgcggctacgggtgcagttgccttcggttcccggttccgggccgacacccgcgcagggctgagacaggtgtctgcgctccccgcaatgggctgctccagcagcgccctcaacaaggccggcgacagcagcaggttccccagcgtaacttcaaatgagcatttttcaactgcagaagaaagtgagtcctgctttgcccaaccaaagccacatgcactgggaagagaatctactgttgatggcaatgtacaaagggaaagccgtcctcccttacaaaagctcaaggtttcagcagagcctacagctaatggtgttaaacccctccaagaacagcccctggccaaggacgtagcccctggaagggatgccacagaccaatcagggtccacagaaaagactcagcctggagagggactggaggaatctgggccgcctcaaccaggtggcaaagaggatgccccagcagcagaaggaaagaagaaagatgcaggagcagggacagaggccgagtctctaaaaggaaatgctgaagctcagcctttaggaccagaagccaagggtcagcctttgcaggcagcagtagagaaggactctctcagagcagtggaggtcactgagaatccacaaactgctgcagagatgaagcctctaggaacaactgagaacgttctgactctgcaaatagctggagagctacaacctcagggcacagtgggaaaggatgagcaggccccgcttctagaaacaatttccaaagagaatgaatctccagaaatattggaaggaagtcagtttgtggaaacagctgaagagcagcaacttcaggcaacattgggaaaagaggagcagccccagcttctagaaagaattcccaaagagaatgtaacaccagaagtattggacagaagtcagcttgtggaaaagcctgttatgaatgatccattccataaaactcctgaaggtccaggaaacatggagcagattcaacctgaaggaatagttggaagcatggagcatccagcacgaaatgtagaggcaggagcatatgtggaaatgatcaggaacatccatactaatgaagaggaccaacgcattgaaggtgagacaggggaaaaggtggaaacagacatggagaatgagaaagtgagtgaaggggctgaaaccaaagaagaagaaacaggagaagtggtggacctttcagcagccacatagatagaagagtgaaccgacacagtgtgttatcatagaggagacaaaaatggtagtgaagcttgtggttatgtatcttatctttctacatttacatgttttctgtaaggagtgtggttatagagagactgttggaaccatgagaaggatgtttctgtgttcttgattatattgttctgcaaaactgctaagccatgaacagttttcttagctacttagaatggttatacatttaaaagtataaaaaccaaagccaataaaaatgatgtgattatttaag

SEQ ID NO: 6743 - DNA, 596 bp, Homo sapiens
  source 1..596: mol_type = unassigned DNA
agccccgctgcgcgcttgcgctctacgcccaagggagccgggctgcagagctggagaaacttccgcggctacgggtgcagttgccttcggttcccggttccgggccgacacccgcgcagggctgagacaggtgtctgcgctccccgcaatgggctgctccagcagcgccctcaacaaggccggcgacagcagcaggttccccagcggtgagacaggggaaaaggtggaaacagacatggagaatgagaaagtgagtgaaggggctgaaaccaaagaagaagaaacaggagaagtggtggacctttcagcagccacatagatagaagagtgaaccgacacagtgtgttatcatagaggagacaaaaatggtagtgaagcttgtggttatgtatcttatctttctacatttacatgttttctgtaaggagtgtggttatagagagactgttggaaccatgagaaggatgtttctgtgttcttgattatattgttctgcaaaactgctaagccatgaacagttttcttagctacttagaatggttatacatttaaaagtataaaaaccaaagccaataaaaatgatgtgattatttaag

SEQ ID NO: 6744 - DNA, 3793 bp, Homo sapiens
  source 1..3793: mol_type = unassigned DNA
gatgcctttaactctgccagggaactggcaagcaacaaagaaggtggtgattggctggattcttgctcatggctcctggcagatctgacaaatcctcttgcttttgctctaatctctgtctggatacttttaggaaaagaaccttgttattatgtactaaagtgaataatttgtgctcttagagtaggagttggaactataggacttgaaggcaagagcaggtatcttatcaaggatctactcactcagtttccctaaagctctctctccagatcggattcaaccgcacatcatgacagatgttccggctacatttacccaggctgagtgtaatggggataaaccacctgaaaacggtcaacaaacaatcactaaaatcagtgaggaattgactgatgtggacagccccctgccacactacagggtagaacccagtctggaaggtgcactcaccaaaggaagtcaggaggaaagaagaaaattacaagggaacatgctgctcaactcatccatggaggacaaaatgctaaaagaaaacccagaagagaaactctttattgttcataaggctatcacagatctttctctccaagaaactagtgctgatgaaatgacattcagagaagggcatcagtgggagaagattcctctgagtggcagtaaccaggaaataagaagacagaaggagaggattactgagcagcctctcaaagaggaagaagatgaggacaggaagaacaaaggtcaccaggcagctgaaattgaatggctgggatttcgaaaacctagccaagctgacatgttacattctaaacatgatgaggagcagaaggtttgggatgaagaaattgatgatgatgatgatgataattgcaataatgatgaagatgaagttcgagtgatagaatttaagaaaaaacatgaagaggtttctcaatttaaagaggaaggtgatgcaagtgaggactccccactgagcagtgccagttcccaagctgtgacacctgatgagcagccaaccttagggaagaagagtgatatctccagaaatgcttattccagatacaatacaatatcctatcggaaaatcagaaagggaaataccaagcaaagaattgatgaattcgagtctatgatgcatttataaactaactggaactgagaaattctcatgcccactaaaggaaaagctaattctattgccccagggtgcatatttctatgccttatttgagttatcacttggagggaggtggaagttgactctctttttcactgtagaataatgtggaaataaccctagataaaaattcagtctgataacctcaaatcaaaaagctttaaataaattcttgggcatttatcttttaaaacttcactaatatagcattgtgtgataagcactaagcagtcagtcccctgggggaatctggcataattcggctataaatgtagcaatgcttggaaaggtagtcatcaaatgagactatttgaggggactatttgaaatgattctggtatttcttttggtatctttcttcctgtacattggagtgatggaaagtctggtattaaaacctctcttacttttaaacttgattttgcagactctggcaataagccttccaaaattctgtgccttttctattatcaccaaacaatatgttaagtggctttccttggcatctacagagaaaacattctatagccctccttcctaggtgttaccattcactgaatcttctctcagagggagatgagcaattgtcagtcaggataattctgtttgctaaatgttgcctttatgctttcaaactgaattaaacccattgtgaggttgacactgggaggggctagaagattggtgggcagcagactaaagagttatgttggatagttttatttctgtggctgaaaataaaatcttgtctagcacagttaaagtcattaaaaataaaaatgacagctttagcacaattttaagaaaatgcccctctctattaccacattttctcttattaacagtatctcagaataattttctttccttagaaacctgagagaatgctagtcataactgtactagttactatgaaaatggaaataattatcttagaatattttcaaagtagagcgtgagcatgtatttttagtgggagagctctgatagttgttgggaatatataatttactggacctcagcccaaatcaagatgcttaaaattgtacttgtggagcttcactcaaaccaatgtgtcaaataacgtattgaatatttatgaaaagagagactatatttatattcttagatagtttgttccacaatttttcatttcatgcttccatatatattaccctgaactttctatcaccacagataaagattttgttttgccctgcaaataaaaagacaattccttattgtctgaatgtaatacagtcttcattgtactattcaaccctttgtttctttctttttcattttgtgaaaaactccatgttagtcctcttagatgactgcttatttatgtgtaacataaatcccacatattctaatgacaacttctttaatccttccgggtcatatattatatttccatagtatcacatactattatttagttgtttacaagactccaatttgaattcaggattacagtgctcctttcattctttcaaacagataacataaaagttctgttaccctcattctatacaacctatggatttcatgtgttacaatatcagtttccagaataaagtgagggaaatcaggtctttattgataaagttagggagaagattgatgcaataggacaatttccaatttaatttagatcctctaatctttctacatggacaagctgttttcttttctaggttactgataacccctacaattttcgacttaacttcaaaacacagtattgtgttatctatcacataacaggaccatgtttttaacctaccatcaagagcctgtattttgagttattccaacagagatgatggattcctgtagaactagaggtgggtgacctatggttatgtggcacggcaaagcaagtacctcttaagggactctaatatatgctaacgctggtcctcttagctctgtgctctcaccagacaatgaatgaactatgaaagatttagtcaacagaaactattttagggtatgtttagttggtaaatgcttcatgttcatggatgacacaatgtttttgcaaaaaaaccctgaaactattctttggcattggtgtccatggccctataccgccatcttacacgaaagccacagagttgaaagccacagagttgaaagccacagagttaagtgacctcaggtaacataatggtgatggttggccatttgagtctttgtaacctaggaaagacaaaggtctgattcagattgcatgggggatttttaacatatttgaaactcagggggaacatgattaagaacacaaactggtagctacacatgaaggtttacttgagcttttgtgattcaaagttcaggggtggtaaggactctggtaccagggaagagggagaattaatttattgtgcaaatgctggtatttcttacatgattttttgttttcctctgttgctagataaatagaaactaataatagctctatttctctgccaatataaaatctacctttcatataatgctacattgaaggcacagaatttgctaccatctctctctccccctacctaccaaactatccacaatttaaataaagaactgctgtgtctgacttactctcaataaaag

SEQ ID NO: 6745 - DNA, 3760 bp, Homo sapiens
  source 1..3760: mol_type = unassigned DNA; mol_type = unassigned DNA
cacaactgtctctactgccaaggtgctaatgccgaacccctgtgggatctctggtccaaggaaacatctgcacacaggccagggatggcgcttagcttcatctgtgctgcaaactctcatcagtaggcttgctggctctgtgaccttactagctgaactccttaatctctctgcacttcatttttctagtctataaaatggagataacaacagcacctacctcagaagactgttatgaagactctctctccagatcggattcaaccgcacatcatgacagatgttccggctacatttacccaggctgagtgtaatggggataaaccacctgaaaacggtcaacaaacaatcactaaaatcagtgaggaattgactgatgtggacagccccctgccacactacagggtagaacccagtctggaaggtgcactcaccaaaggaagtcaggaggaaagaagaaaattacaagggaacatgctgctcaactcatccatggaggacaaaatgctaaaagaaaacccagaagagaaactctttattgttcataaggctatcacagatctttctctccaagaaactagtgctgatgaaatgacattcagagaagggcatcagtgggagaagattcctctgagtggcagtaaccaggaaataagaagacagaaggagaggattactgagcagcctctcaaagaggaagaagatgaggacaggaagaacaaaggtcaccaggcagctgaaattgaatggctgggatttcgaaaacctagccaagctgacatgttacattctaaacatgatgaggagcagaaggtttgggatgaagaaattgatgatgatgatgatgataattgcaataatgatgaagatgaagttcgagtgatagaatttaagaaaaaacatgaagaggtttctcaatttaaagaggaaggtgatgcaagtgaggactccccactgagcagtgccagttcccaagctgtgacacctgatgagcagccaaccttagggaagaagagtgatatctccagaaatgcttattccagatacaatacaatatcctatcggaaaatcagaaagggaaataccaagcaaagaattgatgaattcgagtctatgatgcatttataaactaactggaactgagaaattctcatgcccactaaaggaaaagctaattctattgccccagggtgcatatttctatgccttatttgagttatcacttggagggaggtggaagttgactctctttttcactgtagaataatgtggaaataaccctagataaaaattcagtctgataacctcaaatcaaaaagctttaaataaattcttgggcatttatcttttaaaacttcactaatatagcattgtgtgataagcactaagcagtcagtcccctgggggaatctggcataattcggctataaatgtagcaatgcttggaaaggtagtcatcaaatgagactatttgaggggactatttgaaatgattctggtatttcttttggtatctttcttcctgtacattggagtgatggaaagtctggtattaaaacctctcttacttttaaacttgattttgcagactctggcaataagccttccaaaattctgtgccttttctattatcaccaaacaatatgttaagtggctttccttggcatctacagagaaaacattctatagccctccttcctaggtgttaccattcactgaatcttctctcagagggagatgagcaattgtcagtcaggataattctgtttgctaaatgttgcctttatgctttcaaactgaattaaacccattgtgaggttgacactgggaggggctagaagattggtgggcagcagactaaagagttatgttggatagttttatttctgtggctgaaaataaaatcttgtctagcacagttaaagtcattaaaaataaaaatgacagctttagcacaattttaagaaaatgcccctctctattaccacattttctcttattaacagtatctcagaataattttctttccttagaaacctgagagaatgctagtcataactgtactagttactatgaaaatggaaataattatcttagaatattttcaaagtagagcgtgagcatgtatttttagtgggagagctctgatagttgttgggaatatataatttactggacctcagcccaaatcaagatgcttaaaattgtacttgtggagcttcactcaaaccaatgtgtcaaataacgtattgaatatttatgaaaagagagactatatttatattcttagatagtttgttccacaatttttcatttcatgcttccatatatattaccctgaactttctatcaccacagataaagattttgttttgccctgcaaataaaaagacaattccttattgtctgaatgtaatacagtcttcattgtactattcaaccctttgtttctttctttttcattttgtgaaaaactccatgttagtcctcttagatgactgcttatttatgtgtaacataaatcccacatattctaatgacaacttctttaatccttccgggtcatatattatatttccatagtatcacatactattatttagttgtttacaagactccaatttgaattcaggattacagtgctcctttcattctttcaaacagataacataaaagttctgttaccctcattctatacaacctatggatttcatgtgttacaatatcagtttccagaataaagtgagggaaatcaggtctttattgataaagttagggagaagattgatgcaataggacaatttccaatttaatttagatcctctaatctttctacatggacaagctgttttcttttctaggttactgataacccctacaattttcgacttaacttcaaaacacagtattgtgttatctatcacataacaggaccatgtttttaacctaccatcaagagcctgtattttgagttattccaacagagatgatggattcctgtagaactagaggtgggtgacctatggttatgtggcacggcaaagcaagtacctcttaagggactctaatatatgctaacgctggtcctcttagctctgtgctctcaccagacaatgaatgaactatgaaagatttagtcaacagaaactattttagggtatgtttagttggtaaatgcttcatgttcatggatgacacaatgtttttgcaaaaaaaccctgaaactattctttggcattggtgtccatggccctataccgccatcttacacgaaagccacagagttgaaagccacagagttgaaagccacagagttaagtgacctcaggtaacataatggtgatggttggccatttgagtctttgtaacctaggaaagacaaaggtctgattcagattgcatgggggatttttaacatatttgaaactcagggggaacatgattaagaacacaaactggtagctacacatgaaggtttacttgagcttttgtgattcaaagttcaggggtggtaaggactctggtaccagggaagagggagaattaatttattgtgcaaatgctggtatttcttacatgattttttgttttcctctgttgctagataaatagaaactaataatagctctatttctctgccaatataaaatctacctttcatataatgctacattgaaggcacagaatttgctaccatctctctctccccctacctaccaaactatccacaatttaaataaagaactgctgtgtctgactt

SEQ ID NO: 6746 - DNA, 1466 bp, Homo sapiens
  source 1..1466: mol_type = unassigned DNA; mol_type = unassigned DNA
cttgctcatggctcctggcagatctgacaaatcctcttgcttttgctctaatctctgtctggatacttttaggaaaagaaccttgttattatgtactaaagtgaataatttgtgctcttagagtaggagttggaactataggacttgaaggcaagagcaggtatcttatcaaggatctactcactcagtttccctaaagctctctctccagatcggattcaaccgcacatcatgacagatgttccggctacatttacccaggctgagtgtaatggggataaaccacctgaaaacggtcaacaaacaatcactaaaatcagtgaggaattgactgatgtggacagccccctgccacactacagggtagaacccagtctggaaggtgcactcaccaaaggaagtcaggaggaaagaagaaaattacaagggaacatgctgctcaactcatccatggaggacaaaatgctaaaaggctggtctatttgacagctgtgaccccagacaactttctgtctcccgaagcctgagtttttttcactagaagaaggcggaataataataataactacaagtctaggaaaacccagaagagaaactctttattgttcataaggctatcacagatctttctctccaagaaactagtgctgatgaaatgacattcagagaagggcatcagtgggagaagattcctctgagtggcagtaaccaggaaataagaagacagaaggagaggattactgagcagcctctcaaagaggaagaagatgaggacaggaagaacaaaggtcaccaggcagctgaaattgaatggctgggatttcgaaaacctagccaagctgacatgttacattctaaacatgatgaggagcagaaggtttgggatgaagaaattgatgatgatgatgatgataattgcaataatgatgaagatgaagttcgagtgatagaatttaagaaaaaacatgaagaggtttctcaatttaaagaggaaggtgatgcaagtgaggactccccactgagcagtgccagttcccaagctgtgacacctgatgagcagccaaccttagggaagaagagtgatatctccagaaatgcttattccagatacaatacaatatcctatcggaaaatcagaaagggaaataccaagcaaagaattgatgaattcgagtctatgatgcatttataaactaactggaactgagaaattctcatgcccactaaaggaaaagctaattctattgccccagggtgcatatttctatgccttatttgagttatcacttggagggaggtggaagttgactctctttttcactgtagaataatgtggaaataaccctagataaaaattcagtctgataacctcaaatcaaaaagctttaaataaattcttgggcatttatcttttaaaacttcactaatatagcattgtgtgataagcactaagcagtcagtcccct

SEQ ID NO: 6747 - DNA, 1246 bp, Homo sapiens
  source 1..1246: mol_type = unassigned DNA; mol_type = unassigned DNA
aatctctgtctggatacttttaggaaaagaaccttgttattatgtactaaagtgaataatttgtgctcttagagtaggagttggaactataggacttgaaggcaagagcaggtatcttatcaaggatctactcactcagtttccctaaagctctctctccagatcggattcaaccgcacatcatgacagatgttccggctacatttacccaggctgagtgtaatggggataaaccacctgaaaacggtcaacaaacaatcactaaaatcagtgaggaattgactgatgtggacagccccctgccacactacagggtagaacccagtctggaaggtgcactcaccaaaggaagtcaggaggaaagaagaaaattacaagggaacatgctgctcaactcatccatggaggacaaaatgctaaaagaaactagtgctgatgaaatgacattcagagaagggcatcagtgggagaagattcctctgagtggcagtaaccaggaaataagaagacagaaggagaggattactgagcagcctctcaaagaggaagaagatgaggacaggaagaacaaaggtcaccaggcagctgaaattgaatggctgggatttcgaaaacctagccaagctgacatgttacattctaaacatgatgaggagcagaaggtttgggatgaagaaattgatgatgatgatgatgataattgcaataatgatgaagatgaagttcgagtgatagaatttaagaaaaaacatgaagaggtttctcaatttaaagaggaaggtgatgcaagtgaggactccccactgagcagtgccagttcccaagctgtgacacctgatgagcagccaaccttagggaagaagagtgatatctccagaaatgcttattccagatacaatacaatatcctatcggaaaatcagaaagggaaataccaagcaaagaattgatgaattcgagtctatgatgcatttataaactaactggaactgagaaattctcatgcccactaaaggaaaagctaattctattgccccagggtgcatatttctatgccttatttgagttatcacttggagggaggtggaagttgactctctttttcactgtagaataatgtggaaataaccctagataaaaattcagtctgataacctcaaatcaaaaagctttaaataaattcttgggcatttatcttttaaaacttcactaatatagcattgtgtgataagcactaagcagtcagt

SEQ ID NO: 6748 - DNA, 541 bp, Homo sapiens
  source 1..541: mol_type = unassigned DNA; mol_type = unassigned DNA
atagacctgaatgggctcagccctagacacacttttaaagatcggattcaaccgcacatcatgacagatgttccggctacatttacccaggctgagtgtaatggggataaaccacctgaaaacggtcaacaaacaatcactaaaatcagtgaggaattgactgatgtggacagccccctgccacactacagggtagaacccagtctggaaggtgcactcaccaaaggaagtcaggaggaaagaagaaaattacaagggaacatgctgctcaactcatccatggaggacaaaatgctaaaagaaaacccagaagagaaactctttattgttcataaggctatcacagatctttctctccaagaaactagtgctgatgaaatgacattcagagaagggcatcagtgggagaagattcctctgagtggcagtaaccaggaaataagaagacagaaggagaggattactgagcagcctctcaaagaggaagaagatgaggacaggaagaacaaaggtcaccaggcagctgaaattgaatggctgg

SEQ ID NO: 6749 - DNA, 590 bp, Homo sapiens
  source 1..590: mol_type = unassigned DNA; mol_type = unassigned DNA
agagatgtcttccaaggacaagggagaggggattatacaagagtgaggtgttgtccctgatatagacctgaatgggctcagccctagacacacttttaaagctctctctccagatcggattcaaccgcacatcatgacagatgttccggctacatttacccaggctgagtgtaatggggataaaccacctgaaaacggtcaacaaacaatcactaaaatcagtgaggaattgactgatgtggacagccccctgccacactacagggtagaacccagtctggaaggtgcactcaccaaaggaagtcaggaggaaagaagaaaattacaagggaacatgctgctcaactcatccatggaggacaaaatgctaaaagaaaacccagaagagaaactctttattgttcataaggctatcacagatctttctctccaagaaactagtgctgatgaaatgacattcagagaagggcatcagtgggagaagattcctctgagtggcagtaaccaggaaataagaagacagaaggagaggattactgagcagcctctcaaagaggaagaagatgaggacaggaagaacaaaggtcacc

SEQ ID NO: 6750 - DNA, 746 bp, Homo sapiens
  source 1..746: mol_type = unassigned DNA; mol_type = unassigned DNA
aatctctgtctggatacttttaggaaaagaaccttgttattatgtactaaagtgaataatttgtgctcttagagtaggagttggaactataggacttgaaggcaagagcaggtatcttatcaaggatctactcactcagtttccctaaagctctctctccagatcggattcaaccgcacatcatgacagatgttccggctacatttacccaggctgagtgtaatggggataaaccacctgaaaacggtcaacaaacaatcactaaaatcagtgaggaattgactgatgtggacagccccctgccacactacagggtagaacccagtctggaaggtgcactcaccaaaggaagtcaggaggaaagaagaaaattacaagggaacatgctgctcaactcatccatggaggacaaaatgctaaaagaaaacccagaagagaaactctttattgttcataaggctatcacagatctttctctccaagaaactagtgctgatgaaatgacattcagagaagacggagtgtcactcttgttgcccaggctggagtgcaatggtgcaatctcggcagactgcaacctctgtctccagggttcaagcgattctcctgcctcagcttcctgagtaactgggattacagggcatcagtgggagaagattcctctgagtggcagtaaccaggaaataagaagacagaaggagaggattactgagcagcctctcaaagaggaagaagatgaggacagg

SEQ ID NO: 6751 - DNA, 556 bp, Homo sapiens
  source 1..556: mol_type = unassigned DNA; mol_type = unassigned DNA
ggattcaaccgcacatcatgacagatgttccggctacatttacccaggctgagtgtaatggggataaaccacctgaaaacggtcaacaaacaatcactaaaatcagtgaggaattgactgatgtggacagccccctgccacactacagggtagaacccagtctggaaggtgcactcaccaaaggaagtcaggaggaaagaagaaaattacaagggaacatgctgctcaactcatccatggaggacaaaatgctaaaagaaaacccagaagagaaactctttattgttcataaggctatcacagatctttctctccaagaaactagtgctgatgaaatgacattcagagaagacggagtgtcactcttgttgcccaggctggagtgcaatggtgcaatctcggcagactgcaacctctgtctccagggttcaagcgattctcctgcctcagcttcctgagtaactgggattacaggcacctgacaccacgcccagctattttgtggcatcagtgggagaagattcctctgagtggcagtaaccaggaaataagaaga

SEQ ID NO: 6752 - DNA, 594 bp, Homo sapiens
  source 1..594: mol_type = unassigned DNA; mol_type = unassigned DNA
aacaaagaaggtggtgattggctggattcttgctcatggctcctggcagatctgacaaatcctcttgcttttgctctaatctctgtctggatacttttaggaaaagaaccttgttattatgtactaaagtgaataatttgtgctcttagagtaggagttggaactataggacttgaaggcaagagcaggtatcttatcaaggatctactcactcagtttccctaaagctctctctccagatcggattcaaccgcacatcatgacagatgttccggctacatttacccaggctgagtgtaatggggataaaccacctgaaaacggtcaacaaacaatcactaaaatcagtgaggaattgactgatgtggacagccccctgccacactacagggtagaacccagtctggaaggtgcactcaccaaaggaagtcaggaggaaagaagaaaattacaagggaacatgctgctcaactcatccatggaggacaaaatgctaaaagaagagaaactctttattgttcataaggctatcacagatctttctctccaagaaactagtgctgatgaaatgacattcagagaagggcatcagtg

SEQ ID NO: 6753 - DNA, 1826 bp, Homo sapiens
  source 1..1826: mol_type = unassigned DNA; mol_type = unassigned DNA
catggggctgggtggagttggaagtctagagctttttgctgttttgtttaagacctggttatggttgtgagacttttttttttttttttttttttttgtcagctgcctgttatatcaatcacggagtcgggatctatttataggttgggagtactgtgtccttagtcacaaagagacacagacaggggactgtcagctggtaccggaggagcggagcaacgagttatcagcaactgaaagcacctgaggggccgcacattccaccccagcccagtcctcgtcctccacgccagccccaagcatgctgctgaacaggatgtcctcggacgacaggcacctgggctccagctgcggctccttcatcaagactgagccgtccagcccgtcctcgggcatcgatgccctcagccaccacagccccagtggctcgtccgacgccagcggcggctttggcctggccctgggcacccacgccaacggtctggactcgccacccatgtttgcaggcgccgggctgggaggcaccccatgccgcaagagctacgaggactgtgccagcggcatcatggaggactcggccatcaagtgcgagtacatgctcaacgccatccccaagcgcctgtgcctcgtgtgcggggacattgcctctggctaccactacggcgtggcctcctgcgaggcttgcaaggccttcttcaagaggactatccaagggaacattgagtacagctgcccggccaccaacgagtgcgagatcaccaaacggaggcgcaagtcctgccaggcctgccgcttcatgaaatgcctcaaagtggggatgctgaaggaaggtgtgcgccttgatcgagtgcgtggaggccgtcagaaatacaagcgacggctggactcagagagcagcccatacctgagcttacaaatttctccacctgctaaaaagccattgaccaagattgtctcatacctactggtggctgagccggacaagctctatgccatgcctccccctggtatgcctgagggggacatcaaggccctgaccactctctgtgacctggcagaccgagagcttgtggtcatcattggctgggccaagcacatcccaggcttctcaagcctctccctgggggaccagatgagcctgctgcagagtgcctggatggaaatcctcatcctgggcatcgtgtaccgctcgctgccctatgacgacaagctggtgtacgctgaggactacatcatggatgaggagcactcccgcctcgcggggctgctggagctctaccgggccatcctgcagctggtacgcaggtacaagaagctcaaggtggagaaggaggagtttgtgacgctcaaggccctggccctcgccaactccgattccatgtacatcgaggatctagaggctgtccagaagctgcaggacctgctgcacgaggcactgcaggactacgagctgagccagcgccatgaggagccctggaggacgggcaagctgctgctgacactgccgctgctgcggcagacggccgccaaggccgtgcagcacttctatagcgtcaaactgcagggcaaagtgcccatgcacaaactcttcctggagatgctggaggccaaggttggccaagagcagcttagaggatctcccaaggatgaaagaatgtcaagccatgatggaaaatgccccttccaatcagctgccttcacaagcagggatcagagcaactccccggggatccccaatccacgcccttctagtccaacccccctcaatgagagaggcaggcagatctcacccagcactaggacaccaggaggccagggaaagcatc

SEQ ID NO: 6754 - DNA, 2432 bp, Homo sapiens
  source 1..2432: mol_type = unassigned DNA; mol_type = unassigned DNA
ttcaggaaaagccatcatgtttccgcagcatttatctgtcagcaggagactattatgagagcacaaactcacattgtattagcgttatcagttaattatgatccttgggaccagtgccagccaatgggctagcagtctgctgaccatcactcagggatataactccacacccccaaattcaagcatgtaagaagacagcaggtccgcagagaggtgtggtcagggacatttcccctggccgggagcccatggagcactgtcctcagagatgcgcaggttaggctcactgtctaggccaggcccaccttagtcactgtggactggcaatggaagctcttcctggacacacctgccctagccctcaccctggggtggaagagaaatgagcttggcttgcaactcagaccattccacggaggcatcctccccttcctgggctggtgaataaaagtttcctgaggtcaaggacttccttttccctgccaaaatggtgtccagaactttgaggccagaggtgatccagtgatttgggagctgcaggtcacacaggctgctcagagggctgctgaacaggatgtcctcggacgacaggcacctgggctccagctgcggctccttcatcaagactgagccgtccagcccgtcctcgggcatcgatgccctcagccaccacagccccagtggctcgtccgacgccagcggcggctttggcctggccctgggcacccacgccaacggtctggactcgccacccatgtttgcaggcgccgggctgggaggcaccccatgccgcaagagctacgaggactgtgccagcggcatcatggaggactcggccatcaagtgcgagtacatgctcaacgccatccccaagcgcctgtgcctcgtgtgcggggacattgcctctggctaccactacggcgtggcctcctgcgaggcttgcaaggccttcttcaagaggactatccaagggaacattgagtacagctgcccggccaccaacgagtgcgagatcaccaaacggaggcgcaagtcctgccaggcctgccgcttcatgaaatgcctcaaagtggggatgctgaaggaaggtgtgcgccttgatcgagtgcgtggaggccgtcagaaatacaagcgacggctggactcagagagcagcccatacctgagcttacaaatttctccacctgctaaaaagccattgaccaagattgtctcatacctactggtggctgagccggacaagctctatgccatgcctccccctggtatgcctgagggggacatcaaggccctgaccactctctgtgacctggcagaccgagagcttgtggtcatcattggctgggccaagcacatcccaggcttctcaagcctctccctgggggaccagatgagcctgctgcagagtgcctggatggaaatcctcatcctgggcatcgtgtaccgctcgctgccctatgacgacaagctggtgtacgctgaggactacatcatggatgaggagcactcccgcctcgcggggctgctggagctctaccgggccatcctgcagctggtacgcaggtacaagaagctcaaggtggagaaggaggagtttgtgacgctcaaggccctggccctcgccaactccgattccatgtacatcgaggatctagaggctgtccagaagctgcaggacctgctgcacgaggcactgcaggactacgagctgagccagcgccatgaggagccctggaggacgggcaagctgctgctgacactgccgctgctgcggcagacggccgccaaggccgtgcagcacttctatagcgtcaaactgcagggcaaagtgcccatgcacaaactcttcctggagatgctggaggccaaggcctgggccagggctgactcccttcaggagtggaggccactggagcaagtgccctctcccctccaccgagccaccaagaggcagcatgtgcatttcctaactcccttgccccctcccccatctgtggcctgggtgggcactgctcaggctggataccacctggaggttttccttccgcagagggcaggttggccaagagcagcttagaggatctcccaaggatgaaagaatgtcaagccatgatggaaaatgccccttccaatcagctgccttcacaagcagggatcagagcaactccccggggatccccaatccacgcccttctagtccaacccccctcaatgagagaggcaggcagatctcacccagcactaggacaccaggaggccagggaaagcatctctggctcaccatgtaacatctggcttggagcaagtgggtgttctgcacaccaggcagctgcacctcactggatctagtgttgctgcgagtgacctcacttcagagcccctctagcagagtggggcggaagtcctgatggttggtgtccatgaggtggaag

SEQ ID NO: 6755 - DNA, 736 bp, Homo sapiens
  source 1..736: mol_type = unassigned DNA; mol_type = unassigned DNA
ccccgccgtctttctctaccaactgggaatgctaaaacgggactgatggacgtgtccgaactctgcatcccggaccccctcggctaccacaaccagctgctgaacaggatgtcctcggacgacaggcacctgggctccagctgcggctccttcatcaagactgagccgtccagcccgtcctcgggcatcgatgccctcagccaccacagccccagtggctcgtccgacgccagcggcggctttggcctggccctgggcacccacgccaacggtctggactcgccacccatgtttgcaggcgccgggctgggaggcaccccatgccgcaagagctacgaggactgtgccagcggcatcatggaggactcggccatcaagtgcgagtacatgctcaacgccatccccaagcgcctgtgcctcgtgtgcggggacattgcctctggctaccactacggcgtggcctcctgcgaggcttgcaaggccttcttcaagaggactatccaagggaacattgagtacagctgcccggccaccaacgagtgcgagatcaccaaacggaggcgcaagtcctgccaggcctgccgcttcatgaaatgcctcaaagtggggatgctgaaggaaggtgtgcgccttgatcgagtgcgtggaggccgtcagaaatacaagcgacggctggactcagagagcagcccatacctgagcttacaaatttctccacctgctaaaaagccatgtg

SEQ ID NO: 6756 - DNA, 2745 bp, Homo sapiens
  source 1..2745: mol_type = unassigned DNA; mol_type = unassigned DNA
tccctgccaaaatggtgtccagaactttgaggccagaggtgatccagtgatttgggagctgcaggtcacacaggctgctcagagggctgctgaacaggatgtcctcggacgacaggcacctgggctccagctgcggctccttcatcaagactgagccgtccagcccgtcctcgggcatcgatgccctcagccaccacagccccagtggctcgtccgacgccagcggcggctttggcctggccctgggcacccacgccaacggtctggactcgccacccatgtttgcaggcgccgggctgggaggcaccccatgccgcaagagctacgaggactgtgccagcggcatcatggaggactcggccatcaagtgcgagtacatgctcaacgccatccccaagcgcctgtgcctcgtgtgcggggacattgcctctggctaccactacggcgtggcctcctgcgaggcttgcaaggccttcttcaagaggactatccaagggaacattgagtacagctgcccggccaccaacgagtgcgagatcaccaaacggaggcgcaagtcctgccaggcctgccgcttcatgaaatgcctcaaagtggggatgctgaaggaaggtgtgcgccttgatcgagtgcgtggaggccgtcagaaatacaagcgacggctggactcagagagcagcccatacctgagcttacaaatttctccacctgctaaaaagccattgaccaagattgtctcatacctactggtggctgagccggacaagctctatgccatgcctccccctggtatgcctgagggggacatcaaggccctgaccactctctgtgacctggcagaccgagagcttgtggtcatcattggctgggccaagcacatcccaggcttctcaagcctctccctgggggaccagatgagcctgctgcagagtgcctggatggaaatcctcatcctgggcatcgtgtaccgctcgctgccctatgacgacaagctggtgtacgctgaggactacatcatggatgaggagcactcccgcctcgcggggctgctggagctctaccgggccatcctgcagctggtacgcaggtacaagaagctcaaggtggagaaggaggagtttgtgacgctcaaggccctggccctcgccaactccgattccatgtacatcgaggatctagaggctgtccagaagctgcaggacctgctgcacgaggcactgcaggactacgagctgagccagcgccatgaggagccctggaggacgggcaagctgctgctgacactgccgctgctgcggcagacggccgccaaggccgtgcagcacttctatagcgtcaaactgcagggcaaagtgcccatgcacaaactcttcctggagatgctggaggccaaggttggccaagagcagcttagaggatctcccaaggatgaaagaatgtcaagccatgatggaaaatgccccttccaatcagctgccttcacaagcagggatcagagcaactccccggggatccccaatccacgcccttctagtccaacccccctcaatgagagaggcaggcagatctcacccagcactaggacaccaggaggccagggaaagcatctctggctcaccatgtaacatctggcttggagcaagtgggtgttctgcacaccaggcagctgcacctcactggatctagtgttgctgcgagtgacctcacttcagagcccctctagcagagtggggcggaagtcctgatggttggtgtccatgaggtggaagctgcttttatacttaaaactcagatcacaacaggaaatgtgtcagtaacaatggaactccatccaatgggaaagttcctggtactgaaggggtccattggacactcagaaaagaagttcaggggccaacttcttagctggaatcctggccagatgaggaccctctccggggaagggagaggactgacttagtggaaggtggtgaagtgaggagagtttaggggaaccttcccccagtggaacagatctcaagtttaccctaaacctgccatttctggaaaatctgtaaagaggaaacagcctgtctcagctgtactctcatgatacaggtcatttgaaatgaaccaagaaataaaacatgaaaatccaaccatggagaaggtggtatggctgggttttgtttggtccccttgtccttatacgttctaaagtttccagactggctttgtcactttgtgaactcgtcatgtgtgaaaaccaatctttgcatatagggaacttcctcgggccacactttaagaaccaagtaagaggctctcaagactccagcagagtcgggaggccatggcagcgccttagaggagctggaacctgcacccacctgtgtcggtggggggggcctcctttccccatagactctgccctccctctgtgcagatggaagtggcaggggagggtgaccagcttgtgacaagaagactgaagggtccagagtccatgctcacggaacagcaccaaagaaaagcactatgtggaaagattgttttattttctaataatgataatatggctggaatggcttcttaagatgtatatattttttaaaatggcagttccccattgcagcatcacctacttgtatgtctttctgcctctgtatatgttctcccagaaacccccatgtaaatcaaatgccctaggatgcttccatcctggtcccatgtatctggaatctaataaataaggaaaggaactat

SEQ ID NO: 6757 - DNA, 1427 bp, Homo sapiens
  source 1..1427: mol_type = unassigned DNA; mol_type = unassigned DNA
tttaggccagaggtgatccagtgatttgggagctgcaggtcacacaggctgctcagagggctgctgaacaggatgtcctcggacgacaggcacctgggctccagctgcggctccttcatcaagactgagccgtccagcccgtcctcgggcatcgatgccctcagccaccacagccccagtggctcgtccgacgccagcggcggctttggcctggccctgggcacccacgccaacggtctggactcgccacccatgtttgcaggcgccgggctgggaggcaccccatgccgcaagagctacgaggactgtgccagcggcatcatggaggactcggccatcaagtgcgagtacatgctcaacgccatccccaagcgcctgtgcctcgtgtgcggggacattgcctctggctaccactacggcgtggcctcctgcgaggcttgcaaggccttcttcaagaggactatccaagggaacattgagtacagctgcccggccaccaacgagtgcgagatcaccaaacggaggcgcaagtcctgccaggcctgccgcttcatgaaatgcctcaaagtggggatgctgaaggaaggtgtgcgccttgatcgagtgcgtggaggccgtcagaaatacaagcgacggctggactcagagagcagcccatacctgagcttacaaatttctccacctgctaaaaagccattgaccaagattgtctcatacctactggtggctgagccggacaagctctatgccatgcctccccctggtatgcctgagggggacatcaaggccctgaccactctctgtgacctggcagaccgagagcttgtggtcatcattggctgggccaagcacatcccaggcttctcaagcctctccctgggggaccagatgagcctgctgcagagtgcctggatggaaatcctcatcctgggcatcgtgtaccgctcgctgccctatgacgacaagctggtgtacgctgaggactacatcatggatgaggagcactcccgcctcgcggggctgctggagctctaccgggccatcctgcagctggtacgcaggtacaagaagctcaaggtggagaaggaggagtttgtgacgctcaaggccctggccctcgccaactccgattccatgtacatcgaggatctagaggctgtccagaagctgcaggacctgctgcacgaggcactgcaggactacgagctgagccagcgccatgaggagccctggaggacgggcaagctgctgctgacactgccgctgctgcggcagacggccgccaaggccgtgcagcacttctatagcgtcaaactgcagggcaaagtgcccatgcacaaactcttcctggagatgctggaggccaaggtgtgatggccccgcacacggaccaatgcccacctacagacagacaaacggacagaccg

SEQ ID NO: 6758 - DNA, 443 bp, Homo sapiens
  source 1..443: mol_type = unassigned DNA; mol_type = unassigned DNA
gccatccccaagcgcctgtgcctcgtgtgcggggacattgcctctggctaccactacggcgtggcctcctgcgaggcttgcaaggccttcttcaagaggactatccaagggaacattgagtacagctgcccggccaccaacgagtgcgagatcaccaaacggaggcgcaagtcctgccaggcctgccgcttcatgaaatgcctcaaagtggggatgctgaaggaagagctgtgctgtctaatatggcaaccaccagccacacgtggctcccgagtgctggtccaaacagaggtgtgctgagtgtacaacacatgcctgctttagaggacttaataggaccataaaaggcagtgtaaagtctggtggtgatccttttaaaaatgtgattgcatgcagaaaggctaatcttctggacatgttaaataaaacatattgtgaaatta

SEQ ID NO: 6759 - DNA, 2190 bp, Homo sapiens
  source 1..2190: mol_type = unassigned DNA; mol_type = unassigned DNA
ggcaccgcgagcacgccagctctctggcaggacccctgcagtccccctggctgtgccaggtaaccaaccgtcttggtttgtccaggacgtttctttatcccaggaaactcctctaccccaggcacacggggacagtgggtcactctatttctgtggatggccgtgaaagttttcactaactcaaggggcagccctgaacacccatttgtgctcacaggttggccaagagcagcttagaggatctcccaaggatgaaagaatgtcaagccatgatggaaaatgccccttccaatcagctgccttcacaagcagggatcagagcaactccccggggatccccaatccacgcccttctagtccaacccccctcaatgagagaggcaggcagatctcacccagcactaggacaccaggaggccaggtaactttctgcagcttttccatagaagccctggtcccacctccttggctctaccccaggaacctcccggcctgggcttctgggctgggacgtgctgaggtcatcccagacaggagggagggctggctgaaatccacaaactgcagagcagctctctgatggtgtcccacacagaaaatgttaaggatttcaagagccctcccagaccagtgatgtgtccctccggctccccttgcctgtggggaatcgggtctgagtcacttgatgagtaggcactggagccgttacccaggatgctgcggccctagccctccatgcagcccatcttccctcatttgggtggaggcacacatttggggcaaaggccccttcttggcatcaaggaacaccagctacaaaccaagtctagcacagtgtttagaggctctgccctgaggttctgctccggagaaaccttcacagtagagaccttggggtgtgtgctttgggactccctcagtctctcactgtgctgtgtccttgcagcggggccgaggtagcaccctgctctgtcacttcctgctcaagctggaggacccaggcggcagggcatcatgcccagctggcatctgctgtctgtcttttctagggaaagcatctctggctcaccatgtaacatctggcttggagcaagtgggtgttctgcacaccaggcagctgcacctcactggatctagtgttgctgcgagtgacctcacttcagagcccctctagcagagtggggcggaagtcctgatggttggtgtccatgaggtggaagctgcttttatacttaaaactcagatcacaacaggaaatgtgtcagtaacaatggaactccatccaatgggaaagttcctggtactgaaggggtccattggacactcagaaaagaagttcaggggccaacttcttagctggaatcctggccagatgaggaccctctccggggaagggagaggactgacttagtggaaggtggtgaagtgaggagagtttaggggaaccttcccccagtggaacagatctcaagtttaccctaaacctgccatttctggaaaatctgtaaagaggaaacagcctgtctcagctgtactctcatgatacaggtcatttgaaatgaaccaagaaataaaacatgaaaatccaaccatggagaaggtggtatggctgggttttgtttggtccccttgtccttatacgttctaaagtttccagactggctttgtcactttgtgaactcgtcatgtgtgaaaaccaatctttgcatatagggaacttcctcgggccacactttaagaaccaagtaagaggctctcaagactccagcagagtcgggaggccatggcagcgccttagaggagctggaacctgcacccacctgtgtcggtggggggggcctcctttccccatagactctgccctccctctgtgcagatggaagtggcaggggagggtgaccagcttgtgacaagaagactgaagggtccagagtccatgctcacggaacagcaccaaagaaaagcactatgtggaaagattgttttattttctaataatgataatatggctggaatggcttcttaagatgtatatattttttaaaatggcagttccccattgcagcatcacctacttgtatgtctttctgcctctgtatatgttctcccagaaacccccatgtaaatcaaatgccctaggatgcttccatcctggtcccatgtatctggaatctaataaataaggaaagg

SEQ ID NO: 6760 - DNA, 2849 bp, Homo sapiens
  source 1..2849: mol_type = unassigned DNA; mol_type = unassigned DNA
ccctctccatgtttgagggccgaagagcctgcatcgagcagagccaccaggctaaatcctctgaccttgactttggtttagggaccagagtctggtatctaagtgcgatcttactctagctttcccatctgttctgtttaggccagaggtgatccagtgatttgggagctgcaggtcacacaggctgctcagagggctgctgaacaggatgtcctcggacgacaggcacctgggctccagctgcggctccttcatcaagactgagccgtccagcccgtcctcgggcatcgatgccctcagccaccacagccccagtggctcgtccgacgccagcggcggctttggcctggccctgggcacccacgccaacggtctggactcgccacccatgtttgcaggcgccgggctgggaggcaccccatgccgcaagagctacgaggactgtgccagcggcatcatggaggactcggccatcaagtgcgagtacatgctcaacgccatccccaagcgcctgtgcctcgtgtgcggggacattgcctctggctaccactacggcgtggcctcctgcgaggcttgcaaggccttcttcaagaggactatccaagggaacattgagtacagctgcccggccaccaacgagtgcgagatcaccaaacggaggcgcaagtcctgccaggcctgccgcttcatgaaatgcctcaaagtggggatgctgaaggaaggtgtgcgccttgatcgagtgcgtggaggccgtcagaaatacaagcgacggctggactcagagagcagcccatacctgagcttacaaatttctccacctgctaaaaagccattgaccaagattgtctcatacctactggtggctgagccggacaagctctatgccatgcctccccctggtatgcctgagggggacatcaaggccctgaccactctctgtgacctggcagaccgagagcttgtggtcatcattggctgggccaagcacatcccaggcttctcaagcctctccctgggggaccagatgagcctgctgcagagtgcctggatggaaatcctcatcctgggcatcgtgtaccgctcgctgccctatgacgacaagctggtgtacgctgaggactacatcatggatgaggagcactcccgcctcgcggggctgctggagctctaccgggccatcctgcagctggtacgcaggtacaagaagctcaaggtggagaaggaggagtttgtgacgctcaaggccctggccctcgccaactccgattccatgtacatcgaggatctagaggctgtccagaagctgcaggacctgctgcacgaggcactgcaggactacgagctgagccagcgccatgaggagccctggaggacgggcaagctgctgctgacactgccgctgctgcggcagacggccgccaaggccgtgcagcacttctatagcgtcaaactgcagggcaaagtgcccatgcacaaactcttcctggagatgctggaggccaaggttggccaagagcagcttagaggatctcccaaggatgaaagaatgtcaagccatgatggaaaatgccccttccaatcagctgccttcacaagcagggatcagagcaactccccggggatccccaatccacgcccttctagtccaacccccctcaatgagagaggcaggcagatctcacccagcactaggacaccaggaggccagggaaagcatctctggctcaccatgtaacatctggcttggagcaagtgggtgttctgcacaccaggcagctgcacctcactggatctagtgttgctgcgagtgacctcacttcagagcccctctagcagagtggggcggaagtcctgatggttggtgtccatgaggtggaagctgcttttatacttaaaactcagatcacaacaggaaatgtgtcagtaacaatggaactccatccaatgggaaagttcctggtactgaaggggtccattggacactcagaaaagaagttcaggggccaacttcttagctggaatcctggccagatgaggaccctctccggggaagggagaggactgacttagtggaaggtggtgaagtgaggagagtttaggggaaccttcccccagtggaacagatctcaagtttaccctaaacctgccatttctggaaaatctgtaaagaggaaacagcctgtctcagctgtactctcatgatacaggtcatttgaaatgaaccaagaaataaaacatgaaaatccaaccatggagaaggtggtatggctgggttttgtttggtccccttgtccttatacgttctaaagtttccagactggctttgtcactttgtgaactcgtcatgtgtgaaaaccaatctttgcatatagggaacttcctcgggccacactttaagaaccaagtaagaggctctcaagactccagcagagtcgggaggccatggcagcgccttagaggagctggaacctgcacccacctgtgtcggtggggggggcctcctttccccatagactctgccctccctctgtgcagatggaagtggcaggggagggtgaccagcttgtgacaagaagactgaagggtccagagtccatgctcacggaacagcaccaaagaaaagcactatgtggaaagattgttttattttctaataatgataatatggctggaatggcttcttaagatgtatatattttttaaaatggcagttccccattgcagcatcacctacttgtatgtctttctgcctctgtatatgttctcccagaaacccccatgtaaatcaaatgccctaggatgcttccatcctggtcccatgtatctggaatctaataaataaggaaagg

SEQ ID NO: 6761 - DNA, 479 bp, Homo sapiens
  source 1..479: mol_type = unassigned DNA; mol_type = unassigned DNA
gctagcgggagcgcgagccagcaagaggcgcctgcgcgatgtccgggcccctgagcccgcggcgctgagccagccgggacggacatgcgcgggagggcgccgcggggcagccgccgctcctccgggggaatgaaagctactggttgattttaaagtgcctgggcctcacaggtttggagatgtcccagaataaggcacaatgtcaatagcaggagttgctgctcaggagatcagagtcccattaaaaactggatttctacataatggccgagccatggggaatatgaggaagacctactggagcagtcgcagtgagtttaaaaatacaggcagaaaactacctggcactgtgggagactgagtataggagaaagcaggatgacgatgggcctgaatggtggtgtgttttcctccacacaatgtggctttgtcctccaaggtgtctcacgtgatggaagctggctgatctgacttgcttg

SEQ ID NO: 6762 - DNA, 3104 bp, Homo sapiens
  source 1..3104: mol_type = unassigned DNA; mol_type = unassigned DNA
acggcggtccggtgcgaggcagagtgctagcgggagcgcgagccagcaagaggcgcctgcgcgatgtccgggcccctgagcccgcggcgctgagccagccgggacggacatgcgcgggagggcgccgcggggcagccgccgctcctccgggggaatgaaagctactggttgattttaaagtgcctgggcctcacaggtttggagatgtcccagaataaggcacaatgtcaatagcaggagttgctgctcaggagatcagagtcccattaaaaactggatttctacataatggccgagccatggggaatatgaggaagacctactggagcagtcgcagtgagtttaaaaacaactttttaaatattgacccgataaccatggcctacagtctgaactcttctgctcaggagcgcctaataccacttgggcatgcttccaaatctgctccgatgaatggccactgctttgcagaaaatggtccatctcaaaagtccagcttgccccctcttcttattcccccaagtgaaaacttgggaccacatgaagaggatcaagttgtatgtggttttaagaaactcacagtgaatggggtttgtgcttccacccctccactgacacccataaaaaactccccttcccttttcccctgtgcccctctttgtgaacggggttctaggcctcttccaccgttgccaatctctgaagccctctctctggatgacacagactgtgaggtggaattcctaactagctcagatacagacttccttttagaagactctacactttctgatttcaaatatgatgttcctggcaggcgaagcttccgtgggtgtggacaaatcaactatgcatattttgataccccagctgtttctgcagcagatctcagctatgtgtctgaccaaaatggaggtgtcccagatccaaatcctcctccacctcagacccaccgaagattaagaaggtctcattcgggaccagctggctcctttaacaagccagccataaggatatccaactgttgtatacacagagcttctcctaactccgatgaagacaaacctgaggttccccccagagttcccatacctcctagaccagtaaagccagattatagaagatggtcagcagaagttacttcgagcacctatagtgatgaagacaggcctcccaaagtaccgccaagagaacctttgtcaccgagtaactcgcgcacaccgagtcccaaaagccttccgtcttacctcaatggggtcatgcccccgacacagagctttgcccctgatcccaagtatgtcagcagcaaagcactgcaaagacagaacagcgaaggatctgccagtaaggttccttgcattctgcccattattgaaaatgggaagaaggttagttcaacacattattacctactacctgaacgaccaccatacctggacaaatatgaaaaattttttagggaagcagaagaaacaaatggaggcgcccaaatccagccattacctgctgactgcggtatatcttcagccacagaaaagccagactcaaaaacaaaaatggatctgggtggccacgtgaagcgtaaacatttatcctatgtggtttctccttagaccttggggtcatggttcagcagaggttacataggagcaaatggttctcaattttccagtttgattgaagtgcagagaaaaatcccttagattgcaaaataaaatagttgaactctctgtcttcatgtggaaggtttagagcagttgtgagatgctgttatgctgagaaaccctgactttgttagtgttggaaaaaagtcttacaagtctataatttaaagatgtgatggtggggaggggaggatggggaagctttttatatatgcatacattacatacctatatataaacttgtggtataaccatagaccatagctgcaggttaaccaattagttactatcgtagagtaatatatattcagaataataaactcaagctggagaaatgagtcctgatagactgaaaattgagcaaatggaagaagatacagtattgtttagatcagaatcattaaaaaatatttttgtttagtaagtttgaagatttctggcttttaggccttttctattttgttccatttatttttgcaggcaatcttttccatggagggcagggtatccattctttaccatgggtgtacctgcttaggttaaaaatcataccaaggcctcatacttccaggtttcatgttgcgtcttgttgagggagggagagcaggttacttggcaaccatattgtcacctgtacctgtcacacatcttgaaaaataaaacgataatagaactagtgactaattttcccttacagttcctgcttggtcccacccactgaagtagctcatcgtagtgcgggccgtattagaggcagtggggtacgttagactcagatggaaaagtattctaggtgccagtgttaggatgtcagttttacaaaataatgaagcaattagctatgtgattgagagttattgtttggggatgtgtgttgtggttttgctttttttttttagactgtattaataaacatacaacacaagctggccttgtgttgctggttcctattcagtatttcctggggattgtttgctttttaagtaaaacacttctgacccatagctcagtatgtctgaattccagaggtcacatcagcatctttctgctttgaaaactctcacagctgtggctgcttcacttagatgcagtgagacacatagttggtgttccgattttcacatccttccatgtatttatcttgaagagataagcacagaagagaaggtgctcactaacagaggtacattactgcaatgttctcttaacagttaaacaagctgtttacagtttaaactgctgaatattatttgagctatttaaagcttattatattttagtatgaactaaatgaaggttaaaacatgcttaagaaaaatgcactgatttctgcattatgtgtacagtattggacaaaggattttattcattttgttgcattattttgaatattgtcttttcattttaataaagttataatacttatttatgataccatta

SEQ ID NO: 6763 - DNA, 2097 bp, Homo sapiens
  source 1..2097: mol_type = unassigned DNA; mol_type = unassigned DNA
cagaataaggcacaatgtcaatagcaggagttgctgctcaggagatcagagtcccattaaaaactggatttctacataatggccgagccatggggaatatgaggaagacctactggagcagtcgcagtgagtttaaaaacaactttttaaatattgacccgataaccatggcctacagtctgaactcttctgctcaggagcgcctaataccacttggtatgtattctgaaaatctgatcacagtaagcatttgagaagaacagtctggattcgggttagcttgtcctccagcattattttttaaatgaggaaacctgaactatttccaacaacagcctgacccctagtggcaacagattcagaagataactgtgtttttctcaagctattgtactcgactgccttcattctgagtcactgattgctaagtaggactgttcatggacgtgggatcttctaaaatcaagaattagttctcattccagctctgatgcatactttacttcatgaaaccttaggcgagatttcccacctttcttactagtatcgaatgcatgtttgacagtaatagatgaaaatagtataaatgttcctcaaaacttaaaaaatagtatttttaatgtgaatattctgttccttggatctttgtcaagagctgtgtgtgaactgaacacattgcaggcaagtccattcactcacaatattatgatgtgccagcaataaggactttgtcttatctcattggtaccctacgtgcctagtatggtcgcatgtcttaaatggcaaggctggtacagtatggtattcatgtaaattatatgctattcatcttccgcgaattttacacacgtcacaaaacttgcctgtgatgtgtgggtgtgcgctgtgcacatgtccaagggagatagaggagatagtttgttctttgaaccacaccatgtgcgttaagaatcttctgctctctaattacacctgtggtggttgcatgggtgttctcggggtgacagcagtcaagtgtttcactcaggaagaaagctgtggaagcataggtagctggggtgctctctccctcacacaggtggagagaggattgttgatcttttattaatatctctcgttcattccagggcatgcttccaaatctgctccgatgaatggccactgctttgcagaaaatggtccatctcaaaagtccagcttgccccctcttcttattcccccaagtgaaaacttgggaccacatgaagaggatcaagttgtatgtggttttaagaaactcacagtgaatggggtttgtgcttccacccctccactgacacccataaaaaactccccttcccttttcccctgtgcccctctttgtgaacggggttctaggcctcttccaccgttgccaatctctgaagccctctctctggatgacacagactgtgaggtggaattcctaactagctcagatacagacttccttttagaagactctacactttctgatttcaaatatgatgttcctggcaggcgaagcttccgtgggtgtggacaaatcaactatgcatattttgataccccagctgtttctgcagcagatctcagctatgtgtctgaccaaaatggaggtgtcccagatccaaatcctcctccacctcagacccaccgaagattaagaaggtctcattcgggaccagctggctcctttaacaagccagccataaggatatccaactgttgtatacacagagcttctcctaactccgatgaagacaaacctgaggttccccccagagttcccatacctcctagaccagtaaagccagattatagaagatggtcagcagaagttacttcgagcacctatagtgatgaagacaggcctcccaaagtaccgccaagagaacctttgtcaccgagtaactcgcgcacaccgagtcccaaaagccttccgtcttacctcaatggggtcatgcccccgacacagagctttgcccctgatcccaagtatgtcagcagcaaagcactgcaaagacagaacagcgaaggatctgccagtaaggttccttgcattctgcccattattgaaaatgggaagaaggttagttc

SEQ ID NO: 6764 - DNA, 995 bp, Homo sapiens
  source 1..995: mol_type = unassigned DNA; mol_type = unassigned DNA
tgcgaggcagagtgctagcgggagcgcgagccagcaagaggcgcctgcgcgatgtccgggcccctgagcccgcggcgctgagccagccgggacggacatgcgcgggagggcgccgcggggcagccgccgctcctccgggggaatgaaagctactggttgattttaaagtgcctgggcctcacaggtttggagatgtcccagaataaggcacaatgtcaatagcaggagttgctgctcaggagatcagagtcccattaaaaactggatttctacataatggccgagccatggggaatatgaggaagacctactggagcagtcgcagtgagtttaaaaaggcatgcttccaaatctgctccgatgaatggccactgctttgcagaaaatggtccatctcaaaagtccagcttgccccctcttcttattcccccaagtgaaaacttgggaccacatgaagaggatcaagttgtatgtggttttaagaaactcacagtgaatggggtttgtgcttccacccctccactgacacccataaaaaactccccttcccttttcccctgtgcccctctttgtgaacggggttctaggcctcttccaccgttgccaatctctgaagccctctctctggatgacacagactgtgaggtggaattcctaactagctcagatacagacttccttttagaagactctacactttctgatttcaaatatgatgttcctggcaggcgaagcttccgtgggtgtggacaaatcaactatgcatattttgataccccagctgtttctgcagcagatctcagctatgtgtctgaccaaaatggaggtgtcccagatccaaatcctcctccacctcagacccaccgaagattaagaaggtctcattcgggaccagctggctcctttaacaagccagccataaggatatccaactgttgtatacacagagcttctcctaactccgatgaagacaaacctgaggttccccccagagt

SEQ ID NO: 6765 - DNA, 787 bp, Homo sapiens
  source 1..787: mol_type = unassigned DNA; mol_type = unassigned DNA
tgcgaggcagagtgctagcgggagcgcgagccagcaagaggcgcctgcgcgatgtccgggcccctgagcccgcggcgctgagccagccgggacggacatgcgcgggagggcgccgcggggcagccgccgctcctccgggggaatgaaagctactggttgattttaaagtgcctgggcctcacaggtttggagatgtcccagaataaggcacaatgtcaatagcaggagttgctgctcaggagatcagagtcccattaaaaactggatttctacataatggccgagccatggggaatatgaggaagacctactggagcagtcgcagtgagtttaaaaacttcctctcctttcagcaactttttaaatattgacccgataaccatggcctacagtctgaactcttctgctcaggagcgcctaataccacttgggcatgcttccaaatctgctccgatgaatggccactgctttgcagaaaatggtccatctcaaaagtccagcttgccccctcttcttattcccccaagtgaaaacttgggaccacatgaagaggatcaagttgtatgtggttttaagaaactcacagtgaatggggtttgtgcttccacccctccactgacacccataaaaaactccccttcccttttcccctgtgcccctctttgtgaacggggttctaggcctcttccaccgttgccaatctctgaagccctctctctggatgacacagactgtgaggtggaattcctaactagctcagatacagacttccttttagaagactcta

SEQ ID NO: 6766 - DNA, 5314 bp, Homo sapiens
  source 1..5314: mol_type = unassigned DNA; mol_type = unassigned DNA
ggagggcgagggcgggctcctctggaggcggcgggctccaggccgggctccctaaacgggtcagcaattggagcgggaaggccggacagagacagggtcttgctttgtcacccaggctggagtgcagtgccacaatcagagcttactcctgccttgaactcctgggcttcagggatcctgctgcctcggccctccaagcagctgagactacagagctgacaatttactggttcatcaatgaaacaatattaaattatgaagatgtaaggaaaaaatcctacgctaacactgtcgcagtttgaaaggcttctctgcagaatgtcaaacaaagatcgacacattgattccagctgttcgtccttcatcaagacggaaccttccagcccagcctccctgacggacagcgtcaaccaccacagccctggtggctcttcagacgccagtgggagctacagttcaaccatgaatggccatcagaacggacttgactcgccacctctctacccttctgctcctatcctgggaggtagtgggcctgtcaggaaactgtatgatgactgctccagcaccattgttgaagatccccagaccaagtgtgaatacatgctcaactcgatgcccaagagactgtgtttagtgtgtggtgacatcgcttctgggtaccactatggggtagcatcatgtgaagcctgcaaggcattcttcaagaggacaattcaaggcaatatagaatacagctgccctgccacgaatgaatgtgaaatcacaaagcgcagacgtaaatcctgccaggcttgccgcttcatgaagtgtttaaaagtgggcatgctgaaagaaggggtgcgtcttgacagagtacgtggaggtcggcagaagtacaagcgcaggatagatgcggagaacagcccatacctgaaccctcagctggttcagccagccaaaaagccatataacaagattgtctcacatttgttggtggctgaaccggagaagatctatgccatgcctgaccctactgtccccgacagtgacatcaaagccctcactacactgtgtgacttggccgaccgagagttggtggttatcattggatgggcgaagcatattccaggcttctccacgctgtccctggcggaccagatgagccttctgcagagtgcttggatggaaattttgatccttggtgtcgtataccggtctctttcgtttgaggatgaacttgtctatgcagacgattatataatggacgaagaccagtccaaattagcaggccttcttgatctaaataatgctatcctgcagctggtaaagaaatacaagagcatgaagctggaaaaagaagaatttgtcaccctcaaagctatagctcttgctaattcagactccatgcacatagaagatgttgaagccgttcagaagcttcaggatgtcttacatgaagcgctgcaggattatgaagctggccagcacatggaagaccctcgtcgagctggcaagatgctgatgacactgccactcctgaggcagacctctaccaaggccgtgcagcatttctacaacatcaaactagaaggcaaagtcccaatgcacaaactttttttggaaatgttggaggccaaggtctgactaaaagctccctgggccttcccatccttcatgttgaaaaagggaaaataaacccaagagtgatgtcgaagaaacttagagtttagttaacaacatcaaaaatcaacagactgcactgataatttagcagcaagactatgaagcagctttcagattcctccataggttcctgatgagtttctttctactttctccatcatcttctttcctctttcttcccacatttctctttctctttattttttctccttttcttctttcacctcccttatttctttgcttctttcattcctagttcccattctcctttattttcttcccgtctgcctgccttctttcttttctttacctactctcattcctctcttttctcatccttccccttttttctaaatttgaaatagctttagtttaaaaaaaaatcctcccttccccctttcctttccctttctttcctttttccctttccttttccctttcctttcctttcctcttgaccttctttccatctttctttttcttccttctgctgctgaacttttaaaagaggtctctaactgaagagagatggaagccagccctgccaaaggatggagatccataatatggatgccagtgaacttattgtgaaccatactgtccccaatgactaaggaatcaaagagagagaaccaacgttcctaaaagtacagtgcaacatatacaaattgactgagtgcagtattagatttcatgggagcagcctctaattagacaacttaagcaacgttgcatcggctgcttcttatcattgcttttccatctagatcagttacagccatttgattccttaattgttttttcaagtcttccaggtatttgttagtttagctactatgtaactttttcagggaatagtttaagctttattcattcatgcaatactaaagagaaataagaatactgcaattttgtgctggctttgaacaattacgaacaataatgaaggacaaatgaatcctgaaggaagatttttaaaaatgttttgtttcttcttacaaatggagatttttttgtaccagctttaccacttttcagccatttattaatatgggaatttaacttactcaagcaatagttgaagggaaggtgcatattatcacggatgcaatttatgttgtgtgccagtctggtcccaaacatcaatttcttaacatgagctccagtttacctaaatgttcactgacacaaaggatgagattacacctacagtgactctgagtagtcacatatataagcactgcacatgagatatagatccgtagaattgtcaggagtgcacctctctacttgggaggtacaattgccatatgatttctagctgccatggtggttaggaatgtgatactgcctgtttgcaaagtcacagaccttgcctcagaaggagctgtgagccagtattcatttaagaggcaataaggcaaatgccagaattaaaaaaaaaaatcatcaaagacagaaaatgcctgaccaaattctaaaacctaatccatataagtttattcatttaggaatgttcgtttaaattaatctgcagtttttaccaagagctaagccaatatatgtgcttttcaaccagtattgtcacagcatgaaagtcaagtcaggttccagactgttaagaggtgtaatctaatgaagaaatcaattagatgccccgaaatctacagtcgctgaataaccaataaacagtaacctccatcaaatgctataccaatggaccagtgttagtagctgctccctgtattatgtgaacagtcttattctatgtacacagatgtaattaaaattgtaatcctaacaaacaaaagaaatgtagttcagcttttcaatgtttcatgtttgctgtgcttttctgaattttatgttgcattcaaagactgttgtcttgttcttgtggtgtttggattcttgtggtgtgtgcttttagacacagggtagaattagagacaatattggatgtacaattcctcaggagactacagtagtatattctattccttaccagtaataaggttcttcctaataataattaagagattgaaactccaaacaagtattcattatgaacagatacacatcaaaatcataataatattttcaaaacaaggaataatttctctaatggtttattatagaataccaatgtatagcttagaaataaaactttgaatatttcaagaatatagataagtctaatttttaaatgctgtatatatggctttcactcaatcatctctcagatgttgttattaactcgctctgtgttgttgcaaaactttttggtgcagattcgtttccaaaactattgctactttgtgtgctttaaacaaaataccttgggttgatgaaacatcaacccagtgctaggaatactgtgtatctatcattagctatatgggactatattgtagattgtggtttctcagtagagaagtgactgtagtgtgattctagataaatcatcattagcaattcattcagatggtcaataacttgaaatttatagctgtgataggagttcagaaattggcacatccctttaaaaataacaacagaaaatacaactcctgggaaaaaaggtgctgattctataagattatttatatatgtaagtgtttaaaaagattattttccagaaagtttgtgcagggtttaagttgctactattcaactacactatatataaataaaatatatacaatatatacattgttttcactgtatcacattaaagtacttgggcttcagaagtaagagccaaccaactgaaaacctgagatggagatatgttcaaagaatgagatacaattttttagttttcagtttaagtaactctcagcattacaaaagagtaagtatctcacaaataggaaataaaactaaaacgtggatttaaaaagaactgcacgggctttagggtaaatgctcatcttaaacctcactagagggaagtcttctcaagtttcaagcaagaccatttacttaatgtgaagttttggaaagttataaaggtgtatgttttagccatatgattttaattttaattttgcttcttttaggttcgttcttatttaaagcaatatgattgtgtgactccttgtagttacacttgtgtttcaatcagatcagattgttgtatttattccactattttgcatttaaatgataacataaaagatataaaaaatttaaaactgctatttttcttatagaagagaaaatgggtgttggtgattgtattttaattatttaagcgtctctgtttacctgcctaggaaaacattttatggcagtcttatgtgcaaagatcgtaaaaggacaaaaaatttaaactgcttataataatccaggagttgcattatagccagtagtaaaaataataataataataataaaaccatgtctatagctgtagatgggcttcacatctgtaaagcaatcaattgtatatttttgtgatgtgtaccatactgtgtgctccagcaaatgtccatttgtgtaaatgtatttattttatattgtatatattgttaaatgcaaaaaggagatatgattctgtaactccaatcagttcagatgtgtaactcaaattattatgcctttcaggatgatggtagagcaatattaaacaagcttccacttttga

SEQ ID NO: 6767 - DNA, 5365 bp, Homo sapiens
  source 1..5365: mol_type = unassigned DNA; mol_type = unassigned DNA
aagtccttgattaggagagtgtgagagctttggtcccaactggctgtgcctataggcttgtcactaggagaacatttgtgttaattgcactgtgctctgtcaaggaaactttgatttatagctggggtgcacaaataatggttgccggtcgcacatggattcggtagaactttgccttcctgaatctttttccctgcactacgaggaagaaactgatgtaaagttcccatcatgaatgtaattaggaattgtgcatttagatcctgaatgtggcgagaatgtgattggggtcttggagcagtcaagtctgatctggcctgtgttccttcagctaaaaggcttctctgcagaatgtcaaacaaagatcgacacattgattccagctgttcgtccttcatcaagacggaaccttccagcccagcctccctgacggacagcgtcaaccaccacagccctggtggctcttcagacgccagtgggagctacagttcaaccatgaatggccatcagaacggacttgactcgccacctctctacccttctgctcctatcctgggaggtagtgggcctgtcaggaaactgtatgatgactgctccagcaccattgttgaagatccccagaccaagtgtgaatacatgctcaactcgatgcccaagagactgtgtttagtgtgtggtgacatcgcttctgggtaccactatggggtagcatcatgtgaagcctgcaaggcattcttcaagaggacaattcaaggcaatatagaatacagctgccctgccacgaatgaatgtgaaatcacaaagcgcagacgtaaatcctgccaggcttgccgcttcatgaagtgtttaaaagtgggcatgctgaaagaaggggtgcgtcttgacagagtacgtggaggtcggcagaagtacaagcgcaggatagatgcggagaacagcccatacctgaaccctcagctggttcagccagccaaaaagccattgctctggtctgatcctgcagataacaagattgtctcacatttgttggtggctgaaccggagaagatctatgccatgcctgaccctactgtccccgacagtgacatcaaagccctcactacactgtgtgacttggccgaccgagagttggtggttatcattggatgggcgaagcatattccaggcttctccacgctgtccctggcggaccagatgagccttctgcagagtgcttggatggaaattttgatccttggtgtcgtataccggtctctttcgtttgaggatgaacttgtctatgcagacgattatataatggacgaagaccagtccaaattagcaggccttcttgatctaaataatgctatcctgcagctggtaaagaaatacaagagcatgaagctggaaaaagaagaatttgtcaccctcaaagctatagctcttgctaattcagactccatgcacatagaagatgttgaagccgttcagaagcttcaggatgtcttacatgaagcgctgcaggattatgaagctggccagcacatggaagaccctcgtcgagctggcaagatgctgatgacactgccactcctgaggcagacctctaccaaggccgtgcagcatttctacaacatcaaactagaaggcaaagtcccaatgcacaaactttttttggaaatgttggaggccaaggtctgactaaaagctccctgggccttcccatccttcatgttgaaaaagggaaaataaacccaagagtgatgtcgaagaaacttagagtttagttaacaacatcaaaaatcaacagactgcactgataatttagcagcaagactatgaagcagctttcagattcctccataggttcctgatgagtttctttctactttctccatcatcttctttcctctttcttcccacatttctctttctctttattttttctccttttcttctttcacctcccttatttctttgcttctttcattcctagttcccattctcctttattttcttcccgtctgcctgccttctttcttttctttacctactctcattcctctcttttctcatccttccccttttttctaaatttgaaatagctttagtttaaaaaaaaatcctcccttccccctttcctttccctttctttcctttttccctttccttttccctttcctttcctttcctcttgaccttctttccatctttctttttcttccttctgctgctgaacttttaaaagaggtctctaactgaagagagatggaagccagccctgccaaaggatggagatccataatatggatgccagtgaacttattgtgaaccatactgtccccaatgactaaggaatcaaagagagagaaccaacgttcctaaaagtacagtgcaacatatacaaattgactgagtgcagtattagatttcatgggagcagcctctaattagacaacttaagcaacgttgcatcggctgcttcttatcattgcttttccatctagatcagttacagccatttgattccttaattgttttttcaagtcttccaggtatttgttagtttagctactatgtaactttttcagggaatagtttaagctttattcattcatgcaatactaaagagaaataagaatactgcaattttgtgctggctttgaacaattacgaacaataatgaaggacaaatgaatcctgaaggaagatttttaaaaatgttttgtttcttcttacaaatggagatttttttgtaccagctttaccacttttcagccatttattaatatgggaatttaacttactcaagcaatagttgaagggaaggtgcatattatcacggatgcaatttatgttgtgtgccagtctggtcccaaacatcaatttcttaacatgagctccagtttacctaaatgttcactgacacaaaggatgagattacacctacagtgactctgagtagtcacatatataagcactgcacatgagatatagatccgtagaattgtcaggagtgcacctctctacttgggaggtacaattgccatatgatttctagctgccatggtggttaggaatgtgatactgcctgtttgcaaagtcacagaccttgcctcagaaggagctgtgagccagtattcatttaagaggcaataaggcaaatgccagaattaaaaaaaaaaatcatcaaagacagaaaatgcctgaccaaattctaaaacctaatccatataagtttattcatttaggaatgttcgtttaaattaatctgcagtttttaccaagagctaagccaatatatgtgcttttcaaccagtattgtcacagcatgaaagtcaagtcaggttccagactgttaagaggtgtaatctaatgaagaaatcaattagatgccccgaaatctacagtcgctgaataaccaataaacagtaacctccatcaaatgctataccaatggaccagtgttagtagctgctccctgtattatgtgaacagtcttattctatgtacacagatgtaattaaaattgtaatcctaacaaacaaaagaaatgtagttcagcttttcaatgtttcatgtttgctgtgcttttctgaattttatgttgcattcaaagactgttgtcttgttcttgtggtgtttggattcttgtggtgtgtgcttttagacacagggtagaattagagacaatattggatgtacaattcctcaggagactacagtagtatattctattccttaccagtaataaggttcttcctaataataattaagagattgaaactccaaacaagtattcattatgaacagatacacatcaaaatcataataatattttcaaaacaaggaataatttctctaatggtttattatagaataccaatgtatagcttagaaataaaactttgaatatttcaagaatatagataagtctaatttttaaatgctgtatatatggctttcactcaatcatctctcagatgttgttattaactcgctctgtgttgttgcaaaactttttggtgcagattcgtttccaaaactattgctactttgtgtgctttaaacaaaataccttgggttgatgaaacatcaacccagtgctaggaatactgtgtatctatcattagctatatgggactatattgtagattgtggtttctcagtagagaagtgactgtagtgtgattctagataaatcatcattagcaattcattcagatggtcaataacttgaaatttatagctgtgataggagttcagaaattggcacatccctttaaaaataacaacagaaaatacaactcctgggaaaaaaggtgctgattctataagattatttatatatgtaagtgtttaaaaagattattttccagaaagtttgtgcagggtttaagttgctactattcaactacactatatataaataaaatatatacaatatatacattgttttcactgtatcacattaaagtacttgggcttcagaagtaagagccaaccaactgaaaacctgagatggagatatgttcaaagaatgagatacaattttttagttttcagtttaagtaactctcagcattacaaaagagtaagtatctcacaaataggaaataaaactaaaacgtggatttaaaaagaactgcacgggctttagggtaaatgctcatcttaaacctcactagagggaagtcttctcaagtttcaagcaagaccatttacttaatgtgaagttttggaaagttataaaggtgtatgttttagccatatgattttaattttaattttgcttcttttaggttcgttcttatttaaagcaatatgattgtgtgactccttgtagttacacttgtgtttcaatcagatcagattgttgtatttattccactattttgcatttaaatgataacataaaagatataaaaaatttaaaactgctatttttcttatagaagagaaaatgggtgttggtgattgtattttaattatttaagcgtctctgtttacctgcctaggaaaacattttatggcagtcttatgtgcaaagatcgtaaaaggacaaaaaatttaaactgcttataataatccaggagttgcattatagccagtagtaaaaataataataataataataaaaccatgtctatagctgtagatgggcttcacatctgtaaagcaatcaattgtatatttttgtgatgtgtaccatactgtgtgctccagcaaatgtccatttgtgtaaatgtatttattttatattgtatatattgttaaatgcaaaaaggagatatgattctgtaactccaatcagttcagatgtgtaactcaaattattatgcctttcaggatgatggtagagcaatattaaacaagcttccacttt

SEQ ID NO: 6768 - DNA, 5216 bp, Homo sapiens
  source 1..5216: mol_type = unassigned DNA; mol_type = unassigned DNA
aagtccttgattaggagagtgtgagagctttggtcccaactggctgtgcctataggcttgtcactaggagaacatttgtgttaattgcactgtgctctgtcaaggaaactttgatttatagctggggtgcacaaataatggttgccggtcgcacatggattcggtagaactttgccttcctgaatctttttccctgcactacgaggaagagcttctctgcagaatgtcaaacaaagatcgacacattgattccagctgttcgtccttcatcaagacggaaccttccagcccagcctccctgacggacagcgtcaaccaccacagccctggtggctcttcagacgccagtgggagctacagttcaaccatgaatggccatcagaacggacttgactcgccacctctctacccttctgctcctatcctgggaggtagtgggcctgtcaggaaactgtatgatgactgctccagcaccattgttgaagatccccagaccaagtgtgaatacatgctcaactcgatgcccaagagactgtgtttagtgtgtggtgacatcgcttctgggtaccactatggggtagcatcatgtgaagcctgcaaggcattcttcaagaggacaattcaaggcaatatagaatacagctgccctgccacgaatgaatgtgaaatcacaaagcgcagacgtaaatcctgccaggcttgccgcttcatgaagtgtttaaaagtgggcatgctgaaagaaggggtgcgtcttgacagagtacgtggaggtcggcagaagtacaagcgcaggatagatgcggagaacagcccatacctgaaccctcagctggttcagccagccaaaaagccatataacaagattgtctcacatttgttggtggctgaaccggagaagatctatgccatgcctgaccctactgtccccgacagtgacatcaaagccctcactacactgtgtgacttggccgaccgagagttggtggttatcattggatgggcgaagcatattccaggcttctccacgctgtccctggcggaccagatgagccttctgcagagtgcttggatggaaattttgatccttggtgtcgtataccggtctctttcgtttgaggatgaacttgtctatgcagacgattatataatggacgaagaccagtccaaattagcaggccttcttgatctaaataatgctatcctgcagctggtaaagaaatacaagagcatgaagctggaaaaagaagaatttgtcaccctcaaagctatagctcttgctaattcagactccatgcacatagaagatgttgaagccgttcagaagcttcaggatgtcttacatgaagcgctgcaggattatgaagctggccagcacatggaagaccctcgtcgagctggcaagatgctgatgacactgccactcctgaggcagacctctaccaaggccgtgcagcatttctacaacatcaaactagaaggcaaagtcccaatgcacaaactttttttggaaatgttggaggccaaggtctgactaaaagctccctgggccttcccatccttcatgttgaaaaagggaaaataaacccaagagtgatgtcgaagaaacttagagtttagttaacaacatcaaaaatcaacagactgcactgataatttagcagcaagactatgaagcagctttcagattcctccataggttcctgatgagtttctttctactttctccatcatcttctttcctctttcttcccacatttctctttctctttattttttctccttttcttctttcacctcccttatttctttgcttctttcattcctagttcccattctcctttattttcttcccgtctgcctgccttctttcttttctttacctactctcattcctctcttttctcatccttccccttttttctaaatttgaaatagctttagtttaaaaaaaaatcctcccttccccctttcctttccctttctttcctttttccctttccttttccctttcctttcctttcctcttgaccttctttccatctttctttttcttccttctgctgctgaacttttaaaagaggtctctaactgaagagagatggaagccagccctgccaaaggatggagatccataatatggatgccagtgaacttattgtgaaccatactgtccccaatgactaaggaatcaaagagagagaaccaacgttcctaaaagtacagtgcaacatatacaaattgactgagtgcagtattagatttcatgggagcagcctctaattagacaacttaagcaacgttgcatcggctgcttcttatcattgcttttccatctagatcagttacagccatttgattccttaattgttttttcaagtcttccaggtatttgttagtttagctactatgtaactttttcagggaatagtttaagctttattcattcatgcaatactaaagagaaataagaatactgcaattttgtgctggctttgaacaattacgaacaataatgaaggacaaatgaatcctgaaggaagatttttaaaaatgttttgtttcttcttacaaatggagatttttttgtaccagctttaccacttttcagccatttattaatatgggaatttaacttactcaagcaatagttgaagggaaggtgcatattatcacggatgcaatttatgttgtgtgccagtctggtcccaaacatcaatttcttaacatgagctccagtttacctaaatgttcactgacacaaaggatgagattacacctacagtgactctgagtagtcacatatataagcactgcacatgagatatagatccgtagaattgtcaggagtgcacctctctacttgggaggtacaattgccatatgatttctagctgccatggtggttaggaatgtgatactgcctgtttgcaaagtcacagaccttgcctcagaaggagctgtgagccagtattcatttaagaggcaataaggcaaatgccagaattaaaaaaaaaaatcatcaaagacagaaaatgcctgaccaaattctaaaacctaatccatataagtttattcatttaggaatgttcgtttaaattaatctgcagtttttaccaagagctaagccaatatatgtgcttttcaaccagtattgtcacagcatgaaagtcaagtcaggttccagactgttaagaggtgtaatctaatgaagaaatcaattagatgccccgaaatctacagtcgctgaataaccaataaacagtaacctccatcaaatgctataccaatggaccagtgttagtagctgctccctgtattatgtgaacagtcttattctatgtacacagatgtaattaaaattgtaatcctaacaaacaaaagaaatgtagttcagcttttcaatgtttcatgtttgctgtgcttttctgaattttatgttgcattcaaagactgttgtcttgttcttgtggtgtttggattcttgtggtgtgtgcttttagacacagggtagaattagagacaatattggatgtacaattcctcaggagactacagtagtatattctattccttaccagtaataaggttcttcctaataataattaagagattgaaactccaaacaagtattcattatgaacagatacacatcaaaatcataataatattttcaaaacaaggaataatttctctaatggtttattatagaataccaatgtatagcttagaaataaaactttgaatatttcaagaatatagataagtctaatttttaaatgctgtatatatggctttcactcaatcatctctcagatgttgttattaactcgctctgtgttgttgcaaaactttttggtgcagattcgtttccaaaactattgctactttgtgtgctttaaacaaaataccttgggttgatgaaacatcaacccagtgctaggaatactgtgtatctatcattagctatatgggactatattgtagattgtggtttctcagtagagaagtgactgtagtgtgattctagataaatcatcattagcaattcattcagatggtcaataacttgaaatttatagctgtgataggagttcagaaattggcacatccctttaaaaataacaacagaaaatacaactcctgggaaaaaaggtgctgattctataagattatttatatatgtaagtgtttaaaaagattattttccagaaagtttgtgcagggtttaagttgctactattcaactacactatatataaataaaatatatacaatatatacattgttttcactgtatcacattaaagtacttgggcttcagaagtaagagccaaccaactgaaaacctgagatggagatatgttcaaagaatgagatacaattttttagttttcagtttaagtaactctcagcattacaaaagagtaagtatctcacaaataggaaataaaactaaaacgtggatttaaaaagaactgcacgggctttagggtaaatgctcatcttaaacctcactagagggaagtcttctcaagtttcaagcaagaccatttacttaatgtgaagttttggaaagttataaaggtgtatgttttagccatatgattttaattttaattttgcttcttttaggttcgttcttatttaaagcaatatgattgtgtgactccttgtagttacacttgtgtttcaatcagatcagattgttgtatttattccactattttgcatttaaatgataacataaaagatataaaaaatttaaaactgctatttttcttatagaagagaaaatgggtgttggtgattgtattttaattatttaagcgtctctgtttacctgcctaggaaaacattttatggcagtcttatgtgcaaagatcgtaaaaggacaaaaaatttaaactgcttataataatccaggagttgcattatagccagtagtaaaaataataataataataataaaaccatgtctatagctgtagatgggcttcacatctgtaaagcaatcaattgtatatttttgtgatgtgtaccatactgtgtgctccagcaaatgtccatttgtgtaaatgtatttattttatattgtatatattgttaaatgcaaaaaggagatatgattctgtaactccaatcagttcagatgtgtaactcaaattattatgcctttcaggatgatggtagagcaatattaaacaagcttccacttt

SEQ ID NO: 6769 - DNA, 5431 bp, Homo sapiens
  source 1..5431: mol_type = unassigned DNA; mol_type = unassigned DNA
tatccacacacagcatcggaatattgctagctaactcaacaaatgtgcaaatcaggggactgttgtgtgtgtaccgattcatgtctatactgtttttattggtgaagtaggaaattagtctaaatatttgattctgcagttgcatgtcaccaaattcagtgaggttagatgttaaatcatcttgttggctttgggctgaatttgatctaagagacaaaagtctcaaacaacagactacttactgccaccacatctcgattcaaagaatagttttcacatgttcgtggtgtggaaaggactttctgtttctcactaatttcttcagctataccaagagtggtgttgtctttgaacaggaaggacagcaaaaataaacataacagttttttcataagatacacagctgcattacacatcccaaaattgcttctctgcagaatgtcaaacaaagatcgacacattgattccagctgttcgtccttcatcaagacggaaccttccagcccagcctccctgacggacagcgtcaaccaccacagccctggtggctcttcagacgccagtgggagctacagttcaaccatgaatggccatcagaacggacttgactcgccacctctctacccttctgctcctatcctgggaggtagtgggcctgtcaggaaactgtatgatgactgctccagcaccattgttgaagatccccagaccaagtgtgaatacatgctcaactcgatgcccaagagactgtgtttagtgtgtggtgacatcgcttctgggtaccactatggggtagcatcatgtgaagcctgcaaggcattcttcaagaggacaattcaaggcaatatagaatacagctgccctgccacgaatgaatgtgaaatcacaaagcgcagacgtaaatcctgccaggcttgccgcttcatgaagtgtttaaaagtgggcatgctgaaagaaggggtgcgtcttgacagagtacgtggaggtcggcagaagtacaagcgcaggatagatgcggagaacagcccatacctgaaccctcagctggttcagccagccaaaaagccatataacaagattgtctcacatttgttggtggctgaaccggagaagatctatgccatgcctgaccctactgtccccgacagtgacatcaaagccctcactacactgtgtgacttggccgaccgagagttggtggttatcattggatgggcgaagcatattccaggcttctccacgctgtccctggcggaccagatgagccttctgcagagtgcttggatggaaattttgatccttggtgtcgtataccggtctctttcgtttgaggatgaacttgtctatgcagacgattatataatggacgaagaccagtccaaattagcaggccttcttgatctaaataatgctatcctgcagctggtaaagaaatacaagagcatgaagctggaaaaagaagaatttgtcaccctcaaagctatagctcttgctaattcagactccatgcacatagaagatgttgaagccgttcagaagcttcaggatgtcttacatgaagcgctgcaggattatgaagctggccagcacatggaagaccctcgtcgagctggcaagatgctgatgacactgccactcctgaggcagacctctaccaaggccgtgcagcatttctacaacatcaaactagaaggcaaagtcccaatgcacaaactttttttggaaatgttggaggccaaggtctgactaaaagctccctgggccttcccatccttcatgttgaaaaagggaaaataaacccaagagtgatgtcgaagaaacttagagtttagttaacaacatcaaaaatcaacagactgcactgataatttagcagcaagactatgaagcagctttcagattcctccataggttcctgatgagtttctttctactttctccatcatcttctttcctctttcttcccacatttctctttctctttattttttctccttttcttctttcacctcccttatttctttgcttctttcattcctagttcccattctcctttattttcttcccgtctgcctgccttctttcttttctttacctactctcattcctctcttttctcatccttccccttttttctaaatttgaaatagctttagtttaaaaaaaaatcctcccttccccctttcctttccctttctttcctttttccctttccttttccctttcctttcctttcctcttgaccttctttccatctttctttttcttccttctgctgctgaacttttaaaagaggtctctaactgaagagagatggaagccagccctgccaaaggatggagatccataatatggatgccagtgaacttattgtgaaccatactgtccccaatgactaaggaatcaaagagagagaaccaacgttcctaaaagtacagtgcaacatatacaaattgactgagtgcagtattagatttcatgggagcagcctctaattagacaacttaagcaacgttgcatcggctgcttcttatcattgcttttccatctagatcagttacagccatttgattccttaattgttttttcaagtcttccaggtatttgttagtttagctactatgtaactttttcagggaatagtttaagctttattcattcatgcaatactaaagagaaataagaatactgcaattttgtgctggctttgaacaattacgaacaataatgaaggacaaatgaatcctgaaggaagatttttaaaaatgttttgtttcttcttacaaatggagatttttttgtaccagctttaccacttttcagccatttattaatatgggaatttaacttactcaagcaatagttgaagggaaggtgcatattatcacggatgcaatttatgttgtgtgccagtctggtcccaaacatcaatttcttaacatgagctccagtttacctaaatgttcactgacacaaaggatgagattacacctacagtgactctgagtagtcacatatataagcactgcacatgagatatagatccgtagaattgtcaggagtgcacctctctacttgggaggtacaattgccatatgatttctagctgccatggtggttaggaatgtgatactgcctgtttgcaaagtcacagaccttgcctcagaaggagctgtgagccagtattcatttaagaggcaataaggcaaatgccagaattaaaaaaaaaaatcatcaaagacagaaaatgcctgaccaaattctaaaacctaatccatataagtttattcatttaggaatgttcgtttaaattaatctgcagtttttaccaagagctaagccaatatatgtgcttttcaaccagtattgtcacagcatgaaagtcaagtcaggttccagactgttaagaggtgtaatctaatgaagaaatcaattagatgccccgaaatctacagtcgctgaataaccaataaacagtaacctccatcaaatgctataccaatggaccagtgttagtagctgctccctgtattatgtgaacagtcttattctatgtacacagatgtaattaaaattgtaatcctaacaaacaaaagaaatgtagttcagcttttcaatgtttcatgtttgctgtgcttttctgaattttatgttgcattcaaagactgttgtcttgttcttgtggtgtttggattcttgtggtgtgtgcttttagacacagggtagaattagagacaatattggatgtacaattcctcaggagactacagtagtatattctattccttaccagtaataaggttcttcctaataataattaagagattgaaactccaaacaagtattcattatgaacagatacacatcaaaatcataataatattttcaaaacaaggaataatttctctaatggtttattatagaataccaatgtatagcttagaaataaaactttgaatatttcaagaatatagataagtctaatttttaaatgctgtatatatggctttcactcaatcatctctcagatgttgttattaactcgctctgtgttgttgcaaaactttttggtgcagattcgtttccaaaactattgctactttgtgtgctttaaacaaaataccttgggttgatgaaacatcaacccagtgctaggaatactgtgtatctatcattagctatatgggactatattgtagattgtggtttctcagtagagaagtgactgtagtgtgattctagataaatcatcattagcaattcattcagatggtcaataacttgaaatttatagctgtgataggagttcagaaattggcacatccctttaaaaataacaacagaaaatacaactcctgggaaaaaaggtgctgattctataagattatttatatatgtaagtgtttaaaaagattattttccagaaagtttgtgcagggtttaagttgctactattcaactacactatatataaataaaatatatacaatatatacattgttttcactgtatcacattaaagtacttgggcttcagaagtaagagccaaccaactgaaaacctgagatggagatatgttcaaagaatgagatacaattttttagttttcagtttaagtaactctcagcattacaaaagagtaagtatctcacaaataggaaataaaactaaaacgtggatttaaaaagaactgcacgggctttagggtaaatgctcatcttaaacctcactagagggaagtcttctcaagtttcaagcaagaccatttacttaatgtgaagttttggaaagttataaaggtgtatgttttagccatatgattttaattttaattttgcttcttttaggttcgttcttatttaaagcaatatgattgtgtgactccttgtagttacacttgtgtttcaatcagatcagattgttgtatttattccactattttgcatttaaatgataacataaaagatataaaaaatttaaaactgctatttttcttatagaagagaaaatgggtgttggtgattgtattttaattatttaagcgtctctgtttacctgcctaggaaaacattttatggcagtcttatgtgcaaagatcgtaaaaggacaaaaaatttaaactgcttataataatccaggagttgcattatagccagtagtaaaaataataataataataataaaaccatgtctatagctgtagatgggcttcacatctgtaaagcaatcaattgtatatttttgtgatgtgtaccatactgtgtgctccagcaaatgtccatttgtgtaaatgtatttattttatattgtatatattgttaaatgcaaaaaggagatatgattctgtaactccaatcagttcagatgtgtaactcaaattattatgcctttcaggatgatggtagagcaatattaaacaagcttccacttt

SEQ ID NO: 6770 - DNA, 5216 bp, Homo sapiens
  source 1..5216: mol_type = unassigned DNA; mol_type = unassigned DNA
agctgacaatttactggttcatcaatgaaacaatattaaattatgaagatgtaaggaaaaaatcctacgctaacactgtcgcagtttgaaagctttaaaaagttgaagtctattggaaaccttcttataagaaaccttcctagtcagagaattcaactttcttcttttcttcattcatgaaaatgcagatccactgagaaagggaataaggcttctctgcagaatgtcaaacaaagatcgacacattgattccagctgttcgtccttcatcaagacggaaccttccagcccagcctccctgacggacagcgtcaaccaccacagccctggtggctcttcagacgccagtgggagctacagttcaaccatgaatggccatcagaacggacttgactcgccacctctctacccttctgctcctatcctgggaggtagtgggcctgtcaggaaactgtatgatgactgctccagcaccattgttgaagatccccagaccaagtgtgaatacatgctcaactcgatgcccaagagactgtgtttagtgtgtggtgacatcgcttctgggtaccactatggggtagcatcatgtgaagcctgcaaggcattcttcaagaggacaattcaaggcaatatagaatacagctgccctgccacgaatgaatgtgaaatcacaaagcgcagacgtaaatcctgccaggcttgccgcttcatgaagtgtttaaaagtgggcatgctgaaagaaggggtgcgtcttgacagagtacgtggaggtcggcagaagtacaagcgcaggatagatgcggagaacagcccatacctgaaccctcagctggttcagccagccaaaaagccatataacaagattgtctcacatttgttggtggctgaaccggagaagatctatgccatgcctgaccctactgtccccgacagtgacatcaaagccctcactacactgtgtgacttggccgaccgagagttggtggttatcattggatgggcgaagcatattccaggcttctccacgctgtccctggcggaccagatgagccttctgcagagtgcttggatggaaattttgatccttggtgtcgtataccggtctctttcgtttgaggatgaacttgtctatgcagacgattatataatggacgaagaccagtccaaattagcaggccttcttgatctaaataatgctatcctgcagctggtaaagaaatacaagagcatgaagctggaaaaagaagaatttgtcaccctcaaagctatagctcttgctaattcagactccatgcacatagaagatgttgaagccgttcagaagcttcaggatgtcttacatgaagcgctgcaggattatgaagctggccagcacatggaagaccctcgtcgagctggcaagatgctgatgacactgccactcctgaggcagacctctaccaaggccgtgcagcatttctacaacatcaaactagaaggcaaagtcccaatgcacaaactttttttggaaatgttggaggccaaggtctgactaaaagctccctgggccttcccatccttcatgttgaaaaagggaaaataaacccaagagtgatgtcgaagaaacttagagtttagttaacaacatcaaaaatcaacagactgcactgataatttagcagcaagactatgaagcagctttcagattcctccataggttcctgatgagtttctttctactttctccatcatcttctttcctctttcttcccacatttctctttctctttattttttctccttttcttctttcacctcccttatttctttgcttctttcattcctagttcccattctcctttattttcttcccgtctgcctgccttctttcttttctttacctactctcattcctctcttttctcatccttccccttttttctaaatttgaaatagctttagtttaaaaaaaaatcctcccttccccctttcctttccctttctttcctttttccctttccttttccctttcctttcctttcctcttgaccttctttccatctttctttttcttccttctgctgctgaacttttaaaagaggtctctaactgaagagagatggaagccagccctgccaaaggatggagatccataatatggatgccagtgaacttattgtgaaccatactgtccccaatgactaaggaatcaaagagagagaaccaacgttcctaaaagtacagtgcaacatatacaaattgactgagtgcagtattagatttcatgggagcagcctctaattagacaacttaagcaacgttgcatcggctgcttcttatcattgcttttccatctagatcagttacagccatttgattccttaattgttttttcaagtcttccaggtatttgttagtttagctactatgtaactttttcagggaatagtttaagctttattcattcatgcaatactaaagagaaataagaatactgcaattttgtgctggctttgaacaattacgaacaataatgaaggacaaatgaatcctgaaggaagatttttaaaaatgttttgtttcttcttacaaatggagatttttttgtaccagctttaccacttttcagccatttattaatatgggaatttaacttactcaagcaatagttgaagggaaggtgcatattatcacggatgcaatttatgttgtgtgccagtctggtcccaaacatcaatttcttaacatgagctccagtttacctaaatgttcactgacacaaaggatgagattacacctacagtgactctgagtagtcacatatataagcactgcacatgagatatagatccgtagaattgtcaggagtgcacctctctacttgggaggtacaattgccatatgatttctagctgccatggtggttaggaatgtgatactgcctgtttgcaaagtcacagaccttgcctcagaaggagctgtgagccagtattcatttaagaggcaataaggcaaatgccagaattaaaaaaaaaaatcatcaaagacagaaaatgcctgaccaaattctaaaacctaatccatataagtttattcatttaggaatgttcgtttaaattaatctgcagtttttaccaagagctaagccaatatatgtgcttttcaaccagtattgtcacagcatgaaagtcaagtcaggttccagactgttaagaggtgtaatctaatgaagaaatcaattagatgccccgaaatctacagtcgctgaataaccaataaacagtaacctccatcaaatgctataccaatggaccagtgttagtagctgctccctgtattatgtgaacagtcttattctatgtacacagatgtaattaaaattgtaatcctaacaaacaaaagaaatgtagttcagcttttcaatgtttcatgtttgctgtgcttttctgaattttatgttgcattcaaagactgttgtcttgttcttgtggtgtttggattcttgtggtgtgtgcttttagacacagggtagaattagagacaatattggatgtacaattcctcaggagactacagtagtatattctattccttaccagtaataaggttcttcctaataataattaagagattgaaactccaaacaagtattcattatgaacagatacacatcaaaatcataataatattttcaaaacaaggaataatttctctaatggtttattatagaataccaatgtatagcttagaaataaaactttgaatatttcaagaatatagataagtctaatttttaaatgctgtatatatggctttcactcaatcatctctcagatgttgttattaactcgctctgtgttgttgcaaaactttttggtgcagattcgtttccaaaactattgctactttgtgtgctttaaacaaaataccttgggttgatgaaacatcaacccagtgctaggaatactgtgtatctatcattagctatatgggactatattgtagattgtggtttctcagtagagaagtgactgtagtgtgattctagataaatcatcattagcaattcattcagatggtcaataacttgaaatttatagctgtgataggagttcagaaattggcacatccctttaaaaataacaacagaaaatacaactcctgggaaaaaaggtgctgattctataagattatttatatatgtaagtgtttaaaaagattattttccagaaagtttgtgcagggtttaagttgctactattcaactacactatatataaataaaatatatacaatatatacattgttttcactgtatcacattaaagtacttgggcttcagaagtaagagccaaccaactgaaaacctgagatggagatatgttcaaagaatgagatacaattttttagttttcagtttaagtaactctcagcattacaaaagagtaagtatctcacaaataggaaataaaactaaaacgtggatttaaaaagaactgcacgggctttagggtaaatgctcatcttaaacctcactagagggaagtcttctcaagtttcaagcaagaccatttacttaatgtgaagttttggaaagttataaaggtgtatgttttagccatatgattttaattttaattttgcttcttttaggttcgttcttatttaaagcaatatgattgtgtgactccttgtagttacacttgtgtttcaatcagatcagattgttgtatttattccactattttgcatttaaatgataacataaaagatataaaaaatttaaaactgctatttttcttatagaagagaaaatgggtgttggtgattgtattttaattatttaagcgtctctgtttacctgcctaggaaaacattttatggcagtcttatgtgcaaagatcgtaaaaggacaaaaaatttaaactgcttataataatccaggagttgcattatagccagtagtaaaaataataataataataataaaaccatgtctatagctgtagatgggcttcacatctgtaaagcaatcaattgtatatttttgtgatgtgtaccatactgtgtgctccagcaaatgtccatttgtgtaaatgtatttattttatattgtatatattgttaaatgcaaaaaggagatatgattctgtaactccaatcagttcagatgtgtaactcaaattattatgcctttcaggatgatggtagagcaatattaaacaagcttccacttt

SEQ ID NO: 6771 - DNA, 5274 bp, Homo sapiens
  source 1..5274: mol_type = unassigned DNA; mol_type = unassigned DNA
agctgacaatttactggttcatcaatgaaacaatattaaattatgaagatgtaaggaaaaaatcctacgctaacactgtcgcagtttgaaagacttgaatgagacctgcctcatcagtcatgggatcatagtgtcacagatggaaaagcaactatcagctgaattgtactgaactacacacttggctaattcatcttattgctctacacatctaaaggaaggctcattctgttcttggagtctagacagcatcaggagttgggctcaggcttctctgcagaatgtcaaacaaagatcgacacattgattccagctgttcgtccttcatcaagacggaaccttccagcccagcctccctgacggacagcgtcaaccaccacagccctggtggctcttcagacgccagtgggagctacagttcaaccatgaatggccatcagaacggacttgactcgccacctctctacccttctgctcctatcctgggaggtagtgggcctgtcaggaaactgtatgatgactgctccagcaccattgttgaagatccccagaccaagtgtgaatacatgctcaactcgatgcccaagagactgtgtttagtgtgtggtgacatcgcttctgggtaccactatggggtagcatcatgtgaagcctgcaaggcattcttcaagaggacaattcaaggcaatatagaatacagctgccctgccacgaatgaatgtgaaatcacaaagcgcagacgtaaatcctgccaggcttgccgcttcatgaagtgtttaaaagtgggcatgctgaaagaaggggtgcgtcttgacagagtacgtggaggtcggcagaagtacaagcgcaggatagatgcggagaacagcccatacctgaaccctcagctggttcagccagccaaaaagccatataacaagattgtctcacatttgttggtggctgaaccggagaagatctatgccatgcctgaccctactgtccccgacagtgacatcaaagccctcactacactgtgtgacttggccgaccgagagttggtggttatcattggatgggcgaagcatattccaggcttctccacgctgtccctggcggaccagatgagccttctgcagagtgcttggatggaaattttgatccttggtgtcgtataccggtctctttcgtttgaggatgaacttgtctatgcagacgattatataatggacgaagaccagtccaaattagcaggccttcttgatctaaataatgctatcctgcagctggtaaagaaatacaagagcatgaagctggaaaaagaagaatttgtcaccctcaaagctatagctcttgctaattcagactccatgcacatagaagatgttgaagccgttcagaagcttcaggatgtcttacatgaagcgctgcaggattatgaagctggccagcacatggaagaccctcgtcgagctggcaagatgctgatgacactgccactcctgaggcagacctctaccaaggccgtgcagcatttctacaacatcaaactagaaggcaaagtcccaatgcacaaactttttttggaaatgttggaggccaaggtctgactaaaagctccctgggccttcccatccttcatgttgaaaaagggaaaataaacccaagagtgatgtcgaagaaacttagagtttagttaacaacatcaaaaatcaacagactgcactgataatttagcagcaagactatgaagcagctttcagattcctccataggttcctgatgagtttctttctactttctccatcatcttctttcctctttcttcccacatttctctttctctttattttttctccttttcttctttcacctcccttatttctttgcttctttcattcctagttcccattctcctttattttcttcccgtctgcctgccttctttcttttctttacctactctcattcctctcttttctcatccttccccttttttctaaatttgaaatagctttagtttaaaaaaaaatcctcccttccccctttcctttccctttctttcctttttccctttccttttccctttcctttcctttcctcttgaccttctttccatctttctttttcttccttctgctgctgaacttttaaaagaggtctctaactgaagagagatggaagccagccctgccaaaggatggagatccataatatggatgccagtgaacttattgtgaaccatactgtccccaatgactaaggaatcaaagagagagaaccaacgttcctaaaagtacagtgcaacatatacaaattgactgagtgcagtattagatttcatgggagcagcctctaattagacaacttaagcaacgttgcatcggctgcttcttatcattgcttttccatctagatcagttacagccatttgattccttaattgttttttcaagtcttccaggtatttgttagtttagctactatgtaactttttcagggaatagtttaagctttattcattcatgcaatactaaagagaaataagaatactgcaattttgtgctggctttgaacaattacgaacaataatgaaggacaaatgaatcctgaaggaagatttttaaaaatgttttgtttcttcttacaaatggagatttttttgtaccagctttaccacttttcagccatttattaatatgggaatttaacttactcaagcaatagttgaagggaaggtgcatattatcacggatgcaatttatgttgtgtgccagtctggtcccaaacatcaatttcttaacatgagctccagtttacctaaatgttcactgacacaaaggatgagattacacctacagtgactctgagtagtcacatatataagcactgcacatgagatatagatccgtagaattgtcaggagtgcacctctctacttgggaggtacaattgccatatgatttctagctgccatggtggttaggaatgtgatactgcctgtttgcaaagtcacagaccttgcctcagaaggagctgtgagccagtattcatttaagaggcaataaggcaaatgccagaattaaaaaaaaaaatcatcaaagacagaaaatgcctgaccaaattctaaaacctaatccatataagtttattcatttaggaatgttcgtttaaattaatctgcagtttttaccaagagctaagccaatatatgtgcttttcaaccagtattgtcacagcatgaaagtcaagtcaggttccagactgttaagaggtgtaatctaatgaagaaatcaattagatgccccgaaatctacagtcgctgaataaccaataaacagtaacctccatcaaatgctataccaatggaccagtgttagtagctgctccctgtattatgtgaacagtcttattctatgtacacagatgtaattaaaattgtaatcctaacaaacaaaagaaatgtagttcagcttttcaatgtttcatgtttgctgtgcttttctgaattttatgttgcattcaaagactgttgtcttgttcttgtggtgtttggattcttgtggtgtgtgcttttagacacagggtagaattagagacaatattggatgtacaattcctcaggagactacagtagtatattctattccttaccagtaataaggttcttcctaataataattaagagattgaaactccaaacaagtattcattatgaacagatacacatcaaaatcataataatattttcaaaacaaggaataatttctctaatggtttattatagaataccaatgtatagcttagaaataaaactttgaatatttcaagaatatagataagtctaatttttaaatgctgtatatatggctttcactcaatcatctctcagatgttgttattaactcgctctgtgttgttgcaaaactttttggtgcagattcgtttccaaaactattgctactttgtgtgctttaaacaaaataccttgggttgatgaaacatcaacccagtgctaggaatactgtgtatctatcattagctatatgggactatattgtagattgtggtttctcagtagagaagtgactgtagtgtgattctagataaatcatcattagcaattcattcagatggtcaataacttgaaatttatagctgtgataggagttcagaaattggcacatccctttaaaaataacaacagaaaatacaactcctgggaaaaaaggtgctgattctataagattatttatatatgtaagtgtttaaaaagattattttccagaaagtttgtgcagggtttaagttgctactattcaactacactatatataaataaaatatatacaatatatacattgttttcactgtatcacattaaagtacttgggcttcagaagtaagagccaaccaactgaaaacctgagatggagatatgttcaaagaatgagatacaattttttagttttcagtttaagtaactctcagcattacaaaagagtaagtatctcacaaataggaaataaaactaaaacgtggatttaaaaagaactgcacgggctttagggtaaatgctcatcttaaacctcactagagggaagtcttctcaagtttcaagcaagaccatttacttaatgtgaagttttggaaagttataaaggtgtatgttttagccatatgattttaattttaattttgcttcttttaggttcgttcttatttaaagcaatatgattgtgtgactccttgtagttacacttgtgtttcaatcagatcagattgttgtatttattccactattttgcatttaaatgataacataaaagatataaaaaatttaaaactgctatttttcttatagaagagaaaatgggtgttggtgattgtattttaattatttaagcgtctctgtttacctgcctaggaaaacattttatggcagtcttatgtgcaaagatcgtaaaaggacaaaaaatttaaactgcttataataatccaggagttgcattatagccagtagtaaaaataataataataataataaaaccatgtctatagctgtagatgggcttcacatctgtaaagcaatcaattgtatatttttgtgatgtgtaccatactgtgtgctccagcaaatgtccatttgtgtaaatgtatttattttatattgtatatattgttaaatgcaaaaaggagatatgattctgtaactccaatcagttcagatgtgtaactcaaattattatgcctttcaggatgatggtagagcaatattaaacaagcttccacttt

SEQ ID NO: 6772 - DNA, 5197 bp, Homo sapiens
  source 1..5197: mol_type = unassigned DNA; mol_type = unassigned DNA
ggttttgtagactttcatagccaaagaaaccggcttcggcttctttaaaatccccgacgactcacctgattaacctgctgcagttctgaccctgccaagagctgacaatttactggttcatcaatgaaacaatattaaattatgaagatgtaaggaaaaaatcctacgctaacactgtcgcagtttgaaaggcttctctgcagaatgtcaaacaaagatcgacacattgattccagctgttcgtccttcatcaagacggaaccttccagcccagcctccctgacggacagcgtcaaccaccacagccctggtggctcttcagacgccagtgggagctacagttcaaccatgaatggccatcagaacggacttgactcgccacctctctacccttctgctcctatcctgggaggtagtgggcctgtcaggaaactgtatgatgactgctccagcaccattgttgaagatccccagaccaagtgtgaatacatgctcaactcgatgcccaagagactgtgtttagtgtgtggtgacatcgcttctgggtaccactatggggtagcatcatgtgaagcctgcaaggcattcttcaagaggacaattcaaggcaatatagaatacagctgccctgccacgaatgaatgtgaaatcacaaagcgcagacgtaaatcctgccaggcttgccgcttcatgaagtgtttaaaagtgggcatgctgaaagaaggggtgcgtcttgacagagtacgtggaggtcggcagaagtacaagcgcaggatagatgcggagaacagcccatacctgaaccctcagctggttcagccagccaaaaagccatataacaagattgtctcacatttgttggtggctgaaccggagaagatctatgccatgcctgaccctactgtccccgacagtgacatcaaagccctcactacactgtgtgacttggccgaccgagagttggtggttatcattggatgggcgaagcatattccaggcttctccacgctgtccctggcggaccagatgagccttctgcagagtgcttggatggaaattttgatccttggtgtcgtataccggtctctttcgtttgaggatgaacttgtctatgcagacgattatataatggacgaagaccagtccaaattagcaggccttcttgatctaaataatgctatcctgcagctggtaaagaaatacaagagcatgaagctggaaaaagaagaatttgtcaccctcaaagctatagctcttgctaattcagactccatgcacatagaagatgttgaagccgttcagaagcttcaggatgtcttacatgaagcgctgcaggattatgaagctggccagcacatggaagaccctcgtcgagctggcaagatgctgatgacactgccactcctgaggcagacctctaccaaggccgtgcagcatttctacaacatcaaactagaaggcaaagtcccaatgcacaaactttttttggaaatgttggaggccaaggtctgactaaaagctccctgggccttcccatccttcatgttgaaaaagggaaaataaacccaagagtgatgtcgaagaaacttagagtttagttaacaacatcaaaaatcaacagactgcactgataatttagcagcaagactatgaagcagctttcagattcctccataggttcctgatgagtttctttctactttctccatcatcttctttcctctttcttcccacatttctctttctctttattttttctccttttcttctttcacctcccttatttctttgcttctttcattcctagttcccattctcctttattttcttcccgtctgcctgccttctttcttttctttacctactctcattcctctcttttctcatccttccccttttttctaaatttgaaatagctttagtttaaaaaaaaatcctcccttccccctttcctttccctttctttcctttttccctttccttttccctttcctttcctttcctcttgaccttctttccatctttctttttcttccttctgctgctgaacttttaaaagaggtctctaactgaagagagatggaagccagccctgccaaaggatggagatccataatatggatgccagtgaacttattgtgaaccatactgtccccaatgactaaggaatcaaagagagagaaccaacgttcctaaaagtacagtgcaacatatacaaattgactgagtgcagtattagatttcatgggagcagcctctaattagacaacttaagcaacgttgcatcggctgcttcttatcattgcttttccatctagatcagttacagccatttgattccttaattgttttttcaagtcttccaggtatttgttagtttagctactatgtaactttttcagggaatagtttaagctttattcattcatgcaatactaaagagaaataagaatactgcaattttgtgctggctttgaacaattacgaacaataatgaaggacaaatgaatcctgaaggaagatttttaaaaatgttttgtttcttcttacaaatggagatttttttgtaccagctttaccacttttcagccatttattaatatgggaatttaacttactcaagcaatagttgaagggaaggtgcatattatcacggatgcaatttatgttgtgtgccagtctggtcccaaacatcaatttcttaacatgagctccagtttacctaaatgttcactgacacaaaggatgagattacacctacagtgactctgagtagtcacatatataagcactgcacatgagatatagatccgtagaattgtcaggagtgcacctctctacttgggaggtacaattgccatatgatttctagctgccatggtggttaggaatgtgatactgcctgtttgcaaagtcacagaccttgcctcagaaggagctgtgagccagtattcatttaagaggcaataaggcaaatgccagaattaaaaaaaaaaatcatcaaagacagaaaatgcctgaccaaattctaaaacctaatccatataagtttattcatttaggaatgttcgtttaaattaatctgcagtttttaccaagagctaagccaatatatgtgcttttcaaccagtattgtcacagcatgaaagtcaagtcaggttccagactgttaagaggtgtaatctaatgaagaaatcaattagatgccccgaaatctacagtcgctgaataaccaataaacagtaacctccatcaaatgctataccaatggaccagtgttagtagctgctccctgtattatgtgaacagtcttattctatgtacacagatgtaattaaaattgtaatcctaacaaacaaaagaaatgtagttcagcttttcaatgtttcatgtttgctgtgcttttctgaattttatgttgcattcaaagactgttgtcttgttcttgtggtgtttggattcttgtggtgtgtgcttttagacacagggtagaattagagacaatattggatgtacaattcctcaggagactacagtagtatattctattccttaccagtaataaggttcttcctaataataattaagagattgaaactccaaacaagtattcattatgaacagatacacatcaaaatcataataatattttcaaaacaaggaataatttctctaatggtttattatagaataccaatgtatagcttagaaataaaactttgaatatttcaagaatatagataagtctaatttttaaatgctgtatatatggctttcactcaatcatctctcagatgttgttattaactcgctctgtgttgttgcaaaactttttggtgcagattcgtttccaaaactattgctactttgtgtgctttaaacaaaataccttgggttgatgaaacatcaacccagtgctaggaatactgtgtatctatcattagctatatgggactatattgtagattgtggtttctcagtagagaagtgactgtagtgtgattctagataaatcatcattagcaattcattcagatggtcaataacttgaaatttatagctgtgataggagttcagaaattggcacatccctttaaaaataacaacagaaaatacaactcctgggaaaaaaggtgctgattctataagattatttatatatgtaagtgtttaaaaagattattttccagaaagtttgtgcagggtttaagttgctactattcaactacactatatataaataaaatatatacaatatatacattgttttcactgtatcacattaaagtacttgggcttcagaagtaagagccaaccaactgaaaacctgagatggagatatgttcaaagaatgagatacaattttttagttttcagtttaagtaactctcagcattacaaaagagtaagtatctcacaaataggaaataaaactaaaacgtggatttaaaaagaactgcacgggctttagggtaaatgctcatcttaaacctcactagagggaagtcttctcaagtttcaagcaagaccatttacttaatgtgaagttttggaaagttataaaggtgtatgttttagccatatgattttaattttaattttgcttcttttaggttcgttcttatttaaagcaatatgattgtgtgactccttgtagttacacttgtgtttcaatcagatcagattgttgtatttattccactattttgcatttaaatgataacataaaagatataaaaaatttaaaactgctatttttcttatagaagagaaaatgggtgttggtgattgtattttaattatttaagcgtctctgtttacctgcctaggaaaacattttatggcagtcttatgtgcaaagatcgtaaaaggacaaaaaatttaaactgcttataataatccaggagttgcattatagccagtagtaaaaataataataataataataaaaccatgtctatagctgtagatgggcttcacatctgtaaagcaatcaattgtatatttttgtgatgtgtaccatactgtgtgctccagcaaatgtccatttgtgtaaatgtatttattttatattgtatatattgttaaatgcaaaaaggagatatgattctgtaactccaatcagttcagatgtgtaactcaaattattatgcctttcaggatgatggtagagcaatattaaacaagcttccacttt

SEQ ID NO: 6773 - DNA, 5304 bp, Homo sapiens
  source 1..5304: mol_type = unassigned DNA; mol_type = unassigned DNA
gagggcgagggcgggctcctctggaggcggcgggctccaggccgggctccctaaacgggtcagcaattggagcgggaaggccggacagagctgacaatttactggttcatcaatgaaacaatattaaattatgaagatgtaaggaaaaaatcctacgctaacactgtcgcagtttgaaagctttaaaaagttgaagtctattggaaaccttcttataagaaaccttcctagtcagagaattcaactttcttcttttcttcattcatgaaaatgcagatccactgagaaagggaataaggcttctctgcagaatgtcaaacaaagatcgacacattgattccagctgttcgtccttcatcaagacggaaccttccagcccagcctccctgacggacagcgtcaaccaccacagccctggtggctcttcagacgccagtgggagctacagttcaaccatgaatggccatcagaacggacttgactcgccacctctctacccttctgctcctatcctgggaggtagtgggcctgtcaggaaactgtatgatgactgctccagcaccattgttgaagatccccagaccaagtgtgaatacatgctcaactcgatgcccaagagactgtgtttagtgtgtggtgacatcgcttctgggtaccactatggggtagcatcatgtgaagcctgcaaggcattcttcaagaggacaattcaaggcaatatagaatacagctgccctgccacgaatgaatgtgaaatcacaaagcgcagacgtaaatcctgccaggcttgccgcttcatgaagtgtttaaaagtgggcatgctgaaagaaggggtgcgtcttgacagagtacgtggaggtcggcagaagtacaagcgcaggatagatgcggagaacagcccatacctgaaccctcagctggttcagccagccaaaaagccatataacaagattgtctcacatttgttggtggctgaaccggagaagatctatgccatgcctgaccctactgtccccgacagtgacatcaaagccctcactacactgtgtgacttggccgaccgagagttggtggttatcattggatgggcgaagcatattccaggcttctccacgctgtccctggcggaccagatgagccttctgcagagtgcttggatggaaattttgatccttggtgtcgtataccggtctctttcgtttgaggatgaacttgtctatgcagacgattatataatggacgaagaccagtccaaattagcaggccttcttgatctaaataatgctatcctgcagctggtaaagaaatacaagagcatgaagctggaaaaagaagaatttgtcaccctcaaagctatagctcttgctaattcagactccatgcacatagaagatgttgaagccgttcagaagcttcaggatgtcttacatgaagcgctgcaggattatgaagctggccagcacatggaagaccctcgtcgagctggcaagatgctgatgacactgccactcctgaggcagacctctaccaaggccgtgcagcatttctacaacatcaaactagaaggcaaagtcccaatgcacaaactttttttggaaatgttggaggccaaggtctgactaaaagctccctgggccttcccatccttcatgttgaaaaagggaaaataaacccaagagtgatgtcgaagaaacttagagtttagttaacaacatcaaaaatcaacagactgcactgataatttagcagcaagactatgaagcagctttcagattcctccataggttcctgatgagtttctttctactttctccatcatcttctttcctctttcttcccacatttctctttctctttattttttctccttttcttctttcacctcccttatttctttgcttctttcattcctagttcccattctcctttattttcttcccgtctgcctgccttctttcttttctttacctactctcattcctctcttttctcatccttccccttttttctaaatttgaaatagctttagtttaaaaaaaaatcctcccttccccctttcctttccctttctttcctttttccctttccttttccctttcctttcctttcctcttgaccttctttccatctttctttttcttccttctgctgctgaacttttaaaagaggtctctaactgaagagagatggaagccagccctgccaaaggatggagatccataatatggatgccagtgaacttattgtgaaccatactgtccccaatgactaaggaatcaaagagagagaaccaacgttcctaaaagtacagtgcaacatatacaaattgactgagtgcagtattagatttcatgggagcagcctctaattagacaacttaagcaacgttgcatcggctgcttcttatcattgcttttccatctagatcagttacagccatttgattccttaattgttttttcaagtcttccaggtatttgttagtttagctactatgtaactttttcagggaatagtttaagctttattcattcatgcaatactaaagagaaataagaatactgcaattttgtgctggctttgaacaattacgaacaataatgaaggacaaatgaatcctgaaggaagatttttaaaaatgttttgtttcttcttacaaatggagatttttttgtaccagctttaccacttttcagccatttattaatatgggaatttaacttactcaagcaatagttgaagggaaggtgcatattatcacggatgcaatttatgttgtgtgccagtctggtcccaaacatcaatttcttaacatgagctccagtttacctaaatgttcactgacacaaaggatgagattacacctacagtgactctgagtagtcacatatataagcactgcacatgagatatagatccgtagaattgtcaggagtgcacctctctacttgggaggtacaattgccatatgatttctagctgccatggtggttaggaatgtgatactgcctgtttgcaaagtcacagaccttgcctcagaaggagctgtgagccagtattcatttaagaggcaataaggcaaatgccagaattaaaaaaaaaaatcatcaaagacagaaaatgcctgaccaaattctaaaacctaatccatataagtttattcatttaggaatgttcgtttaaattaatctgcagtttttaccaagagctaagccaatatatgtgcttttcaaccagtattgtcacagcatgaaagtcaagtcaggttccagactgttaagaggtgtaatctaatgaagaaatcaattagatgccccgaaatctacagtcgctgaataaccaataaacagtaacctccatcaaatgctataccaatggaccagtgttagtagctgctccctgtattatgtgaacagtcttattctatgtacacagatgtaattaaaattgtaatcctaacaaacaaaagaaatgtagttcagcttttcaatgtttcatgtttgctgtgcttttctgaattttatgttgcattcaaagactgttgtcttgttcttgtggtgtttggattcttgtggtgtgtgcttttagacacagggtagaattagagacaatattggatgtacaattcctcaggagactacagtagtatattctattccttaccagtaataaggttcttcctaataataattaagagattgaaactccaaacaagtattcattatgaacagatacacatcaaaatcataataatattttcaaaacaaggaataatttctctaatggtttattatagaataccaatgtatagcttagaaataaaactttgaatatttcaagaatatagataagtctaatttttaaatgctgtatatatggctttcactcaatcatctctcagatgttgttattaactcgctctgtgttgttgcaaaactttttggtgcagattcgtttccaaaactattgctactttgtgtgctttaaacaaaataccttgggttgatgaaacatcaacccagtgctaggaatactgtgtatctatcattagctatatgggactatattgtagattgtggtttctcagtagagaagtgactgtagtgtgattctagataaatcatcattagcaattcattcagatggtcaataacttgaaatttatagctgtgataggagttcagaaattggcacatccctttaaaaataacaacagaaaatacaactcctgggaaaaaaggtgctgattctataagattatttatatatgtaagtgtttaaaaagattattttccagaaagtttgtgcagggtttaagttgctactattcaactacactatatataaataaaatatatacaatatatacattgttttcactgtatcacattaaagtacttgggcttcagaagtaagagccaaccaactgaaaacctgagatggagatatgttcaaagaatgagatacaattttttagttttcagtttaagtaactctcagcattacaaaagagtaagtatctcacaaataggaaataaaactaaaacgtggatttaaaaagaactgcacgggctttagggtaaatgctcatcttaaacctcactagagggaagtcttctcaagtttcaagcaagaccatttacttaatgtgaagttttggaaagttataaaggtgtatgttttagccatatgattttaattttaattttgcttcttttaggttcgttcttatttaaagcaatatgattgtgtgactccttgtagttacacttgtgtttcaatcagatcagattgttgtatttattccactattttgcatttaaatgataacataaaagatataaaaaatttaaaactgctatttttcttatagaagagaaaatgggtgttggtgattgtattttaattatttaagcgtctctgtttacctgcctaggaaaacattttatggcagtcttatgtgcaaagatcgtaaaaggacaaaaaatttaaactgcttataataatccaggagttgcattatagccagtagtaaaaataataataataataataaaaccatgtctatagctgtagatgggcttcacatctgtaaagcaatcaattgtatatttttgtgatgtgtaccatactgtgtgctccagcaaatgtccatttgtgtaaatgtatttattttatattgtatatattgttaaatgcaaaaaggagatatgattctgtaactccaatcagttcagatgtgtaactcaaattattatgcctttcaggatgatggtagagcaatattaaacaagcttccacttt

SEQ ID NO: 6774 - DNA, 3359 bp, Homo sapiens
  source 1..3359: mol_type = unassigned DNA; mol_type = unassigned DNA
aggtcccactctgtgcttccatggagaagggcggccaatgtgattctgggcaaagtgtggtgacttgtggattttcactgtgacgatgttgctacacggtccttcacttggagttagtgcaacaaggagacatctgagcttaaaatttatgaaacatctaaagaaatcaagctttatataggatcaccgttgtgggttgaattgtgtatccccaaaagatgttgaagtcctgaccacctccctataccttacaatatagccttttacggaagtagggtctttgcagaagatcaagttaagatgaaatcatttgattgggccctagttcaatatatcttatgtccttataaaaggagacaatttggacacagggacaaggggagaatgccacataaagattggaattatgctgccataagccaaggaactccaaagatcgctggcaagctgctaaaagctagcacagattcatggaacagagtctccgtcatagcctacaaaaggaatcaaccctgctgacatcttgatttcagacttctagcctccagaactctttaaaaagttgaagtctattggaaaccttcttataagaaaccttcctagtcagagaattcaactttcttcttttcttcattcatgaaaatgcagatccactgagaaagggaataaggcttctctgcagaatgtcaaacaaagatcgacacattgattccagctgttcgtccttcatcaagacggaaccttccagcccagcctccctgacggacagcgtcaaccaccacagccctggtggctcttcagacgccagtgggagctacagttcaaccatgaatggccatcagaacggacttgactcgccacctctctacccttctgctcctatcctgggaggtagtgggcctgtcaggaaactgtatgatgactgctccagcaccattgttgaagatccccagaccaagtgtgaatacatgctcaactcgatgcccaagagactgtgtttagtgtgtggtgacatcgcttctgggtaccactatggggtagcatcatgtgaagcctgcaaggcattcttcaagaggacaattcaaggggtgcgtcttgacagagtacgtggaggtcggcagaagtacaagcgcaggatagatgcggagaacagcccatacctgaaccctcagctggttcagccagccaaaaagccatataacaagattgtctcacatttgttggtggctgaaccggagaagatctatgccatgcctgaccctactgtccccgacagtgacatcaaagccctcactacactgtgtgacttggccgaccgagagttggtggttatcattggatgggcgaagcatattccaggcttctccacgctgtccctggcggaccagatgagccttctgcagagtgcttggatggaaattttgatccttggtgtcgtataccggtctctttcgtttgaggatgaacttgtctatgcagacgattatataatggacgaagaccagtccaaattagcaggccttcttgatctaaataatgctatcctgcagctggtaaagaaatacaagagcatgaagctggaaaaagaagaatttgtcaccctcaaagctatagctcttgctaattcagactccatgcacatagaagatgttgaagccgttcagaagcttcaggatgtcttacatgaagcgctgcaggattatgaagctggccagcacatggaagaccctcgtcgagctggcaagatgctgatgacactgccactcctgaggcagacctctaccaaggccgtgcagcatttctacaacatcaaactagaaggcaaagtcccaatgcacaaactttttttggaaatgttggaggccaaggtctgactaaaagctccctgggccttcccatccttcatgttgaaaaagggaaaataaacccaagagtgatgtcgaagaaacttagagtttagttaacaacatcaaaaatcaacagactgcactgataatttagcagcaagactatgaagcagctttcagattcctccataggttcctgatgagtttctttctactttctccatcatcttctttcctctttcttcccacatttctctttctctttattttttctccttttcttctttcacctcccttatttctttgcttctttcattcctagttcccattctcctttattttcttcccgtctgcctgccttctttcttttctttacctactctcattcctctcttttctcatccttccccttttttctaaatttgaaatagctttagtttaaaaaaaaatcctcccttccccctttcctttccctttctttcctttttccctttccttttccctttcctttcctttcctcttgaccttctttccatctttctttttcttccttctgctgctgaacttttaaaagaggtctctaactgaagagagatggaagccagccctgccaaaggatggagatccataatatggatgccagtgaacttattgtgaaccatactgtccccaatgactaaggaatcaaagagagagaaccaacgttcctaaaagtacagtgcaacatatacaaattgactgagtgcagtattagatttcatgggagcagcctctaattagacaacttaagcaacgttgcatcggctgcttcttatcattgcttttccatctagatcagttacagccatttgattccttaattgttttttcaagtcttccaggtatttgttagtttagctactatgtaactttttcagggaatagtttaagctttattcattcatgcaatactaaagagaaataagaatactgcaattttgtgctggctttgaacaattacgaacaataatgaaggacaaatgaatcctgaaggaagatttttaaaaatgttttgtttcttcttacaaatggagatttttttgtaccagctttaccacttttcagccatttattaatatgggaatttaacttactcaagcaatagttgaagggaaggtgcatattatcacggatgcaatttatgttgtgtgccagtctggtcccaaacatcaatttcttaacatgagctccagtttacctaaatgttcactgacacaaaggatgagattacacctacagtgactctgagtagtcacatatataagcactgcacatgagatatagatccgtagaattgtcaggagtgcacctctctacttgggaggtacaattgccatatgatttctagctgccatggtggttaggaatgtgatactgcctgtttgcaaagtcacagaccttgcctcagaaggagctgtgagccagtattcatttaagaggcaataaggcaaatgccagaattaaaaaaaaaaa

SEQ ID NO: 6775 - DNA, 3015 bp, Homo sapiens
  source 1..3015: mol_type = unassigned DNA; mol_type = unassigned DNA
tgacaatttactggttcatcaatgaaacaatattaaattatgaagatgtaaggaaaaaatcctacgctaacactgtcgcagtttgaaaggtccgtgagagaaaagttaattatgatgttatttcaaactttaaaaagttgaagtctattggaaaccttcttataagaaaccttcctagtcagagaattcaactttcttcttttcttcattcatgaaaatgcagatccactgagaaagggaataaggcttctctgcagaatgtcaaacaaagatcgacacattgattccagctgttcgtccttcatcaagacggaaccttccagcccagcctccctgacggacagcgtcaaccaccacagccctggtggctcttcagacgccagtgggagctacagttcaaccatgaatggccatcagaacggacttgactcgccacctctctacccttctgctcctatcctgggaggtagtgggcctgtcaggaaactgtatgatgactgctccagcaccattgttgaagatccccagaccaagtgtgaatacatgctcaactcgatgcccaagagactgtgtttagtgtgtggtgacatcgcttctgggtaccactatggggtagcatcatgtgaagcctgcaaggcattcttcaagaggacaattcaaggcaatatagaatacagctgccctgccacgaatgaatgtgaaatcacaaagcgcagacgtaaatcctgccaggcttgccgcttcatgaagtgtttaaaagtgggcatgctgaaagaaggggtgcgtcttgacagagtacgtggaggtcggcagaagtacaagcgcaggatagatgcggagaacagcccatacctgaaccctcagctggttcagccagccaaaaagccatataacaagattgtctcacatttgttggtggctgaaccggagaagatctatgccatgcctgaccctactgtccccgacagtgacatcaaagccctcactacactgtgtgacttggccgaccgagagttggtggttatcattggatgggcgaagcatattccaggcttctccacgctgtccctggcggaccagatgagccttctgcagagtgcttggatggaaattttgatccttggtgtcgtataccggtctctttcgtttgaggatgaacttgtctatgcagacgattatataatggacgaagaccagtccaaattagcaggccttcttgatctaaataatgctatcctgcagctggtaaagaaatacaagagcatgaagctggaaaaagaagaatttgtcaccctcaaagctatagctcttgctaattcagactccatgcacatagaagatgttgaagccgttcagaagcttcaggatgtcttacatgaagcgctgcaggattatgaagctggccagcacatggaagaccctcgtcgagctggcaagatgctgatgacactgccactcctgaggcagacctctaccaaggccgtgcagcatttctacaacatcaaactagaaggcaaagtcccaatgcacaaactttttttggaaatgttggaggccaaggtctgactaaaagctccctgggccttcccatccttcatgttgaaaaagggaaaataaacccaagagtgatgtcgaagaaacttagagtttagttaacaacatcaaaaatcaacagactgcactgataatttagcagcaagactatgaagcagctttcagattcctccataggttcctgatgagtttctttctactttctccatcatcttctttcctctttcttcccacatttctctttctctttattttttctccttttcttctttcacctcccttatttctttgcttctttcattcctagttcccattctcctttattttcttcccgtctgcctgccttctttcttttctttacctactctcattcctctcttttctcatccttccccttttttctaaatttgaaatagctttagtttaaaaaaaaatcctcccttccccctttcctttccctttctttcctttttccctttccttttccctttcctttcctttcctcttgaccttctttccatctttctttttcttccttctgctgctgaacttttaaaagaggtctctaactgaagagagatggaagccagccctgccaaaggatggagatccataatatggatgccagtgaacttattgtgaaccatactgtccccaatgactaaggaatcaaagagagagaaccaacgttcctaaaagtacagtgcaacatatacaaattgactgagtgcagtattagatttcatgggagcagcctctaattagacaacttaagcaacgttgcatcggctgcttcttatcattgcttttccatctagatcagttacagccatttgattccttaattgttttttcaagtcttccaggtatttgttagtttagctactatgtaactttttcagggaatagtttaagctttattcattcatgcaatactaaagagaaataagaatactgcaattttgtgctggctttgaacaattacgaacaataatgaaggacaaatgaatcctgaaggaagatttttaaaaatgttttgtttcttcttacaaatggagatttttttgtaccagctttaccacttttcagccatttattaatatgggaatttaacttactcaagcaatagttgaagggaaggtgcatattatcacggatgcaatttatgttgtgtgccagtctggtcccaaacatcaatttcttaacatgagctccagtttacctaaatgttcactgacacaaaggatgagattacacctacagtgactctgagtagtcacatatataagcactgcacatgagatatagatccgtagaattgtcaggagtgcacctctctacttgggaggtacaattgccatatgatttctagctgccatggtggttaggaatgtgatactgcctgtttgcaaagtcacagaccttgcctcagaaggagctgtgagccagtattcatttaag

SEQ ID NO: 6776 - DNA, 2074 bp, Homo sapiens
  source 1..2074: mol_type = unassigned DNA; mol_type = unassigned DNA
attctgggcaaagtgtggtgacttgtggattttcactgtgacgatgttgctacacggtccttcacttggagttagtgcaacaaggagacatctgagcttaaaatttatgaaacatctaaagaaatcaagctttatataggatcaccgttgtgggttgaattgtgtatccccaaaagatgttgaagtcctgaccacctccctataccttacaatatagccttttacggaagtagggtctttgcagaagatcaagttaagatgaaatcatttgattgggccctagttcaatatatcttatgtccttataaaaggagacaatttggacacagggacaaggggagaatgccacataaagattggaattatgctgccataagccaaggaactccaaagatcgctggcaagctgctaaaagctagcacagattcatggaacagagtctccgtcatagcctacaaaaggaatcaaccctgctgacatcttgatttcagacttctagcctccagaactagctgacaatttactggttcatcaatgaaacaatattaaattatgaagatgtaaggaaaaaatcctacgctaacactgtcgcagtttgaaaggcttctctgcagaatgtcaaacaaagatcgacacattgattccagctgttcgtccttcatcaagacggaaccttccagcccagcctccctgacggacagcgtcaaccaccacagccctggtggctcttcagacgccagtgggagctacagttcaaccatgaatggccatcagaacggacttgactcgccacctctctacccttctgctcctatcctgggaggtagtgggcctgtcaggaaactgtatgatgactgctccagcaccattgttgaagatccccagaccaagtgtgaatacatgctcaactcgatgcccaagagactgtgtttagtgtgtggtgacatcgcttctgggtaccactatggggtagcatcatgtgaagcctgcaaggcattcttcaagaggacaattcaaggcaatatagaatacagctgccctgccacgaatgaatgtgaaatcacaaagcgcagacgtaaatcctgccaggcttgccgcttcatgaagtgtttaaaagtgggcatgctgaaagaaggggtgcgtcttgacagagtacgtggaggtcggcagaagtacaagcgcaggatagatgcggagaacagcccatacctgaaccctcagctggttcagccagccaaaaagccatataacaagattgtctcacatttgttggtggctgaaccggagaagatctatgccatgcctgaccctactgtccccgacagtgacatcaaagccctcactacactgtgtgacttggccgaccgagagttggtggttatcattggatgggcgaagcatattccaggcttctccacgctgtccctggcggaccagatgagccttctgcagagtgcttggatggaaattttgatccttggtgtcgtataccggtctctttcgtttgaggatgaacttgtctatgcagacgattatataatggacgaagaccagtccaaattagcaggccttcttgatctaaataatgctatcctgcagctggtaaagaaatacaagagcatgaagctggaaaaagaagaatttgtcaccctcaaagctatagctcttgctaattcagactccatgcacatagaagatgttgaagccgttcagaagcttcaggatgtcttacatgaagcgctgcaggattatgaagctggccagcacatggaagaccctcgtcgagctggcaagatgctgatgacactgccactcctgaggcagacctctaccaaggccgtgcagcatttctacaacatcaaactagaaggcaaagtcccaatgcacaaactttttttggaaatgttggaggccaaggtctgactaaaagctccctgggccttcccatccttcatgttgaaaaagggaaaataaacccaagagtgatgtcgaagaaacttagagtttagttaacaacatcaaaaatcaacagactgcactgataatttagcagcaagactatgaagcagctttc

SEQ ID NO: 6777 - DNA, 1464 bp, Homo sapiens
  source 1..1464: mol_type = unassigned DNA; mol_type = unassigned DNA
ctggggtgcacaaataatggttgccggtcgcacatggattcggtagaactttgccttcctgaatctttttccctgcactacgaggaagagtagacttgaatgagacctgcctcatcagtcatgggatcatagtgtcacagatggaaaagcaactatcagctgaattgtactgaactacacacttggctaattcatcttattgctctacacatctaaaggaaggctcattctgttcttggagtctagacagcatcaggagttgggctcagtgaacaaaactttaatgtctagagcatttatgagggttttaatgattggaaaatctatcctgagaatgtggtcaccatatgtgacagccttgctttctatcttgtcttcagtttctggggcttctctgcagaatgtcaaacaaagatcgacacattgattccagctgttcgtccttcatcaagacggaaccttccagcccagcctccctgacggacagcgtcaaccaccacagccctggtggctcttcagacgccagtgggagctacagttcaaccatgaatggccatcagaacggacttgactcgccacctctctacccttctgctcctatcctgggaggtagtgggcctgtcaggaaactgtatgatgactgctccagcaccattgttgaagatccccagaccaagtgtgaatacatgctcaactcgatgcccaagagactgtgtttagtgtgtggtgacatcgcttctgggtaccactatggggtagcatcatgtgaagcctgcaaggcattcttcaagaggacaattcaaggcaatatagaatacagctgccctgccacgaatgaatgtgaaatcacaaagcgcagacgtaaatcctgccaggcttgccgcttcatgaagtgtttaaaagtgggcatgctgaaagaaggggtgcgtcttgacagagtacgtggaggtcggcagaagtacaagcgcaggatagatgcggagaacagcccatacctgaaccctcagctggttcagccagccaaaaagccatataacaagattgtctcacatttgttggtggctgaaccggagaagatctatgccatgcctgaccctactgtccccgacagtgacatcaaagccctcactacactgtgtgacttggccgaccgagagttggtggttatcattggatgggcgaagcatattccaggcttctccacgctgtccctggcggaccagatgagccttctgcagagtgcttggatggaaattttgatccttggtgtcgtataccggtctctttcgtttgaggatgaacttgtctatgcagacgattatataatggacgaagaccagtccaaattagcaggccttcttgatctaaataatgctatcctgcagctggtaaagaaatacaagagcatgaagctggaaaaagaagaatttgtcaccctcaaagctatagctcttgctaattcag

SEQ ID NO: 6778 - DNA, 569 bp, Homo sapiens
  source 1..569: mol_type = unassigned DNA; mol_type = unassigned DNA
tcttcacacaggaagtttccttctctgttgtcagatttagcactgtgctcttgtcatcagatccgagccaggctccctgctgcacagtagagaggcttccttaagacatttgtccttgaaactgcaccaaactcttggaagaacccagaacgtagctgacaatttactggttcatcaatgaaacaatattaaattatgaagatgtaaggaaaaaatcctacgctaacactgtcgcagtttgaaagaactgatgtaaagttcccatcatgaatgtaattaggaattgtgcatttagatcctgaatgtggcgagaatgtgattggggtcttggagcagtcaagtctgatctggcctgtgttccttcagctaaaaggagagaacccctggcgagagaggagacaggtctgctgatgaatgcaaacagaaggagcagcatctgtgcatagaggaacgaagcagggtgcgtcttgacagagtacgtggaggtcggcagaagtacaagcgcaggatagatgcggagaacagcccatacctgaaccctcagctggttcagccagccaaaaagccat

SEQ ID NO: 6779 - DNA, 583 bp, Homo sapiens
  source 1..583: mol_type = unassigned DNA; mol_type = unassigned DNA
aactggctgtgcctataggcttgtcactaggagaacatttgtgttaattgcactgtgctctgtcaaggaaactttgatttatagctggggtgcacaaataatggttgccggtcgcacatggattcggtagaactttgccttcctgaatctttttccctgcactacgaggaagatgaacaaaactttaatgtctagagcatttatgagggttttaatgattggaaaatctatcctgagaatgtggtcaccatatgtgacagccttgctttctatcttgtcttcagtttctggggcttctctgcagaatgtcaaacaaagatcgacacattgattccagctgttcgtccttcatcaagacggaaccttccagcccagcctccctgacggacagcgtcaaccaccacagccctggtggctcttcagacgccagtgggagctacagttcaaccatgaatggccatcagaacggacttgactcgccacctctctacccttctgctcctatcctgggaggtagtgggcctgtcaggaaactgtatgatgactgctccagcaccattgttgaagatccccagaccaagtg

SEQ ID NO: 6780 - DNA, 565 bp, Homo sapiens
  source 1..565: mol_type = unassigned DNA; mol_type = unassigned DNA
agtccttgattaggagagtgtgagagctttggtcccaactggctgtgcctataggcttgtcactaggagaacatttgtgttaattgcactgtgctctgtcaaggaaactttgatttatagctggggtgcacaaataatggttgccggtcgcacatggattcggtagaactttgccttcctgaatctttttccctgcactacgaggaagaacttgaatgagacctgcctcatcagtcatgggatcatagtgtcacagatggaaaagcaactatcagctgaattgtactgaactacacacttggctaattcatcttattgctctacacatctaaaggaaggctcattctgttcttggagtctagacagcatcaggagttgggctcaggcttctctgcagaatgtcaaacaaagatcgacacattgattccagctgttcgtccttcatcaagacggaaccttccagcccagcctccctgacggacagcgtcaaccaccacagccctggtggctcttcagacgccagtgggagctacagttcaaccatgaatggccatcagaacggact

SEQ ID NO: 6781 - DNA, 584 bp, Homo sapiens
  source 1..584: mol_type = unassigned DNA; mol_type = unassigned DNA
tttggtcccaactggctgtgcctataggcttgtcactaggagaacatttgtgttaattgcactgtgctctgtcaaggaaactttgatttatagctggggtgcacaaataatggttgccggtcgcacatggattcggtagaactttgccttcctgaatctttttccctgcactacgaggaagactggacaacacctgataccaacaatataatgtcacctctgctatagatcacccaagaccagctgcatttacatccagatgttaactactgcagactaagctattaagagtttaacaaatacaagcactggctgagcttcagaccttccatcgaaatgcagaccactttgaacatcagcacgtgcatgtgggaattcaaactcctgacggttcattcacgatcacacatttacctggatgcttctctgcagaatgtcaaacaaagatcgacacattgattccagctgttcgtccttcatcaagacggaaccttccagcccagcctccctgacggacagcgtcaaccaccacagccctggtggctcttcagacgccagtgggagctacagttcaaccatgaatg

SEQ ID NO: 6782 - DNA, 548 bp, Homo sapiens
  source 1..548: mol_type = unassigned DNA; mol_type = unassigned DNA
gagctttggtcccaactggctgtgcctataggcttgtcactaggagaacatttgtgttaattgcactgtgctctgtcaaggaaactttgatttatagctggggtgcacaaataatggttgccggtcgcacatggattcggtagaactttgccttcctgaatctttttccctgcactacgaggaagaacttgaatgagacctgcctcatcagtcatgggatcatagtgtcacagatggaaaagcaactatcagctgaattgtactgaactacacacttggctaattcatcttattgctctacacatctaaaggaaggctcattctgttcttggagtctagacagcatcaggagttgggctcagtgaacaaaactttaatgtctagagcatttatgagggttttaatgattggaaaatctatcctgagaatgtggtcaccatatgtgacagccttgctttctatcttgtcttcagtttctgggaactgatgtaaagttcccatcatgaatgtaattaggaattgtgcatttagatcctgaatgtggcgag

SEQ ID NO: 6783 - DNA, 519 bp, Homo sapiens
  source 1..519: mol_type = unassigned DNA; mol_type = unassigned DNA
acacaaccagggagcaaatcaaccagcacatttaaagcagcctttttaaccctgagactttccaagatctcctcttcacacaggaagtttccttctctgttgtcagatttagcactgtgctcttgtcatcagatccgagccaggctccctgctgcacagtagagaggcttccttaagacatttgtccttgaaactgcaccaaactcttggaagaacccagaacgtagctgacaatttactggttcatcaatgaaacaatattaaattatgaagatgtaaggaaaaaatcctacgctaacactgtcgcagtttgaaagctttaaaaagttgaagtctattggaaaccttcttataagaaaccttcctagtcagagaattcaactttcttcttttcttcattcatgaaaatgcagatccactgagaaagggaataagggtgaaaatatatatgggaaaaattcttccaaaatggagcctgacattgacccctagagcttaaagcctaaccggacagactct

SEQ ID NO: 6784 - DNA, 3171 bp, Homo sapiens
  source 1..3171: mol_type = unassigned DNA; mol_type = unassigned DNA
gtgtgtaagatgtgcaatgttcctgcatgggggttttgtagactttcatagccaaagaaaccggcttcggcttctttaaaatccccgacgactcacctgattaacctgctgcagttctgaccctgccaagagctgacaatttactggttcatcaatgaaacaatattaaattatgaagatgtaaggaaaaaatcctacgctaacactgtcgcagtttgaaagctttaaaaagttgaagtctattggaaaccttcttataagaaaccttcctagtcagagaattcaactttcttcttttcttcattcatgaaaatgcagatccactgagaaagggaataaggtaaaagtatcattttcctttgggaatcaggtttttctgtcagaggaataaaggcctttctttccaggtcaattcctgttgtgctgaaggctgggaatcatcacgcccttttggtgtgggccccagctttgagcctctgtgatgatggtagaatctggaagtcagaagcccatatcctagatcagctgctttgctgggctgaccttcagtgtgatcctgcatcccaaactcctgacctctccagagaacttggggtgttctcccaagatgctgggcctctgggaagcatctccttaggtgaacagccccagatgcctccttcttaagttggtctgttactccacgctgactatcaacccccaagtgtgaaagatcacgtttattcctgagggaaacacggagttgttcctaactctactttgccttcttagaacacgtttgcttctggttgaaatgaaaattttcagtaaagtgttttggttttttttttctgtattatttttgtttttttatttccttaaacctctgttttgggtgaagcactacagcagaagtctagtgtcatacaaaagtacaactggaatctttgaatgtaaccctcatccaatagcagacatttaaaaaatcactcttataaatgttttaaatgtgttccaaacagcattgacctcctcaataggtaattttgttaaaggactgggctttggctgtttttttttttttttttctgacttgttgatttagagaccagctgcctcctaggaaattgtgatcaaaagctataaaagcagaccataactatgtcaaatgcatgagtaggaattgggaaacttgatttgtcctgtgattcaatctgggttaaagattggtgccacttgaaattactatccttagggaagtcattaacaaccccccaaatgtttgtatgtgcctgtatgcaagtgtatgttgtatatttacaatttcatcccatgttctgtctctccaattttatgattctagctttggtgacctctgactcctccttctctattcctaacactgtgtaacttagagaggatcagggaagctaggatgtcccaaatgcaatttcattaaattaaagagaaatacactaagaagtagaaaaaatgtgatgagtgtgataaaatgatttagtgcaagatggcggatgcagtagagacaaggagcacagagtaggagcttcctgtgcagcagggtgagcagaagtatgcccaggaaagttctgcaaataggtactgtctatcccaggcttaaaaggcaaattagaattagccagatgaaagtgagcaggtaggacaaaaagtgttgcagagggaatagcaaagaacaaagcccatgactcctgagaaagaaaaactatttttatttattttaaacctacaataataactatttctcaaaagggtataggagaagaataattgaaaatatggcagaaagtggaaataaaaggtttgactaattggactatacccttgccctattcttaacttattcactggtttgatatttaattgctctctaagaggatattgactgtctctatgccagtgaattctgcaactaggtagtatgagatctacttgaaaactgtggaattttcagtaggaacatagaaaaattttgaaggaaagaaattctgagaataaaataaaattttattcacttgaattctatttcattgtgagcttaaggaaaaaataaagcttttcaaaaaatgctataatttctctattttctaaattggccctttattctacattgtcctattctcatatatatcagtgattctaaaagtgtggtcctgggaccagcaccatcagcattcacagagagcctgttagaaatgcagatccttaagctccatcccaggcctactgaatcagaaactctgggcatcggacccaacaatctatgcttttacactccctccaggcaattctgatgggtatcaaagtttaagaatcactggtctctactttttttcatgtattttgtacaaaacagtttatattatcttcttattcattacattaattttgtacatatattttctttcaataattaacttttaaattccttatggacaataatcttatctttgtttgtaccagctctatgagttataactgaaatataataaactgcacattacagtatataattggatccattttgacgtacatatacatccatgaaaccaataccttaatcaacgtaataaacggggatctcaccccaaaagttttcttttgctaccttataatccttttctctgacccctttactgacctacttcccccatctcaaggctaatcacttatctgctttttgcctctatggataagtctgcattttgtagactttcatgtaagtggaatcctacagtatatattcttttttatctggtttgtctcaatcagtataattattttaacatatatccatgttgttgaatcagtagttagttcctttttattactgaggtaccatcaaattgtataagctacgatgtgtttattaagttactgtcagtggatttttgtgttattttagcctgggcttttgggggggtcacgaggtcatgagctcgagaccagcctggccaacatggtgaaaccccatctctactaaaaatacaaaaattagctgggcatggtggcacgcacctgtaatcccagctactcaggaggctgaggtaggagaatcacttgaacccaagagacggaggttgcagtgagccaagatcacgccaccgtactccagccagggcaacagagcaagattctgtctaaaaaaaaaaaaaa

SEQ ID NO: 6785 - DNA, 327 bp, Homo sapiens
  source 1..327: mol_type = unassigned DNA; mol_type = unassigned DNA
acacaccgggaatgcaactgagagatgcaagtcagcaagtgcgagccgcgaacatgagtgtctggccctgggtggatgctcctcgctgtcttggtgccgattctctgcctgggcccgagctgacaatttactggttcatcaatgaaacaatattaaattatgaagatgtaaggaaaaaatcctacgctaacactgtcgcagtttgaaagctttaaaaagttgaagtctattggaaaccttcttataagaaaccttcctagtcagagaattcaactttcttcttttcttcattcatgaaaatgcagatccactgagaaagggaataag

SEQ ID NO: 6786 - DNA, 321 bp, Homo sapiens
  source 1..321: mol_type = unassigned DNA; mol_type = unassigned DNA
tgcatgggggttttgtagactttcatagccaaagaaaccggcttcggcttctttaaaatccccgacgactcacctgattaacctgctgcagttctgaccctgccaagatgccatctaccttggcagccaacccatatccaacctcagtcttctggatcaaatctaagagctgacaatttactggttcatcaatgaaacaatattaaattatgaagatgtaaggaaaaaatcctacgctaacactgtcgcagtttgaaagctttaaaaagttgaagtctattggaaaccttcttataagaaaccttcctagtcagagaattc

SEQ ID NO: 6787 - DNA, 5194 bp, Homo sapiens
  source 1..5194: mol_type = unassigned DNA; mol_type = unassigned DNA
atagacttgaatgagacctgcctcatcagtcatgggatcatagtgtcacagatggaaaagcaactatcagctgaattgtactgaactacacacttggctaattcatcttattgctctacacatctaaaggaaggctcattctgttcttggagtctagacagcatcaggagttgggctcaggcttctctgcagaatgtcaaacaaagatcgacacattgattccagctgttcgtccttcatcaagacggaaccttccagcccagcctccctgacggacagcgtcaaccaccacagccctggtggctcttcagacgccagtgggagctacagttcaaccatgaatggccatcagaacggacttgactcgccacctctctacccttctgctcctatcctgggaggtagtgggcctgtcaggaaactgtatgatgactgctccagcaccattgttgaagatccccagaccaagtgtgaatacatgctcaactcgatgcccaagagactgtgtttagtgtgtggtgacatcgcttctgggtaccactatggggtagcatcatgtgaagcctgcaaggcattcttcaagaggacaattcaaggcaatatagaatacagctgccctgccacgaatgaatgtgaaatcacaaagcgcagacgtaaatcctgccaggcttgccgcttcatgaagtgtttaaaagtgggcatgctgaaagaaggggtgcgtcttgacagagtacgtggaggtcggcagaagtacaagcgcaggatagatgcggagaacagcccatacctgaaccctcagctggttcagccagccaaaaagccatataacaagattgtctcacatttgttggtggctgaaccggagaagatctatgccatgcctgaccctactgtccccgacagtgacatcaaagccctcactacactgtgtgacttggccgaccgagagttggtggttatcattggatgggcgaagcatattccaggcttctccacgctgtccctggcggaccagatgagccttctgcagagtgcttggatggaaattttgatccttggtgtcgtataccggtctctttcgtttgaggatgaacttgtctatgcagacgattatataatggacgaagaccagtccaaattagcaggccttcttgatctaaataatgctatcctgcagctggtaaagaaatacaagagcatgaagctggaaaaagaagaatttgtcaccctcaaagctatagctcttgctaattcagactccatgcacatagaagatgttgaagccgttcagaagcttcaggatgtcttacatgaagcgctgcaggattatgaagctggccagcacatggaagaccctcgtcgagctggcaagatgctgatgacactgccactcctgaggcagacctctaccaaggccgtgcagcatttctacaacatcaaactagaaggcaaagtcccaatgcacaaactttttttggaaatgttggaggccaaggtctgactaaaagctccctgggccttcccatccttcatgttgaaaaagggaaaataaacccaagagtgatgtcgaagaaacttagagtttagttaacaacatcaaaaatcaacagactgcactgataatttagcagcaagactatgaagcagctttcagattcctccataggttcctgatgagtttctttctactttctccatcatcttctttcctctttcttcccacatttctctttctctttattttttctccttttcttctttcacctcccttatttctttgcttctttcattcctagttcccattctcctttattttcttcccgtctgcctgccttctttcttttctttacctactctcattcctctcttttctcatccttccccttttttctaaatttgaaatagctttagtttaaaaaaaaatcctcccttccccctttcctttccctttctttcctttttccctttccttttccctttcctttcctttcctcttgaccttctttccatctttctttttcttccttctgctgctgaacttttaaaagaggtctctaactgaagagagatggaagccagccctgccaaaggatggagatccataatatggatgccagtgaacttattgtgaaccatactgtccccaatgactaaggaatcaaagagagagaaccaacgttcctaaaagtacagtgcaacatatacaaattgactgagtgcagtattagatttcatgggagcagcctctaattagacaacttaagcaacgttgcatcggctgcttcttatcattgcttttccatctagatcagttacagccatttgattccttaattgttttttcaagtcttccaggtatttgttagtttagctactatgtaactttttcagggaatagtttaagctttattcattcatgcaatactaaagagaaataagaatactgcaattttgtgctggctttgaacaattacgaacaataatgaaggacaaatgaatcctgaaggaagatttttaaaaatgttttgtttcttcttacaaatggagatttttttgtaccagctttaccacttttcagccatttattaatatgggaatttaacttactcaagcaatagttgaagggaaggtgcatattatcacggatgcaatttatgttgtgtgccagtctggtcccaaacatcaatttcttaacatgagctccagtttacctaaatgttcactgacacaaaggatgagattacacctacagtgactctgagtagtcacatatataagcactgcacatgagatatagatccgtagaattgtcaggagtgcacctctctacttgggaggtacaattgccatatgatttctagctgccatggtggttaggaatgtgatactgcctgtttgcaaagtcacagaccttgcctcagaaggagctgtgagccagtattcatttaagaggcaataaggcaaatgccagaattaaaaaaaaaaatcatcaaagacagaaaatgcctgaccaaattctaaaacctaatccatataagtttattcatttaggaatgttcgtttaaattaatctgcagtttttaccaagagctaagccaatatatgtgcttttcaaccagtattgtcacagcatgaaagtcaagtcaggttccagactgttaagaggtgtaatctaatgaagaaatcaattagatgccccgaaatctacagtcgctgaataaccaataaacagtaacctccatcaaatgctataccaatggaccagtgttagtagctgctccctgtattatgtgaacagtcttattctatgtacacagatgtaattaaaattgtaatcctaacaaacaaaagaaatgtagttcagcttttcaatgtttcatgtttgctgtgcttttctgaattttatgttgcattcaaagactgttgtcttgttcttgtggtgtttggattcttgtggtgtgtgcttttagacacagggtagaattagagacaatattggatgtacaattcctcaggagactacagtagtatattctattccttaccagtaataaggttcttcctaataataattaagagattgaaactccaaacaagtattcattatgaacagatacacatcaaaatcataataatattttcaaaacaaggaataatttctctaatggtttattatagaataccaatgtatagcttagaaataaaactttgaatatttcaagaatatagataagtctaatttttaaatgctgtatatatggctttcactcaatcatctctcagatgttgttattaactcgctctgtgttgttgcaaaactttttggtgcagattcgtttccaaaactattgctactttgtgtgctttaaacaaaataccttgggttgatgaaacatcaacccagtgctaggaatactgtgtatctatcattagctatatgggactatattgtagattgtggtttctcagtagagaagtgactgtagtgtgattctagataaatcatcattagcaattcattcagatggtcaataacttgaaatttatagctgtgataggagttcagaaattggcacatccctttaaaaataacaacagaaaatacaactcctgggaaaaaaggtgctgattctataagattatttatatatgtaagtgtttaaaaagattattttccagaaagtttgtgcagggtttaagttgctactattcaactacactatatataaataaaatatatacaatatatacattgttttcactgtatcacattaaagtacttgggcttcagaagtaagagccaaccaactgaaaacctgagatggagatatgttcaaagaatgagatacaattttttagttttcagtttaagtaactctcagcattacaaaagagtaagtatctcacaaataggaaataaaactaaaacgtggatttaaaaagaactgcacgggctttagggtaaatgctcatcttaaacctcactagagggaagtcttctcaagtttcaagcaagaccatttacttaatgtgaagttttggaaagttataaaggtgtatgttttagccatatgattttaattttaattttgcttcttttaggttcgttcttatttaaagcaatatgattgtgtgactccttgtagttacacttgtgtttcaatcagatcagattgttgtatttattccactattttgcatttaaatgataacataaaagatataaaaaatttaaaactgctatttttcttatagaagagaaaatgggtgttggtgattgtattttaattatttaagcgtctctgtttacctgcctaggaaaacattttatggcagtcttatgtgcaaagatcgtaaaaggacaaaaaatttaaactgcttataataatccaggagttgcattatagccagtagtaaaaataataataataataataaaaccatgtctatagctgtagatgggcttcacatctgtaaagcaatcaattgtatatttttgtgatgtgtaccatactgtgtgctccagcaaatgtccatttgtgtaaatgtatttattttatattgtatatattgttaaatgcaaaaaggagatatgattctgtaactccaatcagttcagatgtgtaactcaaattattatgcctttcaggatgatggtagagcaatattaaacaagcttccacttttgactgct

SEQ ID NO: 6788 - DNA, 5542 bp, Homo sapiens
  source 1..5542: mol_type = unassigned DNA; mol_type = unassigned DNA
aagctccaatcggggctttaagtccttgattaggagagtgtgagagctttggtcccaactggctgtgcctataggcttgtcactaggagaacatttgtgttaattgcactgtgctctgtcaaggaaactttgatttatagctggggtgcacaaataatggttgccggtcgcacatggattcggtagaactttgccttcctgaatctttttccctgcactacgaggaagagtagacttgaatgagacctgcctcatcagtcatgggatcatagtgtcacagatggaaaagcaactatcagctgaattgtactgaactacacacttggctaattcatcttattgctctacacatctaaaggaaggctcattctgttcttggagtctagacagcatcaggagttgggctcagtgaacaaaactttaatgtctagagcatttatgagggttttaatgattggaaaatctatcctgagaatgtggtcaccatatgtgacagccttgctttctatcttgtcttcagtttctggggcttctctgcagaatgtcaaacaaagatcgacacattgattccagctgttcgtccttcatcaagacggaaccttccagcccagcctccctgacggacagcgtcaaccaccacagccctggtggctcttcagacgccagtgggagctacagttcaaccatgaatggccatcagaacggacttgactcgccacctctctacccttctgctcctatcctgggaggtagtgggcctgtcaggaaactgtatgatgactgctccagcaccattgttgaagatccccagaccaagtgtgaatacatgctcaactcgatgcccaagagactgtgtttagtgtgtggtgacatcgcttctgggtaccactatggggtagcatcatgtgaagcctgcaaggcattcttcaagaggacaattcaaggcaatatagaatacagctgccctgccacgaatgaatgtgaaatcacaaagcgcagacgtaaatcctgccaggcttgccgcttcatgaagtgtttaaaagtgggcatgctgaaagaaggggtgcgtcttgacagagtacgtggaggtcggcagaagtacaagcgcaggatagatgcggagaacagcccatacctgaaccctcagctggttcagccagccaaaaagccatataacaagattgtctcacatttgttggtggctgaaccggagaagatctatgccatgcctgaccctactgtccccgacagtgacatcaaagccctcactacactgtgtgacttggccgaccgagagttggtggttatcattggatgggcgaagcatattccaggcttctccacgctgtccctggcggaccagatgagccttctgcagagtgcttggatggaaattttgatccttggtgtcgtataccggtctctttcgtttgaggatgaacttgtctatgcagacgattatataatggacgaagaccagtccaaattagcaggccttcttgatctaaataatgctatcctgcagctggtaaagaaatacaagagcatgaagctggaaaaagaagaatttgtcaccctcaaagctatagctcttgctaattcagactccatgcacatagaagatgttgaagccgttcagaagcttcaggatgtcttacatgaagcgctgcaggattatgaagctggccagcacatggaagaccctcgtcgagctggcaagatgctgatgacactgccactcctgaggcagacctctaccaaggccgtgcagcatttctacaacatcaaactagaaggcaaagtcccaatgcacaaactttttttggaaatgttggaggccaaggtctgactaaaagctccctgggccttcccatccttcatgttgaaaaagggaaaataaacccaagagtgatgtcgaagaaacttagagtttagttaacaacatcaaaaatcaacagactgcactgataatttagcagcaagactatgaagcagctttcagattcctccataggttcctgatgagtttctttctactttctccatcatcttctttcctctttcttcccacatttctctttctctttattttttctccttttcttctttcacctcccttatttctttgcttctttcattcctagttcccattctcctttattttcttcccgtctgcctgccttctttcttttctttacctactctcattcctctcttttctcatccttccccttttttctaaatttgaaatagctttagtttaaaaaaaaatcctcccttccccctttcctttccctttctttcctttttccctttccttttccctttcctttcctttcctcttgaccttctttccatctttctttttcttccttctgctgctgaacttttaaaagaggtctctaactgaagagagatggaagccagccctgccaaaggatggagatccataatatggatgccagtgaacttattgtgaaccatactgtccccaatgactaaggaatcaaagagagagaaccaacgttcctaaaagtacagtgcaacatatacaaattgactgagtgcagtattagatttcatgggagcagcctctaattagacaacttaagcaacgttgcatcggctgcttcttatcattgcttttccatctagatcagttacagccatttgattccttaattgttttttcaagtcttccaggtatttgttagtttagctactatgtaactttttcagggaatagtttaagctttattcattcatgcaatactaaagagaaataagaatactgcaattttgtgctggctttgaacaattacgaacaataatgaaggacaaatgaatcctgaaggaagatttttaaaaatgttttgtttcttcttacaaatggagatttttttgtaccagctttaccacttttcagccatttattaatatgggaatttaacttactcaagcaatagttgaagggaaggtgcatattatcacggatgcaatttatgttgtgtgccagtctggtcccaaacatcaatttcttaacatgagctccagtttacctaaatgttcactgacacaaaggatgagattacacctacagtgactctgagtagtcacatatataagcactgcacatgagatatagatccgtagaattgtcaggagtgcacctctctacttgggaggtacaattgccatatgatttctagctgccatggtggttaggaatgtgatactgcctgtttgcaaagtcacagaccttgcctcagaaggagctgtgagccagtattcatttaagaggcaataaggcaaatgccagaattaaaaaaaaaaatcatcaaagacagaaaatgcctgaccaaattctaaaacctaatccatataagtttattcatttaggaatgttcgtttaaattaatctgcagtttttaccaagagctaagccaatatatgtgcttttcaaccagtattgtcacagcatgaaagtcaagtcaggttccagactgttaagaggtgtaatctaatgaagaaatcaattagatgccccgaaatctacagtcgctgaataaccaataaacagtaacctccatcaaatgctataccaatggaccagtgttagtagctgctccctgtattatgtgaacagtcttattctatgtacacagatgtaattaaaattgtaatcctaacaaacaaaagaaatgtagttcagcttttcaatgtttcatgtttgctgtgcttttctgaattttatgttgcattcaaagactgttgtcttgttcttgtggtgtttggattcttgtggtgtgtgcttttagacacagggtagaattagagacaatattggatgtacaattcctcaggagactacagtagtatattctattccttaccagtaataaggttcttcctaataataattaagagattgaaactccaaacaagtattcattatgaacagatacacatcaaaatcataataatattttcaaaacaaggaataatttctctaatggtttattatagaataccaatgtatagcttagaaataaaactttgaatatttcaagaatatagataagtctaatttttaaatgctgtatatatggctttcactcaatcatctctcagatgttgttattaactcgctctgtgttgttgcaaaactttttggtgcagattcgtttccaaaactattgctactttgtgtgctttaaacaaaataccttgggttgatgaaacatcaacccagtgctaggaatactgtgtatctatcattagctatatgggactatattgtagattgtggtttctcagtagagaagtgactgtagtgtgattctagataaatcatcattagcaattcattcagatggtcaataacttgaaatttatagctgtgataggagttcagaaattggcacatccctttaaaaataacaacagaaaatacaactcctgggaaaaaaggtgctgattctataagattatttatatatgtaagtgtttaaaaagattattttccagaaagtttgtgcagggtttaagttgctactattcaactacactatatataaataaaatatatacaatatatacattgttttcactgtatcacattaaagtacttgggcttcagaagtaagagccaaccaactgaaaacctgagatggagatatgttcaaagaatgagatacaattttttagttttcagtttaagtaactctcagcattacaaaagagtaagtatctcacaaataggaaataaaactaaaacgtggatttaaaaagaactgcacgggctttagggtaaatgctcatcttaaacctcactagagggaagtcttctcaagtttcaagcaagaccatttacttaatgtgaagttttggaaagttataaaggtgtatgttttagccatatgattttaattttaattttgcttcttttaggttcgttcttatttaaagcaatatgattgtgtgactccttgtagttacacttgtgtttcaatcagatcagattgttgtatttattccactattttgcatttaaatgataacataaaagatataaaaaatttaaaactgctatttttcttatagaagagaaaatgggtgttggtgattgtattttaattatttaagcgtctctgtttacctgcctaggaaaacattttatggcagtcttatgtgcaaagatcgtaaaaggacaaaaaatttaaactgcttataataatccaggagttgcattatagccagtagtaaaaataataataataataataaaaccatgtctatagctgtagatgggcttcacatctgtaaagcaatcaattgtatatttttgtgatgtgtaccatactgtgtgctccagcaaatgtccatttgtgtaaatgtatttattttatattgtatatattgttaaatgcaaaaaggagatatgattctgtaactccaatcagttcagatgtgtaactcaaattattatgcctttcaggatgatggtagagcaatattaaacaagcttccacttttgactgct

SEQ ID NO: 6789 - DNA, 5363 bp, Homo sapiens
  source 1..5363: mol_type = unassigned DNA; mol_type = unassigned DNA
aaaggaggcgtgtgtaagatgtgcaatgttcctgcatgggggttttgtagactttcatagccaaagaaaccggcttcggcttctttaaaatccccgacgactcacctgattaacctgctgcagttctgaccctgccaagagctgacaatttactggttcatcaatgaaacaatattaaattatgaagatgtaaggaaaaaatcctacgctaacactgtcgcagtttgaaagctttaaaaagttgaagtctattggaaaccttcttataagaaaccttcctagtcagagaattcaactttcttcttttcttcattcatgaaaatgcagatccactgagaaagggaataaggcttctctgcagaatgtcaaacaaagatcgacacattgattccagctgttcgtccttcatcaagacggaaccttccagcccagcctccctgacggacagcgtcaaccaccacagccctggtggctcttcagacgccagtgggagctacagttcaaccatgaatggccatcagaacggacttgactcgccacctctctacccttctgctcctatcctgggaggtagtgggcctgtcaggaaactgtatgatgactgctccagcaccattgttgaagatccccagaccaagtgtgaatacatgctcaactcgatgcccaagagactgtgtttagtgtgtggtgacatcgcttctgggtaccactatggggtagcatcatgtgaagcctgcaaggcattcttcaagaggacaattcaaggcaatatagaatacagctgccctgccacgaatgaatgtgaaatcacaaagcgcagacgtaaatcctgccaggcttgccgcttcatgaagtgtttaaaagtgggcatgctgaaagaaggggtgcgtcttgacagagtacgtggaggtcggcagaagtacaagcgcaggatagatgcggagaacagcccatacctgaaccctcagctggttcagccagccaaaaagccatataacaagattgtctcacatttgttggtggctgaaccggagaagatctatgccatgcctgaccctactgtccccgacagtgacatcaaagccctcactacactgtgtgacttggccgaccgagagttggtggttatcattggatgggcgaagcatattccaggcttctccacgctgtccctggcggaccagatgagccttctgcagagtgcttggatggaaattttgatccttggtgtcgtataccggtctctttcgtttgaggatgaacttgtctatgcagacgattatataatggacgaagaccagtccaaattagcaggccttcttgatctaaataatgctatcctgcagctggtaaagaaatacaagagcatgaagctggaaaaagaagaatttgtcaccctcaaagctatagctcttgctaattcagactccatgcacatagaagatgttgaagccgttcagaagcttcaggatgtcttacatgaagcgctgcaggattatgaagctggccagcacatggaagaccctcgtcgagctggcaagatgctgatgacactgccactcctgaggcagacctctaccaaggccgtgcagcatttctacaacatcaaactagaaggcaaagtcccaatgcacaaactttttttggaaatgttggaggccaaggtctgactaaaagctccctgggccttcccatccttcatgttgaaaaagggaaaataaacccaagagtgatgtcgaagaaacttagagtttagttaacaacatcaaaaatcaacagactgcactgataatttagcagcaagactatgaagcagctttcagattcctccataggttcctgatgagtttctttctactttctccatcatcttctttcctctttcttcccacatttctctttctctttattttttctccttttcttctttcacctcccttatttctttgcttctttcattcctagttcccattctcctttattttcttcccgtctgcctgccttctttcttttctttacctactctcattcctctcttttctcatccttccccttttttctaaatttgaaatagctttagtttaaaaaaaaatcctcccttccccctttcctttccctttctttcctttttccctttccttttccctttcctttcctttcctcttgaccttctttccatctttctttttcttccttctgctgctgaacttttaaaagaggtctctaactgaagagagatggaagccagccctgccaaaggatggagatccataatatggatgccagtgaacttattgtgaaccatactgtccccaatgactaaggaatcaaagagagagaaccaacgttcctaaaagtacagtgcaacatatacaaattgactgagtgcagtattagatttcatgggagcagcctctaattagacaacttaagcaacgttgcatcggctgcttcttatcattgcttttccatctagatcagttacagccatttgattccttaattgttttttcaagtcttccaggtatttgttagtttagctactatgtaactttttcagggaatagtttaagctttattcattcatgcaatactaaagagaaataagaatactgcaattttgtgctggctttgaacaattacgaacaataatgaaggacaaatgaatcctgaaggaagatttttaaaaatgttttgtttcttcttacaaatggagatttttttgtaccagctttaccacttttcagccatttattaatatgggaatttaacttactcaagcaatagttgaagggaaggtgcatattatcacggatgcaatttatgttgtgtgccagtctggtcccaaacatcaatttcttaacatgagctccagtttacctaaatgttcactgacacaaaggatgagattacacctacagtgactctgagtagtcacatatataagcactgcacatgagatatagatccgtagaattgtcaggagtgcacctctctacttgggaggtacaattgccatatgatttctagctgccatggtggttaggaatgtgatactgcctgtttgcaaagtcacagaccttgcctcagaaggagctgtgagccagtattcatttaagaggcaataaggcaaatgccagaattaaaaaaaaaaatcatcaaagacagaaaatgcctgaccaaattctaaaacctaatccatataagtttattcatttaggaatgttcgtttaaattaatctgcagtttttaccaagagctaagccaatatatgtgcttttcaaccagtattgtcacagcatgaaagtcaagtcaggttccagactgttaagaggtgtaatctaatgaagaaatcaattagatgccccgaaatctacagtcgctgaataaccaataaacagtaacctccatcaaatgctataccaatggaccagtgttagtagctgctccctgtattatgtgaacagtcttattctatgtacacagatgtaattaaaattgtaatcctaacaaacaaaagaaatgtagttcagcttttcaatgtttcatgtttgctgtgcttttctgaattttatgttgcattcaaagactgttgtcttgttcttgtggtgtttggattcttgtggtgtgtgcttttagacacagggtagaattagagacaatattggatgtacaattcctcaggagactacagtagtatattctattccttaccagtaataaggttcttcctaataataattaagagattgaaactccaaacaagtattcattatgaacagatacacatcaaaatcataataatattttcaaaacaaggaataatttctctaatggtttattatagaataccaatgtatagcttagaaataaaactttgaatatttcaagaatatagataagtctaatttttaaatgctgtatatatggctttcactcaatcatctctcagatgttgttattaactcgctctgtgttgttgcaaaactttttggtgcagattcgtttccaaaactattgctactttgtgtgctttaaacaaaataccttgggttgatgaaacatcaacccagtgctaggaatactgtgtatctatcattagctatatgggactatattgtagattgtggtttctcagtagagaagtgactgtagtgtgattctagataaatcatcattagcaattcattcagatggtcaataacttgaaatttatagctgtgataggagttcagaaattggcacatccctttaaaaataacaacagaaaatacaactcctgggaaaaaaggtgctgattctataagattatttatatatgtaagtgtttaaaaagattattttccagaaagtttgtgcagggtttaagttgctactattcaactacactatatataaataaaatatatacaatatatacattgttttcactgtatcacattaaagtacttgggcttcagaagtaagagccaaccaactgaaaacctgagatggagatatgttcaaagaatgagatacaattttttagttttcagtttaagtaactctcagcattacaaaagagtaagtatctcacaaataggaaataaaactaaaacgtggatttaaaaagaactgcacgggctttagggtaaatgctcatcttaaacctcactagagggaagtcttctcaagtttcaagcaagaccatttacttaatgtgaagttttggaaagttataaaggtgtatgttttagccatatgattttaattttaattttgcttcttttaggttcgttcttatttaaagcaatatgattgtgtgactccttgtagttacacttgtgtttcaatcagatcagattgttgtatttattccactattttgcatttaaatgataacataaaagatataaaaaatttaaaactgctatttttcttatagaagagaaaatgggtgttggtgattgtattttaattatttaagcgtctctgtttacctgcctaggaaaacattttatggcagtcttatgtgcaaagatcgtaaaaggacaaaaaatttaaactgcttataataatccaggagttgcattatagccagtagtaaaaataataataataataataaaaccatgtctatagctgtagatgggcttcacatctgtaaagcaatcaattgtatatttttgtgatgtgtaccatactgtgtgctccagcaaatgtccatttgtgtaaatgtatttattttatattgtatatattgttaaatgcaaaaaggagatatgattctgtaactccaatcagttcagatgtgtaactcaaattattatgcctttcaggatgatggtagagcaatattaaacaagcttccacttttgactgct

SEQ ID NO: 6790 - DNA, 5960 bp, Homo sapiens
  source 1..5960: mol_type = unassigned DNA; mol_type = unassigned DNA
agtatccaccccgcccgctcccggtgacgtgccagccccaggcccacgccgctcccgccccgcgtgatgacgccaccgtcccgggcggaggcgggcgtgcggcggagccgcgtcccctcagaggggcgctggcgcggggctgagccgcccgggatcagcgcgagcacccagcccgcctcggccgggagggcagcgcggcactgcggggcgatgagcggcgcccggggcgagggcccggaggcgggcgccggcggggctgggggccgcgcggcgcctgagaaccccgggggcgtgctgagcgtggagctgcccgggctgctggcgcagctggcgcggagcttcgcgctgctgctgcccgtgtacgcgctgggctacctggggctcagcttcagctgggttctcctcgcgctcgcgctgctcgcctggtgtcgccgcagccgcggcctcaaggccctgcgcctgtgccgcgcgctggcgctgctggaagacgaggagcgcgtcgtgcgcctgggggtgcgcgcctgcgacctgcccgcctgggttcattttccagacactgaaagagcagaatggctaaataagactgtaaaacacatgtggcctttcatttgccaatttatagagaagttgtttcgagaaactatagaaccagccgtgcggggagcaaacacccaccttagcacctttagtttcacgaaggtcgacgtgggccagcagcccctcaggatcaatggtgttaaggtatacactgaaaatgtagacaaaaggcaaattattttggaccttcagattagttttgtaggaaattgtgagattgatttggagatcaaacgatatttttgtagagctggtgtgaaaagtatccagattcatggtaccatgcgggtgatcctggaaccgttgattggagatatgcccttagttggagctttgtctatcttcttccttaggaaaccacttttagaaattaactggacaggactgacgaatcttctggatgtccctggattgaatggtttatcagatactatcattttggatataatatcaaactatctggtgcttcccaatcgaatcaccgttccacttgtcagtgaagttcaaatagctcagttgcggtttcctgtaccaaagggtgttctaaggatacattttattgaagctcaggatcttcaggggaaagacacttaccttaagggacttgtcaagggaaagtcagacccctatggaatcattagagttggcaaccaaatcttccaaagcagagtcatcaaggagaacctcagtccaaagtggaatgaagtctatgaggctttagtgtatgaacatcctggacaagaattagagattgagctctttgatgaagacccagacaaggatgactttttaggaagtcttatgattgacctcattgaagttgaaaaggagcgccttttagatgaatggttcactctggacgaggttcccaaggggaagctacacttgagactggagtggctcacgttaatgccaaatgcgtcaaacctcgacaaggtgctaacagacatcaaagctgacaaagaccaagccaacgatggtctttcctctgcattgctgatcttgtacttggattcagcaaggaaccttccgtcagggaagaaaataagcagcaacccaaatcctgttgtccagatgtcagttgggcacaaggcccaggagagcaagattcgatacaaaaccaatgaacctgtgtgggaggaaaacttcactttcttcattcacaatcccaagcgccaggaccttgaagttgaggtcagagacgagcagcaccagtgttccctggggaacctgaaggtccccctcagccagctgctcaccagtgaggacatgactgtgagccagcgcttccagctcagtaactcgggtccaaacagcaccatcaagatgaagattgccctgcgggtgctccatctcgaaaagcgagaaaggcctccagaccaccaacactcagctcaagtcaaacgtccctctgtgtccaaagaggggaggaaaacatccatcaaatctcatatgtctgggtctccaggccctggtggcagcaacacagctccatccacaccagtcattgggggcagtgataagcctggtatggaagaaaaggcccagccccctgaggccggccctcaggggctgcacgacctgggcagaagctcctccagcctcctggcctccccaggccacatctcagtcaaggagccgacccccagcatcgcctcggacatctcgctgcccatcgccacccaggagctgcggcaaaggctgaggcagctggaaaacgggacgaccctgggacagtctccactggggcagatccagctgaccatccggcacagctcgcagagaaacaagcttatcgtggtcgtgcatgcctgcagaaacctcattgccttctctgaagacggctctgacccctatgtccgcatgtatttattaccagacaagaggcggtcaggaaggaggaaaacacacgtgtcaaagaaaacattaaatccagtgtttgatcaaagctttgatttcagtgtttcgttaccagaagtgcagaggagaacgctcgacgttgccgtgaagaacagtggcggcttcctgtccaaagacaaagggctccttggcaaagtattggttgctctggcatctgaagaacttgccaaaggctggacccagtggtatgacctcacggaagatgggacgaggcctcaggcgatgacatagccgcagcaggcaggaggcgtcctcttcagcgtagctctccacctctacccggaacacaccctctcacagacgtaccaatgttatttttataatttcatggatttagttatacataccttaatagttttataaaattgttgacatttcaggcaaatttggccaatattatcattgaattttctgtgttggatttcctctaggatttcgccagttcctacaacgtgcagtagggcggcggtagctcttgtgtctgtggactctgctcagctgtgtccgtaggagtcggatgtgtctgtgctttattatggccttgtttatatatcactgaggtatactatgccatgtaaatagactattttttataatctttacatgctggtttaaattcagaaggaaatagatcaaggaaatatatatattttcttctaaaacttattaaattcgtgtgacaaataatcattttcatcttggcagcaaaaagttctcagtgacctattttgtggtgtttctttttgaaaagaaaagctgaaatattattaaatgctagtatgtttctgcccattatgaaagatgaaataaagtattcaaaatattaacattttcataaatataaggatgtattattgagaagtaagttgaagggcttataaggaaaaatgttttataactgagtaatatattaagagaattgtcatggttcataaatcacattatgctaatctgaaatttcttacataaaaatgaagtgtcttatgtttattttaattgctgttgtaacttactcatgaaacagtatacagacaccttgtacttttcctcaactgtaagagcagactttcaatgttagcaattaagctgttgtcaaacaatcagtcatgagctttgttaattttcaatgttttcccagcctataaaaaaaggaaggtacacgttgtccttttaaaggttgtgaggtagattggagtgagtagacaggatattgcattaaaaattgaaagctcgatctcattattgtcaggaacccccagtgtgacctcacacataggatgtgggacctttgagccgatgtgcactggccaccaccagggttgggggcgccacagctgcgagcccggcccctgctgttctcagcagccacttcccaggctgcctcactttatgccatgactgaccttaatattgggatattgttatgcaatttttatcctgtttagactgttaaaagcaggtttctgtacttaagagtcccccagacctcctgtgaggtgaggctctgttgcagtgtcgtaggctgtgtgtgtctgtaaagaaagaatgcacatatgtagacgattaagtgtatattataagctatatgctgaaaatggcttccatagccatgagaacatcttaaaactatgtgtaaatatattaaggaaagtatagctttgtaatttaaattggagcttttagcttgtttcatggaactatacaacttgtgggtaactcacatgaccaaacaaaccaaagtgcctgtgacggggcgggtggcgtctacccaccctcccttctagcagattcttattttgtttgaatttataaacaaggctggtggctgtctacccaccctcccttctagcagattttgattttgtttcaatttataacttacactttgaaccatgggtttacttataatggagtctgtagcttcacagcatatttcatgtaatcataaagaccagtatattccctcctgctgaatgacatgcgactgtaaagcctctttataaaccatttccaatgttagtatataggattatttgggaagcgtatcaatacctttatagacaaatacgaacatgtatgcacacaaaacatttaactatggtatttatggaagacaggtaacaacattaaatctagttgctttcccttagtattagatttgttgagggttttttaaaaatcaggtctgttgaaagtcttctgtcataatctataaagcagcagcactcatggaaattgtagcatgccagtaatttttaccaacatcccatacatctgagttctgcagtccagtgtgtaatccgctccatgtgtattttgcttaatggaatgctttatttaagcacttaggcagagtagacacaattaaaggtacaaagcccagaggaagtggtagagcagcaccgtgcctgccctgaggcagtggagtcagtagcgctgtccccagggccttgagtgcctggaggtgcttggcctccagtagctgcctccattctcttttaaaaaaagggggtgattctgaggcactgaagtgcctcccagatgtggaggagtgaagccaccatcgaggccacactcagcactccaggatcccagcgatgtcagacactcttgagttgtcaaaacgttaattttcagttttaaataatcagtttatctaagaaaagggaattttaacttttctaccttgagccaagccaatgaagggaaaattaattaacttagtaaatttgaagtgcagctctgttagctcgtacatgtgggttcttatcctgatcctgtgccttaaagtaggaaggtgtttccaagttcagattaaaatagaagcagctggccgggtgcggtggctcacgcctgtaatcccagcactttgggaggccgaggcgggcggatgacctgaggtcaggagttcaagaccagcctggccaacatggagaaaccccatctttactaaaaatacaaaaattagccgggcgtggtggtggagcgcacgcctgtagtcccagctactcgggaggctgaggcaggagaattgcttgaacccaggaggcggaggttgcagtgagccaagatcgcaccactgcactccagcctgggcaacagagtgagactccgtctcaaaaaataaataaaatagaagcagccttgtaactgtatttaccatgataatatattctgcacggtaagaattccttttacagacattctttatcaagaggtcggcccttctttttcaggcacataagccaaatgcaggcctgtgtgtagctgtgtgttttttctgtggttgccgcatttattccacctccagctggaccccccactgcaaatagagaacagcggtgggggatgggggttaaaaagtagagaacctcctttctgttcaactaatttcacgtgacagtgcatgtatttattcaataaaacctttatgttagctcagt

SEQ ID NO: 6791 - DNA, 3251 bp, Homo sapiens
  source 1..3251: mol_type = unassigned DNA; mol_type = unassigned DNA
agcgcgagcacccagcccgcctcggccgggagggcagcgcggcactgcggggcgatgagcggcgcccggggcgagggcccggaggcgggcgccggcggggctgggggccgcgcggcgcctgagaaccccgggggcgtgctgagcgtggagctgcccgggctgctggcgcagctggcgcggagcttcgcgctgctgctgcccgtgtacgcgctgggctacctggggctcagcttcagctgggttctcctcgcgctcgcgctgctcgcctggtgtcgccgcagccgcggcctcaaggccctgcgcctgtgccgcgcgctggcgctgctggaagacgaggagcgcgtcgtgcgcctgggggtgcgcgcctgcgacctgcccgcctgggttcattttccagacactgaaagagcagaatggctaaataagactgtaaaacacatgtggcctttcatttgccaatttatagagaagttgtttcgagaaactatagaaccagccgtgcggggagcaaacacccaccttagcacctttagtttcacgaaggtcgacgtgggccagcagcccctcaggatcaatggtgttaaggtatacactgaaaatgtagacaaaaggcaaattattttggaccttcagattagttttgtaggaaattgtgagattgatttggagatcaaacgatatttttgtagagctggtgtgaaaagtatccagattcatggtaccatgcgggtgatcctggaaccgttgattggagatatgcccttagttggagctttgtctatcttcttccttaggaaaccacttttagaaattaactggacaggactgacgaatcttctggatgtccctggattgaatggtttatcagatactatcattttggatataatatcaaactatctggtgcttcccaatcgaatcaccgttccacttgtcagtgaagttcaaatagctcagttgcggtttcctgtaccaaagggtgttctaaggatacattttattgaagctcaggatcttcaggggaaagacacttaccttaagggacttgtcaagggaaagtcagacccctatggaatcattagagttggcaaccaaatcttccaaagcagagtcatcaaggagaacctcagtccaaagtggaatgaagtctatgaggctttagtgtatgaacatcctggacaagaattagagattgagctctttgatgaagacccagacaaggatgactttttaggaagtcttatgattgacctcattgaagttgaaaaggagcgccttttagatgaatggttcactctggacgaggttcccaaggggaagctacacttgagactggagtggctcacgttaatgccaaatgcgtcaaacctcgacaaggtgctaacagacatcaaagctgacaaagaccaagccaacgatggtctttcctctgcattgctgatcttgtacttggattcagcaaggaaccttccgagtaacccattagaatttaaccccgatgtcttgaagaagactgcagttcagagagctttaaagtcagggaagaaaataagcagcaacccaaatcctgttgtccagatgtcagttgggcacaaggcccaggagagcaagattcgatacaaaaccaatgaacctgtgtgggaggaaaacttcactttcttcattcacaatcccaagcgccaggaccttgaagttgaggtcagagacgagcagcaccagtgttccctggggaacctgaaggtccccctcagccagctgctcaccagtgaggacatgactgtgagccagcgcttccagctcagtaactcgggtccaaacagcaccatcaagatgaagattgccctgcgggtgctccatctcgaaaagcgagaaaggcctccagaccaccaacactcagctcaagtcaaacgtccctctgtgtccaaagaggggaggaaaacatccatcaaatctcatatgtctgggtctccaggccctggtggcagcaacacagctccatccacaccagtcattgggggcagtgataagcctggtatggaagaaaaggcccagccccctgaggccggccctcaggggctgcacgacctgggcagaagctcctccagcctcctggcctccccaggccacatctcagtcaaggagccgacccccagcatcgcctcggacatctcgctgcccatcgccacccaggagctgcggcaaaggctgaggcagctggaaaacgggacgaccctgggacagtctccactggggcagatccagctgaccatccggcacagctcgcagagaaacaagcttatcgtggtcgtgcatgcctgcagaaacctcattgccttctctgaagacggctctgacccctatgtccgcatgtatttattaccagacaagaggcggtcaggaaggaggaaaacacacgtgtcaaagaaaacattaaatccagtgtttgatcaaagctttgatttcagtgtttcgttaccagaagtgcagaggagaacgctcgacgttgccgtgaagaacagtggcggcttcctgtccaaagacaaagggctccttggcaaagtattggttgctctggcatctgaagaacttgccaaaggctggacccagtggtatgacctcacggaagatgggacgaggcctcaggcgatgacatagccgcagcaggcaggaggcgtcctcttcagcgtagctctccacctctacccggaacacaccctctcacagacgtaccaatgttatttttataatttcatggatttagttatacataccttaatagttttataaaattgttgacatttcaggcaaatttggccaatattatcattgaattttctgtgttggatttcctctaggatttcgccagttcctacaacgtgcagtagggcggcggtagctcttgtgtctgtggactctgctcagctgtgtccgtaggagtcggatgtgtctgtgctttattatggccttgtttatatatcactgaggtatactatgccatgtaaatagactattttttataatctttacatgctggtttaaattcagaaggaaatagatcaaggaaatatatatattttcttctaaaacttattaaattcgtgtgacaaataatcattttcatcttggcagcaaaaagttctcagtgacctattttgtggtgtttctttttgaaaagaaaagctgaaatattattaaatgctagtatgtttctgcccattatgaaagatgaaataaagtattcaaaatattaa

SEQ ID NO: 6792 - DNA, 2090 bp, Homo sapiens
  source 1..2090: mol_type = unassigned DNA; mol_type = unassigned DNA
tgtgtctttgttaggagatttcataccatgttaatcattatggaaacactacttaagagaatatggctgaaatatgtttgggtttttaaaaatatctttcttacagactaatattgtctgtggacctttctacatttgtttgtttgtttttgaaacagttttgtcacccaggctggagtgcagtggcgcgatatcagctcactgcagccgcctcctcccaggttcaagcgattctcatgcctcagcctcttgagtggctgggactacaggtgcgcgccaccatgcccaactaattttttgtatttttagtagagatgaggtttcaccatgttggccaggctggtctcgaacccctggcctcaggtgatctgagcctcccaaagtgctgaaattacaggcgtgagccaccccacctggcccctttctacattttctaagttcctatctctgaggacaaagggtcaggagcgtagacaacgtagaaaggttctgcagacatgatcctagttatgccagtgtttccaccctgtgttttgcaggtcagagacgagcagcaccagtgttccctggggaacctgaaggtccccctcagccagctgctcaccagtgaggacatgactgtgagccagcgcttccagctcagtaactcgggtccaaacagcaccatcaagatgaagattgccctgcgggtgctccatctcgaaaagcgagaaaggcctccagaccaccaacactcagctcaagtcaaacgtccctctgtgtccaaagaggggaggaaaacatccatcaaatctcatatgtctgggtctccaggccctggtggcagcaacacagctccatccacaccagtcattgggggcagtgataagcctggtatggaagaaaaggcccagccccctgaggccggccctcaggggctgcacgacctgggcagaagctcctccagcctcctggcctccccaggccacatctcagtcaaggagccgacccccagcatcgcctcggacatctcgctgcccatcgccacccaggagctgcggcaaaggctgaggcagctggaaaacgggacgaccctgggacagtctccactggggcagatccagctgaccatccggcacagctcgcagagaaacaagcttatcgtggtcgtgcatgcctgcagaaacctcattgccttctctgaagacggctctgacccctatgtccgcatgtatttattaccagacaagaggcggtcaggaaggaggaaaacacacgtgtcaaagaaaacattaaatccagtgtttgatcaaagctttgatttcagtgtttcgttaccagaagtgcagaggagaacgctcgacgttgccgtgaagaacagtggcggcttcctgtccaaagacaaagggctccttggcaaagtattggttgctctggcatctgaagaacttgccaaaggctggacccagtggtatgacctcacggaagatgggacgaggcctcaggcgatgacatagccgcagcaggcaggaggcgtcctcttcagcgtagctctccacctctacccggaacacaccctctcacagacgtaccaatgttatttttataatttcatggatttagttatacataccttaatagttttataaaattgttgacatttcaggcaaatttggccaatattatcattgaattttctgtgttggatttcctctaggatttcgccagttcctacaacgtgcagtagggcggcggtagctcttgtgtctgtggactctgctcagctgtgtccgtaggagtcggatgtgtctgtgctttattatggccttgtttatatatcactgaggtatactatgccatgtaaatagactattttttataatctttacatgctggtttaaattcagaaggaaatagatcaaggaaatatatatattttcttctaaaacttattaaattcgtgtgacaaataatcattttcatcttggcagcaaaaagttctcagtgacctattttgtggtgtttctttttgaaaagaaaagctgaaatattattaaatgctagtatgtttctgcccattatgaaagatgaaataaagtattcaaaatatt

SEQ ID NO: 6793 - DNA, 546 bp, Homo sapiens
  source 1..546: mol_type = unassigned DNA; mol_type = unassigned DNA
atattgcaactggagtaagaatataatgtaaggagcttgggaatgtacagttctgccgatgcgtggtgagcatgagggagtcatatttggagaaccaaggttcattttccagacactgaaagagcagaatggctaaataagactgtaaaacacatgtggcctttcatttgccaatttatagagaagttgtttcgagaaactatagaaccagccgtgcggggagcaaacacccaccttagcacctttagtttcacgaaggtcgacgtgggccagcagcccctcaggatcaatggtgttaaggtatacactgaaaatgtagacaaaaggcaaattattttggaccttcagattagttttgtaggaaattgtgagattgatttggagatcaaacgatatttttgtagagctggtgtgaaaagtatccagattcatggtaccatgcgggtgatcctggaaccgttgattggagatatgcccttagttggagctttgtctatcttcttccttaggaaaccacttttagaaattaactggacaggactgacg

SEQ ID NO: 6794 - DNA, 663 bp, Homo sapiens
  source 1..663: mol_type = unassigned DNA; mol_type = unassigned DNA
aaaaccctgacaagcagggtgggaagggccccagaggcagcgttctcacgccggaatgcccgataacaagaccgtcccgagagactccgcaaaagccacaaccttgcacactggctaggcaacctcacaccgaaaaataccggaggactcccgccagcggcgcccgtccgacctccggcgggcggcgccctctcacccgtcctcctggccgcaaaatgaccgcaaacagggacgccgccctctcatcccaccgccaccccggctgcgctcagcggccgcgcacccccacgtttgccagcagctcccagaggcggtcagcctttgggtttgacgacggcaacttcccgggcctcggcgagcgcagccacgcacccggaagccgcctcggggcgcgacgccgagccaaaaccgcccgcgggctccgaggccacaggttcattttccagacactgaaagagcagaatggctaaataagactgtaaaacacatgtggcctttcatttgccaatttatagagaagttgtttcgagaaactatagaaccagccgtgcggggagcaaacacccaccttagcacctttagtttcacgaaggtcgacgtgggccagcagcccctcaggatcaatggtgttaaggtatacactgaaaatgtagacaaaaggca

SEQ ID NO: 6795 - DNA, 2766 bp, Homo sapiens
  source 1..2766: mol_type = unassigned DNA; mol_type = unassigned DNA
atgaccgcaaacagggacgccgccctctcatcccaccgccaccccggctgcgctcagcggccgcgcacccccacgtttgccagcagctcccagaggcggtcagcctttgggtttgacgacggcaacttcccgggcctcggcgagcgcagccacgcacccggaagccgcctcggggcgcgacgccgagccaaaaccgcccgcgggctccgaggccacaggcaaaggggcgctggcgcggggctgagccgcccgggatcagcgcgagcacccagcccgcctcggccgggagcgcctgagaaccccgggggcgtgctgagcgtggagctgcccgggctgctggcgcagctggcgcggagcttcgcgctgctgctgcccgtgtacgcgctgggctacctggggctcagcttcagctgggttctcctcgcgctcgcgctgctcgcctggtgtcgccgcagccgcggcctcaaggccctgcgcctgtgccgcgcgctggcgctgctggaagacgaggagcgcgtcgtgcgcctgggggtgcgcgcctgcgacctgcccgcctgggttcattttccagacactgaaagagcagaatggctaaataagactgtaaaacacatgtggcctttcatttgccaatttatagagaagttgtttcgagaaactatagaaccagccgtgcggggagcaaacacccaccttagcacctttagtttcacgaaggtcgacgtgggccagcagcccctcaggatcaatggtgttaaggtatacactgaaaatgtagacaaaaggcaaattattttggaccttcagattagttttgtaggaaattgtgagattgatttggagatcaaacgatatttttgtagagctggtgtgaaaagtatccagattcatggtaccatgcgggtgatcctggaaccgttgattggagatatgcccttagttggagctttgtctatcttcttccttaggaaaccacttttagaaattaactggacaggactgacgaatcttctggatgtccctggattgaatggtttatcagatactatcattttggatataatatcaaactatctggtgcttcccaatcgaatcaccgttccacttgtcagtgaagttcaaatagctcagttgcggtttcctgtaccaaagggtgttctaaggatacattttattgaagctcaggatcttcaggggaaagacacttaccttaagggacttgtcaagggaaagtcagacccctatggaatcattagagttggcaaccaaatcttccaaagcagagtcatcaaggagaacctcagtccaaagtggaatgaagtctatgaggctttagtgtatgaacatcctggacaagaattagagattgagctctttgatgaagacccagacaaggatgactttttaggaagtcttatgattgacctcattgaagttgaaaaggagcgccttttagatgaatggttcactctggacgaggttcccaaggggaagctacacttgagactggagtggctcacgttaatgccaaatgcgtcaaacctcgacaaggtgctaacagacatcaaagctgacaaagaccaagccaacgatggtctttcctctgcattgctgatcttgtacttggattcagcaaggaaccttccgtcagggaagaaaataagcagcaacccaaatcctgttgtccagatgtcagttgggcacaaggcccaggagagcaagattcgatacaaaaccaatgaacctgtgtgggaggaaaacttcactttcttcattcacaatcccaagcgccaggaccttgaagttgaggtcagagacgagcagcaccagtgttccctggggaacctgaaggtccccctcagccagctgctcaccagtgaggacatgactgtgagccagcgcttccagctcagtaactcgggtccaaacagcaccatcaagatgaagattgccctgcgggtgctccatctcgaaaagcgagaaaggcctccagaccaccaacactcagctcaagtcaaacgtccctctgtgtccaaagaggggaggaaaacatccatcaaatctcatatgtctgggtctccaggccctggtggcagcaacacagctccatccacaccagtcattgggggcagtgataagcctggtatggaagaaaaggcccagccccctgaggccggccctcaggggctgcacgacctgggcagaagctcctccagcctcctggcctccccaggccacatctcagtcaaggagccgacccccagcatcgcctcggacatctcgctgcccatcgccacccaggagctgcggcaaaggctgaggcagctggaaaacgggacgaccctgggacagtctccactggggcagatccagctgaccatccggcacagctcgcagagaaacaagcttatcgtggtcgtgcatgcctgcagaaacctcattgccttctctgaagacggctctgacccctatgtccgcatgtatttattaccagacaagaggcggtcaggaaggaggaaaacacacgtgtcaaagaaaacattaaatccagtgtttgatcaaagctttgatttcagtgtttcgttaccagaagtgcagaggagaacgctcgacgttgccgtgaagaacagtggcggcttcctgtccaaagacaaagggctccttggcaaagtattggttgctctggcatctgaagaacttgccaaaggctggacccagtggtatgacctcacggaagatgggacgaggcctcaggcgatgacatag

SEQ ID NO: 6796 - DNA, 3874 bp, Homo sapiens
  source 1..3874: mol_type = unassigned DNA; mol_type = unassigned DNA
gccccatgtgagcggattgcaacacatgcagctgcctggagagagggagccggtgtcctacgtcagagccgccgccgccgcggagccgccgccggggaggagcagccgctgccgcccaggactgggcccttagggaggaggaggcgagaagatggcggacgaccccagtgctgccgacaggaacgtggagatctggaagatcaagaagctcattaagagcttggaggcggcccgcgggtgagcgccgcgtccggcaccctccgtgccctcttggttcccggacccctcaggatggacgcccccgcgccgcatggccggatgaggagaaccaggcactagccaactcccgccttctggatctctgggtagtagcccctgacccaggggcgagggtcggcgcggttggcccgagaaggggtcctttccccgcatggggcaatggcaccagcatgatatcattgatcattcctcccaaagaccagatttcacgagtggcaaaaatgttagcggatgagtttggaactgcatctaacattaagtcacgagtaaaccgcctttcagtcctgggagccattacatctgtacaacaaagactcaaactttataacaaagtacctccaaatggtctggttgtatactgtggaacaattgtaacagaagaaggaaaggaaaagaaagtcaacattgactttgaacctttcaaaccaattaatacgtcattgtatttgtgtgacaacaaattccatacagaggctcttacagcactactttcagatgatagcaagtttggattcattgtaatagatggtagtggtgcactttttggcacactccaaggaaacacaagagaagtcctgcacaaattcactgtggatctcccaaagaaacacggtagaggaggtcagtcagccttgcgttttgcccgtttaagaatggaaaagcgacataactatgttcggaaagtagcagagactgctgtgcagctgtttatttctggggacaaagtgaatgtggctggtctagttttagctggatccgctgactttaaaactgaactaagtcaatctgatatgtttgatcagaggttacaatcaaaagttttaaaattagttgatatatcctatggtggtgaaaatggattcaaccaagctattgagttatctactgaagtcctctccaacgtgaaattcattcaagagaagaaattaataggacgatactttgatgaaatcagccaggacacgggcaagtactgttttggcgttgaagatacactaaaggctttggaaatgggagctgtagaaattctaatagtctatgaaaatctggatataatgagatatgttcttcattgccaaggcacagaagaggagaaaattctctatctaactccagagcaagaaaaggataaatctcatttcacagacaaagagaccggacaggaacatgagcttatcgagagcatgcccctgttggaatggtttgctaacaactataaaaaatttggagctacgttggaaattgtcacagataaatcacaagaagggtctcagtttgtgaaaggatttggtggaattggaggtatcttgcggtaccgagtagatttccagggaatggaataccaaggaggagacgatgaattttttgaccttgatgactactaggtagtcgacatgggtccggcaaaacgtgcctcaccctccagcatccaacccaaggagcatacccatggtggaatccaaacagatccctgccttacaattggaacatttccagaacttaatccatgagcattggatattgaaaagaaaaccgaaacaaaaccagacccagccctacactttggtttgtcatggtgtcagcgcagcagcctacaactaagttcctaaacgccactttggactaatttaaaaaagaatcccagtttttacttttactggatggtgaaattggttgctcttgtattttatgaaaaaaaatgatttttttaaccttcatacatagaagcaaaaatactttaactgctgtaaaccttcaaaagttaatagaagtgagatcatactggtttgtttcttattttgattggagaaaaattaaattgctgcatttcgcagtgacccatttacatggcattctcagcttagactgcgtaagaagaaatatatgtggtgaaatgttggaaccatttctctcttggtctctgtttaatgttgaaagggtgagctaataggaggcactttcaacttcactccctcacgctaccccgtccccctccagactggcagtttcaaggatgcaaattgcattgcaaaatcaaactgactcatgaagcatttgggccagtgcactgtttacttccatctgtttgcagacacatttgtgcccggcgtttgggagccctttgtatcaatgttctgacaagggtccctataaccttaacctactcgaaaccggtttgggatggatatgatggggcttctgtgctattgctgggattgggagaaataaaacatgcaatttaagtggaagcgaagaaatttaaagaggattttattttgcttgggtcaatccttgttaaaagggaggtggatgtgttttccttgtgttggatggcatgagattatgtgaatgttttgatttattaaaatgaactgcaaggtttttcacaggaacgacagacatgtatgactgcatgtaattataaactcctgacctcctggtggggttggagcatctgtttcaaatgtgggacttacaagcacttctcacatgagaaattaggggcgggtgggaagggatgggacacagcttctggcaccatggatttaagaccatgttggatccaaaagttggcctgaaaccctgaagcttatgcttcacagctgggctgtaagtcagacttgaacccagctgatatgcaaggtcatggcgtgcccagggtggtgacagttgaacaaagtgtatagtacgtgcccagtggtagcgatggaaaaaagtataccaaatggactttgaaggaccaaaggttttaaaagtcaattggtatcacctccacactgactagggtagtggggtgcatttggttttcaaattgggtacttttaacactttagtgcctgactgctgttctttactgacttgattcagtcactcgtagctttattggtctgaaccagctccttgttcccaggttacagacctgcctatcgttccaataatcctgtttcacttgaatgaagggagtatgtcttaaatgtaaagtttctggttctcacactgtactctgaggtccaaatactgtctgtcaatgtgtaacctgatgtctcaaccccctgtgagaagagtccattatttggtgttcaccaacgtgggagacttcaccggaacaggcttttttgctttgggctctgctatttgtttgcagaacacccaagagcgagcaaacatgctctcttcacagcagtaccttagggttttgccattgtaaatgggtctgatgtgatatgacaagaccagagaaattggatgtaaatttacatttttgaatatgcttgttgtttcacatgatacatttagggtatgcagctccttttgtagtttttatttttactatttaagtttggaaatgatgccaaatttttgtatttctttaatcaatgtgttctcttcggtgatatatattgcattatatattgatgtgtgtatcaatatatattgatatgtattacacttacacatacaaacacatataagagggggtgaaaaccgtagcctttgcattctctatagcctctgcagagagatactaagcagcaaaatcttggtgttgtgatgtacagaaatggagaagagtattaaaccatatttaagaata

SEQ ID NO: 6797 - DNA, 3742 bp, Homo sapiens
  source 1..3742: mol_type = unassigned DNA; mol_type = unassigned DNA
actcgcaccggccccctcccttccgcctgccgccttccactccgcccctggcggaggaagtgatgtcacaggccccatgtgagcggattgcaacacatgcagctgcctggagagagggagccggtgtcctacgtcagagccgccgccgccgcggagccgccgccggggaggagcagccgctgccgcccaggactgggcccttagggaggaggaggcgagaagatggcggacgaccccagtgctgccgacaggaacgtggagatctggaagatcaagaagctcattaagagcttggaggcggcccgcggcaatggcaccagcatgatatcattgatcattcctcccaaagaccagatttcacgagtggcaaaaatgttagcggatgagtttggaactgcatctaacattaagtcacgagtaaaccgcctttcagtcctgggagccattacatctgtacaacaaagactcaaactttataacaaagtacctccaaatggtctggttgtatactgtggaacaattgtaacagaagaaggaaaggaaaagaaagtcaacattgactttgaacctttcaaaccaattaatacgtcattgtatttgtgtgacaacaaattccatacagaggctcttacagcactactttcagatgatagcaagtttggattcattgtaatagatggtagtggtgcactttttggcacactccaaggaaacacaagagaagtcctgcacaaattcactgtggatctcccaaagaaacacggtagaggaggtcagtcagccttgcgttttgcccgtttaagaatggaaaagcgacataactatgttcggaaagtagcagagactgctgtgcagctgtttatttctggggacaaagtgaatgtggctggtctagttttagctggatccgctgactttaaaactgaactaagtcaatctgatatgtttgatcagaggttacaatcaaaagttttaaaattagttgatatatcctatggtggtgaaaatggattcaaccaagctattgagttatctactgaagtcctctccaacgtgaaattcattcaagagaagaaattaataggacgatactttgatgaaatcagccaggacacgggcaagtactgttttggcgttgaagatacactaaaggctttggaaatgggagctgtagaaattctaatagtctatgaaaatctggatataatgagatatgttcttcattgccaaggcacagaagaggagaaaattctctatctaactccagagcaagaaaaggataaatctcatttcacagacaaagagaccggacaggaacatgagcttatcgagagcatgcccctgttggaatggtttgctaacaactataaaaaatttggagctacgttggaaattgtcacagataaatcacaagaagggtctcagtttgtgaaaggatttggtggaattggaggtatcttgcggtaccgagtagatttccagggaatggaataccaaggaggagacgatgaattttttgaccttgatgactactaggtagtcgacatgggtccggcaaaacgtgcctcaccctccagcatccaacccaaggagcatacccatggtggaatccaaacagatccctgccttacaattggaacatttccagaacttaatccatgagcattggatattgaaaagaaaaccgaaacaaaaccagacccagccctacactttggtttgtcatggtgtcagcgcagcagcctacaactaagttcctaaacgccactttggactaatttaaaaaagaatcccagtttttacttttactggatggtgaaattggttgctcttgtattttatgaaaaaaaatgatttttttaaccttcatacatagaagcaaaaatactttaactgctgtaaaccttcaaaagttaatagaagtgagatcatactggtttgtttcttattttgattggagaaaaattaaattgctgcatttcgcagtgacccatttacatggcattctcagcttagactgcgtaagaagaaatatatgtggtgaaatgttggaaccatttctctcttggtctctgtttaatgttgaaagggtgagctaataggaggcactttcaacttcactccctcacgctaccccgtccccctccagactggcagtttcaaggatgcaaattgcattgcaaaatcaaactgactcatgaagcatttgggccagtgcactgtttacttccatctgtttgcagacacatttgtgcccggcgtttgggagccctttgtatcaatgttctgacaagggtccctataaccttaacctactcgaaaccggtttgggatggatatgatggggcttctgtgctattgctgggattgggagaaataaaacatgcaatttaagtggaagcgaagaaatttaaagaggattttattttgcttgggtcaatccttgttaaaagggaggtggatgtgttttccttgtgttggatggcatgagattatgtgaatgttttgatttattaaaatgaactgcaaggtttttcacaggaacgacagacatgtatgactgcatgtaattataaactcctgacctcctggtggggttggagcatctgtttcaaatgtgggacttacaagcacttctcacatgagaaattaggggcgggtgggaagggatgggacacagcttctggcaccatggatttaagaccatgttggatccaaaagttggcctgaaaccctgaagcttatgcttcacagctgggctgtaagtcagacttgaacccagctgatatgcaaggtcatggcgtgcccagggtggtgacagttgaacaaagtgtatagtacgtgcccagtggtagcgatggaaaaaagtataccaaatggactttgaaggaccaaaggttttaaaagtcaattggtatcacctccacactgactagggtagtggggtgcatttggttttcaaattgggtacttttaacactttagtgcctgactgctgttctttactgacttgattcagtcactcgtagctttattggtctgaaccagctccttgttcccaggttacagacctgcctatcgttccaataatcctgtttcacttgaatgaagggagtatgtcttaaatgtaaagtttctggttctcacactgtactctgaggtccaaatactgtctgtcaatgtgtaacctgatgtctcaaccccctgtgagaagagtccattatttggtgttcaccaacgtgggagacttcaccggaacaggcttttttgctttgggctctgctatttgtttgcagaacacccaagagcgagcaaacatgctctcttcacagcagtaccttagggttttgccattgtaaatgggtctgatgtgatatgacaagaccagagaaattggatgtaaatttacatttttgaatatgcttgttgtttcacatgatacatttagggtatgcagctccttttgtagtttttatttttactatttaagtttggaaatgatgccaaatttttgtatttctttaatcaatgtgttctcttcggtgatatatattgcattatatattgatgtgtgtatcaatatatattgatatgtattacacttacacatacaaacacatataagagggggtgaaaaccgtagcctttgcattctctatagcctctgcagagagatactaagcagcaaaatcttggtgttgtgatgtacagaaatggagaagagtattaaaccatatttaag

SEQ ID NO: 6798 - DNA, 1736 bp, Homo sapiens
  source 1..1736: mol_type = unassigned DNA; mol_type = unassigned DNA
atagtagaatggcctgcctcaggccatgtgaaaagttgatttcagcacaagaatttgacattctggtttccagcccaggattgtcatttatgggtagatttgcaattttagaatgacagcccctccaagctcttcattattactgttatatgaaacaggatgtgcttaattgtactgaaggcccaattcacagcaatggcaccagcatgatatcattgatcattcctcccaaagaccagatttcacgagtggcaaaaatgttagcggatgagtttggaactgcatctaacattaagtcacgagtaaaccgcctttcagtcctgggagccattacatctgtacaacaaagactcaaactttataacaaagtacctccaaatggtctggttgtatactgtggaacaattgtaacagaagaaggaaaggaaaagaaagtcaacattgactttgaacctttcaaaccaattaatacgtcattgtatttgtgtgacaacaaattccatacagaggctcttacagcactactttcagatgatagcaagtttggattcattgtaatagatggtagtggtgcactttttggcacactccaaggaaacacaagagaagtcctgcacaaattcactgtggatctcccaaagaaacacggtagaggaggtcagtcagccttgcgttttgcccgtttaagaatggaaaagcgacataactatgttcggaaagtagcagagactgctgtgcagctgtttatttctggggacaaagtgaatgtggctggtctagttttagctggatccgctgactttaaaactgaactaagtcaatctgatatgtttgatcagaggttacaatcaaaagttttaaaattagttgatatatcctatggtggtgaaaatggattcaaccaagctattgagttatctactgaagtcctctccaacgtgaaattcattcaagagaagaaattaataggacgatactttgatgaaatcagccaggacacgggcaagtactgttttggcgttgaagatacactaaaggctttggaaatgggagctgtagaaattctaatagtctatgaaaatctggatataatgagatatgttcttcattgccaaggcacagaagaggagaaaattctctatctaactccagagcaagaaaaggataaatctcatttcacagacaaagagaccggacaggaacatgagcttatcgagagcatgcccctgttggaatggtttgctaacaactataaaaaatttggagctacgttggaaattgtcacagataaatcacaagaagggtctcagtttgtgaaaggatttggtggaattggaggtatcttgcggtaccgagtagatttccagggaatggaataccaaggaggagacgatgaattttttgaccttgatgactactaggtagtcgacatgggtccggcaaaacgtgcctcaccctccagcatccaacccaaggagcatacccatggtggaatccaaacagatccctgccttacaattggaacatttccagaacttaatccatgagcattggatattgaaaagaaaaccgaaacaaaaccagacccagccctacactttggtttgtcatggtgtcagcgcagcagcctacaactaagttcctaaacgccactttggactaatttaaaaaagaatcccagtttttacttttactggatggtgaaattggttgctcttgtattttatgaaaaaaaa

SEQ ID NO: 6799 - DNA, 933 bp, Homo sapiens
  source 1..933: mol_type = unassigned DNA; mol_type = unassigned DNA
gtaacagaagaaggaaaggaaaagaaagtcaacattgactttgaacctttcaaaccaattaatacgtcattgtatttgtgtgacaacaaattccatacagaggctcttacagcactactttcagatgatagcaagtttggattcattgtaatagatggtagtggtgcactttttggcacactccaaggaaacacaagagaagtcctgcacaaattcactgtggatctcccaaagaaacacggtagaggaggtcagtcagccttgcgttttgcccgtttaagaatggaaaagcgacataactatgttcggaaagtagcagagactgctgtgcagctgtttatttctggggacaaagtgaatgtggctggtctagttttagctggatccgctgactttaaaactgaactaagtcaatctgatatgtttgatcagaggttacaatcaaaagttttaaaattagttgatatatcctatggtggtgaaaatggattcaaccaagctattgagttatctactgaagtcctctccaacgtgaaattcattcaagagaagaaattaataggtatcggtgaaatgcaactacttattctgtgaaatgttttcgtgtgtgtgtgtgtgtgtgtgtgtgtgtgtatgtgtgtgtgtgtatgtacgtgattgtatgtatgagacaaggtaccaaaaatgtaaaaaggaatatttagtatttttattaactcttttgcctcagtaaaagcattattttttatcttctttagtcattaggtcgaataggtgtgtttgtatctactagggaaactttaatatatatcctgttgactgatccctaatcgtaggacgatactttgatgaaatcagccaggacacgggcaagtactgttttggcgttgaagatacactaaaggctttggaaatgggagctgtagaaattct

SEQ ID NO: 6800 - DNA, 745 bp, Homo sapiens
  source 1..745: mol_type = unassigned DNA; mol_type = unassigned DNA
cgcggagccgccgccggggaggagcagccgctgccgcccaggactgggcccttagggaggaggaggcgagaagatggcggacgaccccagtgctgccgacaggaacgtggagatctggaagatcaagaagctcattaagagcttggaggcggcccgcggcaatggcaccagcatgatatcattgatcattcctcccaaagaccagatttcacgagtggcaaaaatgttagcggatgagtttggaactgcatctaacattaagtcacgagtaaaccgcctttcagtcctgggagccattacatctgtacaacaaagactcaaactttataacaaaggctcttacagcactactttcagatgatagcaagtttggattcattgtaatagatggtagtggtgcactttttggcacactccaaggaaacacaagagaagtcctgcacaaattcactgtggatctcccaaagaaacacggtagaggaggtcagtcagccttgcgttttgcccgtttaagaatggaaaagcgacataactatgttcggaaagtagcagagactgctgtgcagctgtttatttctggggacaaagtgaatgtggctggtctagttttagctggatccgctgactttaaaactgaactaagtcaatctgatatgtttgatcagaggttacaatcaaaagttttaaaattagttgatatatcctatggtggtgaaaatggattcaaccaagctattgagttatc

SEQ ID NO: 6801 - DNA, 476 bp, Homo sapiens
  source 1..476: mol_type = unassigned DNA; mol_type = unassigned DNA
aagaaagtcaacattgactttgaacctttcaaaccaattaatacgtcattgtatttgtgtgacaacaaattccatacagaggctcttacagcactactttcagatgatagcaagtttggattcattgtaatagatggtagtggtgcactttttggcacactccaaggaaacacaagagaagtcctgcacaaattcactgtggatctcccaaagaaacacggtagaggaggtcagtcagccttgcgttttgcccgtttaagaatggaaaagcgacataactatgttcggaaagtagcagagactgctgtgcagctgtttatttctggggacaaagtgaatgtggctggtctagttttagctggatccgctgactttaaaactgaactaagtcaatctgatatgtttgatcaggtaagtaagaagtagatgctttattatgtaagaccctaggtaggagtaggtgagtcctctgtgtg

SEQ ID NO: 6802 - DNA, 990 bp, Homo sapiens
  source 1..990: mol_type = unassigned DNA; mol_type = unassigned DNA
ggattgcaacacatgcagctgcctggagagagggagccggtgtcctacgtcagagccgccgccgccgcggagccgccgccggggaggagcagccgctgccgcccaggactgggcccttagggaggaggaggcgagaagatggcggacgaccccagtgctgccgacaggaacgtggagatctggaagatcaagaagctcattaagagcttggaggcggcccgcgggtgagcgccgcgtccggcaccctccgtgccctcttggttcccggacccctcaggatggacgcccccgcgccgcatggccggatgaggagaaccaggcactagccaactcccgccttctggatctctggcaatggcaccagcatgatatcattgatcattcctcccaaagaccagatttcacgagtggcaaaaatgttagcggatgagtttggaactgcatctaacattaagtcacgagtaaaccgcctttcagtcctgggagccattacatctgtacaacaaagactcaaactttataacaaagtacctccaaatggtctggttgtatactgtggaacaattgtaacagaagaaggaaaggaaaagaaagtcaacattgactttgaacctttcaaaccaattaatacgtcattgtatttgtgtgacaacaaattccatacagaggctcttacagcactactttcagatgatagcaagtttggattcattgtaatagatggtagtggtgcactttttggcacactccaaggaaacacaagagaagtcctgcacaaattcactgtggatctcccaaagaaacacggtagaggaggtcagtcagccttgcgttttgcccgtttaagaatggaaaagcgacataactatgttcggaaagtagcagagactgctgtgcagctgtttatttctggggacaaagtgaatgtggctggtctagttttagctggatccgctgactttaaaactgaactaagtcaatctgatatgt

SEQ ID NO: 6803 - DNA, 713 bp, Homo sapiens
  source 1..713: mol_type = unassigned DNA; mol_type = unassigned DNA
aacacatgcagctgcctggagagagggagccggtgtcctacgtcagagccgccgccgccgcggagccgccgccggggaggagcagccgctgccgcccaggactgggcccttagggaggaggaggcgagaagatggcggacgaccccagtgctgccgacaggaacgtggagatctggaagatcaagaagctcattaagagcttggaggcggcccgcggacgttaaccctctgggcgaagcattgatgaaagctttgataagccaaagtgcccctaaaaccaatgagaacaagaagagaatctgagtgcagaggcccctgggagctttgagggatacattgctcaatggcaccagcatgatatcattgatcattcctcccaaagaccagatttcacgagtggcaaaaatgttagcggatgagtttggaactgcatctaacattaagtcacgagtaaaccgcctttcagtcctgggagccattacatctgtacaacaaagactcaaactttataacaaagtacctccaaatggtctggttgtatactgtggaacaattgtaacagaagaaggaaaggaaaagaaagtcaacattgactttgaacctttcaaaccaattaatacgtcattgtatttgtgtgacaacaaattccatacagaggctcttacagcactactttcagatgatagcaagtttggattcattgtaatagatgg

SEQ ID NO: 6804 - DNA, 608 bp, Homo sapiens
  source 1..608: mol_type = unassigned DNA; mol_type = unassigned DNA
atgtgaaaagttgatttcagcacaagaatttgacattctggtttccagcccaggattgtcatttatgggtagatttgcaattttagaatgacagcccctccaagctcttcattattactgttatatgaaacaggatgtgcttaattgtactgaaggcccaattcacagacgttaaccctctgggcgaagcattgatgaaagctttgataagccaaagtgcccctaaaaccaatgagaacaagaagagaatctgagtgcagaggcccctgggagctttgagggatacattgctcaatggcaccagcatgatatcattgatcattcctcccaaagaccagatttcacgagtggcaaaaatgttagcggatgagtttggaactgcatctaacattaagtcacgagtaaaccgcctttcagtcctgggagccattacatctgtacaacaaagactcaaactttataacaaagtacctccaaatggtctggttgtatactgtggaacaattgtaacagaagaaggaaaggaaaagaaagtcaacattgactttgaacctttcaaaccaattaatacgtcattgtatttgtgtgacaacaaattccatacagag

SEQ ID NO: 6805 - DNA, 6123 bp, Homo sapiens
  source 1..6123: mol_type = unassigned DNA; mol_type = unassigned DNA
ggagagggctgcgcgcttctcgccaagcaagcgggaggcgcactggggccgccgccgttcccgcgctcctccctctcctctgcacccactgtcacgctacccgcccgcgggggagcctcgagagcctccaggtgaattgaaagtcgtttccgggggaggacggagagggtgctgcagtcctggcatgccctgaaactgcaagtcgggcagaaacgacccggcggaggagcagggcgcgcagcgccctgcgcagcatccccgggctgccagaagaggccaccactcggctggcagccgcgagcggcggccgaacctcggccccagactcgggcccccggcacgctcgcccgggagataccccttccccctcttgcgcatttcgcagctgcgctggtgtggggcatgagagcgaggtggctccaggtctccgcggagcagctgccagtgggagagcgaggagaggcgagggggcggcagcctcggcccgaaacggagatcctggggtcctaaatttgtggccgattgcactgtgtcctggagacggagtggaaccacagcccagagcccctgggaatcatccctgaaagactgcattacttctccatggagtcttcctcctcctgcttattttctttttggaacaaggcaaaggcaatctgcatgtaacatcaccagaagatgcagaatgccgcagaaccaaggaacgcctttctaatggaaacagtcgtggttcagtttccaagtcttcccgcaatatcccaaggagacacaccctaggggggccccgaagttccaaggaaatactgggaatgcaaacatctgagatggatcggaagagagaagcgttcctagaacatctgaagcagaagtacccccaccacgcctctgcaatcatgggtcaccaagagaggctgagagaccagacaaggagccccaaactgtctcacagtcctcaaccacccagtctgggtgacccggtcgagcatttatcagagacgtccgctgattctttggaagccatgtctgagggggatgctccaacccctttttccagaggcagccggactcgtgcgagccttcctgtggtgaggtcaaccaaccagacgaaagaaagatctctgggggttctctatctccagtatggagatgaaaccaagcagctcaggatgccgaatgaaatcacaagtgcagacacaatccgtgctctcttcgtaagtgcctttccacagcagctcaccatgaaaatgctggaatcgcccagtgtcgccatttacatcaaagatgaaagcagaaatgtctattatgaattaaatgatgtaaggaacattcaagacagatcactcctcaaagtgtacaacaaggatcctgcacatgcgtttaatcacacaccaaaaactatgaatggagacatgaggatgcagagagaacttgtttatgcaagaggagatggccctggggcccctcgccccggatctactgctcatccaccccatgcgattccaaattccccaccgtctactccagtgccccattccatgcccccctccccgtccagaattccttatgggggcacccgctccatggttgttcctggcaatgccaccatccccagggacagaatctccagcctgccagtctccagacccatctctccaagcccaagcgccattttagaaagaagagatgtcaagcctgatgaagacatgagtggcaaaaacattgcaatgtacagaaatgagggtttctatgctgatccttacctttatcacgagggacggatgagcatagcctcatcccatggtggacacccactggatgtccccgaccacatcattgcatatcaccgcaccgccatccggtcagcgagtgcttattgtaacccctcaatgcaagcggaaatgcatatggaacaatcactgtacagacagaaatcaaggaaatatccggatagccatttgcctacactgggctccaaaacaccccctgcctctcctcacagagtcagtgacctgaggatgatagacatgcacgctcactataatgcccacggcccccctcacaccatgcagccagaccgggcctctccgagccgccaggcctttaaaaaggagccaggcaccttggtgtatatagaaaagccacggagcgctgcaggattatccagccttgtagacctcggccctcctctaatggagaagcaagtttttgcctacagcacggcgacaatacccaaagacagagagaccagagagaggatgcaagccatggagaaacagattgccagtttaactggccttgttcagtctgcgctttttaaagggcccattacaagttatagcaaagatgcgtctagcgagaaaatgatgaaaaccacagccaacaggaaccacacagatagtgcaggaacgccccatgtgtctggtgggaagatgctcagtgctctggagtccacggtgcctcccagccagcctccacctgtgggcacctcagccatccacatgagcctgcttgagatgaggcggagcgtggcggaactcaggctccagctccagcagatgcggcagctccagctgcagaaccaggagttgctgagggcaatgatgaagaaggccgagctggaaatcagtggcaaagtgatggaaacaatgaagagactggaggatcccgtgcagcgacagcgcgtcctagtggagcaagagagacaaaaatatcttcatgaggaagagaagatcgtcaagaagttgtgcgagttggaagactttgttgaagacttgaagaaggactccacggcagccagccgattggttactctgaaagacgtggaagacggggctttcctcctgcgtcaagtgggagaggctgtagctaccctgaaaggagaatttccaaccttacaaaacaagatgcgagccatcctgcgcatagaagtggaggccgtgcggtttctgaaggaggagccacacaagctggacagtctcctgaagcgtgtgcgcagcatgacagacgtcctgaccatgctgcggagacatgtcactgatgggctcctgaaaggcacggacgcagcccaagccgcacagtacatggctatggaaaaggccacagccgcagaagtcctgaagagtcaggaggaggcagcccacacctccggccagcccttccacagcacaggtgcccctggcgatgcgaagtcggaagtggtgcctttgtccggcatgatggttcgccacgcgcagagctcccctgtggtcatccagccctcccagcactccgtggccctgctgaaccctgctcagaacttgcctcacgtggccagctccccagccgtcccccaggaagcaacctccactctgcagatgtcgcaggctccgcagtccccacagatacccatgaatgggtctgccatgcagagcttgttcattgaagaaatccacagtgtgagtgccaagaacagggcagtgtctatcgagaaagcagaaaagaaatgggaggaaaaaaggcaaaatctggatcactataatgggaaagagtttgagaagctcctagaagaagctcaggccaatatcatgaagtcaataccaaatctggagatgccgccagccacaggcccactgccaaggggagatgccccagtggacaaggtggaactttcagaagattctccaaattcggaacaggacttggaaaagctggggggaaagtcgccccctcctcctccgccacctcctcgtcgaagctacctgccaggatcgggactcaccaccacgaggtcaggcgatgtggtctacaccggcagaaaggagaacatcaccgctaaggcaagcagtgaagatgctggaccaagcccacagaccagagctacaaaatatccagcagaggagcctgcttcagcctggaccccatccccaccgcctgtcaccacctcctcctcaaaggatgaggaggaagaagaagaagaaggagacaaaataatggcagaactccagggctccagcggggccccacagacgagcaggatgcctgtccccatgagtgccaagaacagacccggaaccctggacaaacccggcaagcagtccaaactgcaggatccccgccaatatcgtcaggctaatggaagtgctaagaaatctggtggggactttaagcctacttccccctccttacctgcttctaagattccagccctttctcccagctctgggaaaagcagttctctgccctcttctagtggtgacagctctaacctccctaatccacctgctactaaaccatcgattgcttctaaccctctcagcccccaaacaggaccacctgctcactctgcctccctcatcccttctgtctctaatggctctttgaagtttcagagcctcactcatacaggtaaaggtcaccatctttcattctcaccgcagagtcaaaatggccgagcaccccctcctttgtcattttcctcctcccctccttctcctgcctcctccgtctcactgaatcaaggtgccaagggcaccaggaccatccatactcccagcctcaccagctacaaggcacagaatggaagttcaagcaaagccaccccatccacagcaaaagaaacctcttaaaggtcaaatcctattaggcacaagtcggagttacatttaaaaaaaattaacagtctacaacaactgttttcacaagagaatgtaacatattgctgtatcgtttgaggcttaatgctaaatatgtgctaaatactggattaatagatttcagtaaagctcgttcgttttgtttggttttctttttacctagttgctatagtgtctacagtctatactcaatacctataaaatgcagtaagcatgtgttacagaaagaggttctggtgggagagaaaggtgcgtgtgagacaggagaattgtcttaagcatataaaacatgtatgattccagaattttagtatgttttgtataaaactatttttcattacggagactagaagtgaacagagaattacacaagtgtgactatacaaattgtaaaacagatactataatatttccttttattttagtgttatttagctttattacagatttctatttttgtcaaaacttcatggttcctttcaagatcttttttgccaaaacattttgatactatagcattgtacatttgaaagtagtgttctagactataaaaccaatgaacttctacatgagccctacagacaggcatgtgtagaaggcaatttatcaaacctattgcactgccatgaaaagtgtgtataataatttgctagcccaagcaagctagttttctttgcttgcttcttttctttcttttttccttccttttttttttttttttcttttttaacatgttgagattctctagttgttttctttggcgtatctaaccccttcttttgttttctgagacctggtaacccacgctcttgcattgtggattttaaaatgtatactctgtacggttctgtaaaccgaaaaacttttgtaaatatataaatatacatagacataaaaatactgtatgtgacagcacatagagtagttttcccacaccaaagttaatttttatgcatgctttaaaagtatatatcgggaccggcagaaatggaagtatccatacatttttaaaaagcaacaagtttgcacagctagagtgtttttgtaaataaatgtatttgtataacacagtcatgtaatatacagaactataagcagagactttgcaaaactaaataaagggctgcatgcttattattttttgtaccttgtcactataactacttcctagtcaaagaacgaaatgtaactgttaccgagttaaatgtttttccgctttgagggatgtaaccacatccactcagaggacactacttttctgaaagctctggggtgactaatgatgagttcctaataaattaattgcaagtgtggtgccttggatgtggcctgttggctcgctttcttctctgtggcttatcaaggtgtagatgacagaaagcaaacctggatacagagtttccaccctcagttcctggaggggctcttattattttctctctttttaaaaaacttccagtagaagtaaagtggaaataaaatgtctttatca

SEQ ID NO: 6806 - DNA, 543 bp, Homo sapiens
  source 1..543: mol_type = unassigned DNA; mol_type = unassigned DNA
ggcgcactggggccgccgccgttcccgcgctcctccctctcctctgcacccactgtcacgctacccgcccgcgggggagcctcgagagcctccaggtgaattgaaagtcgtttccgggggaggacggagagggtgctgcagtcctggcatgccctgaaactgcaagtcgggcagaaacgacccggcggaggagcagggcgcgcagcgccctgcgcagcatccccgggctgccagaagaggccaccactcggctggcagccgcgagcggcggccgaacctcggccccagactcgggcccccggcacgctcgcccgggagataccccttccccctcttgcgcatttcgcagctgcgctggtgtggggcatgagagcgaggtggctccaggtctccgcggagcagctgccagtgggagagcgaggagaggcgagggggcggcagcctcggcccgaagactgtttccttgggccctcggtttaatgctgtccaccacccatgagcaaaactctttctatggcaagaaacatcgaacacctgtagtgg

SEQ ID NO: 6807 - DNA, 649 bp, Homo sapiens
  source 1..649: mol_type = unassigned DNA; mol_type = unassigned DNA
cccagcactttccgtccagctgcacttcatactgtaactgtgtccgttgaaaagtgaagctcaaaggattttttagaatctgctgccccagcaggtaacattctggagttttgttgtttttttttttttcttgttgttttttctgccatttaaaatgtccaaaccctctcgcttggctagacctttcttctctaatgcagcttctaagctgccatcagctaggcgggatgatttgaacagcaaacagaaaaaaaacagcttaggtgagaagattttgagaactgggagtgaaggaaatttggtcaaacagcagcaggtgcaaacggcggcaactcctgcacagcggaaagctacaccacacaaagaacaaggcaaaggcaatctgcatgtaacatcaccagaagatgcagaatgccgcagaaccaaggaacgcctttctaatggaaacagtcgtggttcagtttccaagtcttcccgcaatatcccaaggagacacaccctaggggggccccgaagttccaaggaaatactgggaatgcaaacatctgagatggatcggaagagagaagcgttcctagaacatctgaagcagaagtacccccaccacgcctctgcaatcatgggtcaccaagagaggctgagagaccag

SEQ ID NO: 6808 - DNA, 3203 bp, Homo sapiens
  source 1..3203: mol_type = unassigned DNA; mol_type = unassigned DNA
agagcctcggtggtttgcagcagtggaaccaggcaggcccagttgtgggtaggagaggccgtcacctgttgaggcctcccccccacacccccgcatcgccctgccctggcagagcccagcccccagtccccggagagcgcgcctgaggacggacggacggacggacggacagacctagggacggagggccaggggcaggggagatccaagaggccccgcgctggaatgcagttttctcgggcgagggagactttgcaccggagtggaaaatagtttggggtggggtttcgcaccgtcccctcctccccagccccgggccccctcccaggcgctttctgggagcttttagaactgcgctctgaagtttccagagagcgaggagcttttgcggcaggcagagacaatggaagaaaatgaaagccagaaatgtgagccgtgccttccttactcagcagacagaagacagatgcaggaacaaggcaaaggcaatctgcatgtaacatcaccagaagatgcagaatgccgcagaaccaaggaacgcctttctaatggaaacagtcgtggttcagtttccaagtcttcccgcaatatcccaaggagacacaccctaggggggccccgaagttccaaggaaatactgggaatgcaaacatctgagatggatcggaagagagaagcgttcctagaacatctgaagcagaagtacccccaccacgcctctgcaatcatgggtcaccaagagaggctgagagaccagacaaggagccccaaactgtctcacagtcctcaaccacccagtctgggtgacccggtcgagcatttatcagagacgtccgctgattctttggaagccatgtctgagggggatgctccaacccctttttccagaggcagccggactcgtgcgagccttcctgtggtgaggtcaaccaaccagacgaaagaaagatctctgggggttctctatctccagtatggagatgaaaccaagcagctcaggatgccgaatgaaatcacaagtgcagacacaatccgtgctctcttcgtaagtgcctttccacagcagctcaccatgaaaatgctggaatcgcccagtgtcgccatttacatcaaagatgaaagcagaaatgtctattatgaattaaatgatgtaaggaacattcaagacagatcactcctcaaagtgtacaacaaggatcctgcacatgcgtttaatcacacaccaaaaactatgaatggagacatgaggatgcagagagaacttgtttatgcaagaggagatggccctggggcccctcgccccggatctactgctcatccaccccatgcgattccaaattccccaccgtctactccagtgccccattccatgcccccctccccgtccagaattccttatgggggcacccgctccatggttgttcctggcaatgccaccatccccagggacagaatctccagcctgccagtctccagacccatctctccaagcccaagcgccattttagaaagaagagatgtcaagcctgatgaagacatgagtggcaaaaacattgcaatgtacagaaatgagggtttctatgctgatccttacctttatcacgagggacggatgagcatagcctcatcccatggtggacacccactggatgtccccgaccacatcattgcatatcaccgcaccgccatccggtcagcgagtgcttattgtaacccctcaatgcaagcggaaatgcatatggaacaatcactgtacagacagaaatcaaggaaatatccggatagccatttgcctacactgggctccaaaacaccccctgcctctcctcacagagtcagtgacctgaggatgatagacatgcacgctcactataatgcccacggcccccctcacaccatgcagccagaccgggcctctccgagccgccaggcctttaaaaaggagccaggcaccttggtgtatatagaaaagccacggagcgctgcaggattatccagccttgtagacctcggccctcctctaatggagaagcaagtttttgcctacagcacggcgacaatacccaaagacagagagaccagcgagaaaatgatgaaaaccacagccaacaggaaccacacagatagtgcaggaacgccccatgtgtctggtgggaagatgctcagtgctctggagtccacggtgcctcccagccagcctccacctgtgggcacctcagccatccacatgagcctgcttgagatgaggcggagcgtggcggaactcaggctccagctccagcagatgcggcagctccagctgcagaaccaggagttgctgagggcaatgatgaagaaggccgagctggaaatcagtggcaaagtgatggaaacaatgaagagactggaggatcccgtgcagcgacagcgcgtcctagtggagcaagagagacaaaaatatcttcatgaggaagagaagatcgtcaagaagttgtgcgagttggaagactttgttgaagacttgaagaaggactccacggcagccagccgattggttactctgaaagacgtggaagacggggctttcctcctgcgtcaagtgggagaggctgtagctaccctgaaaggagaatttccaaccttacaaaacaagatgcgagccatcctgcgcatagaagtggaggccgtgcggtttctgaaggaggagccacacaagctggacagtctcctgaagcgtgtgcgcagcatgacagacgtcctgaccatgctgcggagacatgtcactgatgggctcctgaaaggcacggacgcagcccaagccgcacagtacatggctatggaaaaggccacagccgcagaagtcctgaagagtcaggaggaggcagcccacacctccggccagcccttccacagcacaggtgcccctggcgatgcgaagtcggaagtggtgcctttgtccggcatgatggttcgccacgcgcagagctcccctgtggtcatccagccctcccagcactccgtggccctgctgaaccctgctcagaacttgcctcacgtggccagctccccagccgtcccccaggaagcaacctccactctgcagatgtcgcaggctccgcagtccccacagatacccatgaatgggtctgccatgcagagcttgttcattgaagaaatccacagtgtgagtgccaagaacagggcagtgtctatcgagaaagcag

SEQ ID NO: 6809 - DNA, 7381 bp, Homo sapiens
  source 1..7381: mol_type = unassigned DNA; mol_type = unassigned DNA
agcgaggagcttttgcggcaggcagagacaatggaagaaaatgaaagccagaaatgtgagccgtgccttccttactcagcagacagaagacagatgcaggaacaaggcaaaggcaatctgcatgtaacatcaccagaagatgcagaatgccgcagaaccaaggaacgcctttctaatggaaacagtcgtggttcagtttccaagtcttcccgcaatatcccaaggagacacaccctaggggggccccgaagttccaaggaaatactgggaatgcaaacatctgagatggatcggaagagagaagcgttcctagaacatctgaagcagaagtacccccaccacgcctctgcaatcatgggtcaccaagagaggctgagagaccagacaaggagccccaaactgtctcacagtcctcaaccacccagtctgggtgacccggtcgagcatttatcagagacgtccgctgattctttggaagccatgtctgagggggatgctccaacccctttttccagaggcagccggactcgtgcgagccttcctgtggtgaggtcaaccaaccagacgaaagaaagatctctgggggttctctatctccagtatggagatgaaaccaagcagctcaggatgccgaatgaaatcacaagtgcagacacaatccgtgctctcttcgtaagtgcctttccacagcagctcaccatgaaaatgctggaatcgcccagtgtcgccatttacatcaaagatgaaagcagaaatgtctattatgaattaaatgatgtaaggaacattcaagacagatcactcctcaaagtgtacaacaaggatcctgcacatgcgtttaatcacacaccaaaaactatgaatggagacatgaggatgcagagagaacttgtttatgcaagaggagatggccctggggcccctcgccccggatctactgctcatccaccccatgcgattccaaattccccaccgtctactccagtgccccattccatgcccccctccccgtccagaattccttatgggggcacccgctccatggttgttcctggcaatgccaccatccccagggacagaatctccagcctgccagtctccagacccatctctccaagcccaagcgccattttagaaagaagagatgtcaagcctgatgaagacatgagtggcaaaaacattgcaatgtacagaaatgagggtttctatgctgatccttacctttatcacgagggacggatgagcatagcctcatcccatggtggacacccactggatgtccccgaccacatcattgcatatcaccgcaccgccatccggtcagcgagtgcttattgtaacccctcaatgcaagcggaaatgcatatggaacaatcactgtacagacagaaatcaaggaaatatccggatagccatttgcctacactgggctccaaaacaccccctgcctctcctcacagagtcagtgacctgaggatgatagacatgcacgctcactataatgcccacggcccccctcacaccatgcagccagaccgggcctctccgagccgccaggcctttaaaaaggagccaggcaccttggtgtatatagaaaagccacggagcgctgcaggattatccagccttgtagacctcggccctcctctaatggagaagcaagtttttgcctacagcacggcgacaatacccaaagacagagagaccagagagaggatgcaagccatggagaaacagattgccagtttaactggccttgttcagtctgcgctttttaaagggcccattacaagttatagcaaagatgcgtctagcgagaaaatgatgaaaaccacagccaacaggaaccacacagatagtgcaggaacgccccatgtgtctggtgggaagatgctcagtgctctggagtccacggtgcctcccagccagcctccacctgtgggcacctcagccatccacatgagcctgcttgagatgaggcggagcgtggcggaactcaggctccagctccagcagatgcggcagctccagctgcagaaccaggagttgctgagggcaatgatgaagaaggccgagctggaaatcagtggcaaagtgatggaaacaatgaagagactggaggatcccgtgcagcgacagcgcgtcctagtggagcaagagagacaaaaatatcttcatgaggaagagaagatcgtcaagaagttgtgcgagttggaagactttgttgaagacttgaagaaggactccacggcagccagccgattggttactctgaaagacgtggaagacggggctttcctcctgcgtcaagtgggagaggctgtagctaccctgaaaggagaatttccaaccttacaaaacaagatgcgagccatcctgcgcatagaagtggaggccgtgcggtttctgaaggaggagccacacaagctggacagtctcctgaagcgtgtgcgcagcatgacagacgtcctgaccatgctgcggagacatgtcactgatgggctcctgaaaggcacggacgcagcccaagccgcacagtacatggctatggaaaaggccacagccgcagaagtcctgaagagtcaggaggaggcagcccacacctccggccagcccttccacagcacaggtgcccctggcgatgcgaagtcggaagtggtgcctttgtccggcatgatggttcgccacgcgcagagctcccctgtggtcatccagccctcccagcactccgtggccctgctgaaccctgctcagaacttgcctcacgtggccagctccccagccgtcccccaggaagcaacctccactctgcagatgtcgcaggctccgcagtccccacagatacccatgaatgggtctgccatgcagagcttgttcattgaagaaatccacagtgtgagtgccaagaacagggcagtgtctatcgagaaagcagaaaagaaatgggaggaaaaaaggcaaaatctggatcactataatgggaaagagtttgagaagctcctagaagaagctcaggccaatatcatgaagtcaataccaaatctggagatgccgccagccacaggcccactgccaaggggagatgccccagtggacaaggtggaactttcagaagattctccaaattcggaacaggacttggaaaagctggggggaaagtcgccccctcctcctccgccacctcctcgtcgaagctacctgccaggatcgggactcaccaccacgaggtcaggcgatgtggtctacaccggcagaaaggagaacatcaccgctaaggcaagcagtgaagatgctggaccaagcccacagaccagagctacaaaatatccagcagaggagcctgcttcagcctggaccccatccccaccgcctgtcaccacctcctcctcaaaggatgaggaggaagaagaagaagaaggagacaaaataatggcagaactccaggcattccagaagtgttcctttatggatgtaaattcaaacagtcatgctgagccatcccgggctgacagtcacgttaaagacactaggtcgggcgccacagtgccacccaaggagaagaagaatttggaatttttccatgaagatgtacggaaatctgatgttgaatatgaaaatggcccccaaatggaattccaaaaggttaccacaggggctgtaagacctagtgaccctcctaagtgggaaagaggaatggagaatagtatttctgatgcatcaagaacatcagaatataaaactgagatcataatgaaggaaaattccatatccaatatgagtttactcagagacagtagaaactattcccaggaaactgtgcctaaggccagtttcggtttctctggcattagtccattagaagatgaaataaacaaagggtctaaaatctcaggcctgcaatactctatacctgacaccgagaaccagacgctgaattacggaaagacaaaggagatggaaaagcaaaatacggataagtgtcacgtttcctctcacactagactaacagaatcaagcgtgcatgattttaaaacagaagatcaagaggttatcacgacagattttggccaagttgttctaagacccaaggaggcaaggcatgctaacgtgaaccctaatgaggatggagaatcaagttcaagttctcccactgaagaaaatgcagccactgacaatattgccttcatgattaccgaaaccactgtccaggttctttccagtggggaggtgcatgatattgttagccaaaagggagaagacatacagacggttaatatcgatgccagaaaagagatgaccccccgacaagaagggactgacaatgaggatccagtcgtgtgcctggacaagaaaccagtgatcatcattttcgatgagcccatggacatccggtctgcctataagagactttcaactatctttgaggaatgtgatgaggaattagagagaatgatgatggaggaaaagatagaggaggaggaagaggaggaaaatggggattctgtagtccagaataataacacttcccagatgtctcataagaaggtggccccaggcaatcttagaaccggacaacaggtggaaacaaagtcacagccacactccctggccacagagaccagaaacccaggaggacaggaaatgaacagaacggagctgaacaagttcagccacgtggattctccaaattcggaatgcaagggtgaggacgcgaccgatgaccagtttgaaagccccaagaaaaagtttaaattcaaattccctaagaagcaactcgccgctctcactcaagccattcgcaccggaactaaaacagggaagaagactttgcaagtggtagtctatgaagaagaggaagaggatggcaccctgaaacagcacaaagaagccaagcgcttcgaaatcgctaggtctcaacctgaagacacccctgaaaacacagtgaggaggcaagagcagcccagcatcgagagtacatctccgatttcaagaactgatgaaattagaaaaaacacctacagaacattggatagcctggagcagaccattaaacagctcgaaaatacaatcagtgaaatgagtcccaaagccctagttgatacctcatgttcttccaacagagattctgttgcaagttcatcccacatagcccaagaggcctctccccgacccttgctagttccggatgaaggtcccactgccctagagccccctacgtcgataccttcagcttcacgtaagggctccagcggggccccacagacgagcaggatgcctgtccccatgagtgccaagaacagacccggaaccctggacaaacccggcaagcagtccaaactgcaggatccccgccaatatcgtcaggctaatggaagtgctaagaaatctggtggggactttaagcctacttccccctccttacctgcttctaagattccagccctttctcccagctctgggaaaagcagttctctgccctcttctagtggtgacagctctaacctccctaatccacctgctactaaaccatcgattgcttctaaccctctcagcccccaaacaggaccacctgctcactctgcctccctcatcccttctgtctctaatggctctttgaagtttcagagcctcactcatacaggtaaaggtcaccatctttcattctcaccgcagagtcaaaatggccgagcaccccctcctttgtcattttcctcctcccctccttctcctgcctcctccgtctcactgaatcaaggtgccaagggcaccaggaccatccatactcccagcctcaccagctacaaggcacagaatggaagttcaagcaaagccaccccatccacagcaaaagaaacctcttaaaggtcaaatcctattaggcacaagtcggagttacatttaaaaaaaattaacagtctacaacaactgttttcacaagagaatgtaacatattgctgtatcgtttgaggcttaatgctaaatatgtgctaaatactggattaatagatttcagtaaagctcgttcgttttgtttggttttctttttacctagttgctatagtgtctacagtctatactcaatacctataaaatgcagtaagcatgtgttacagaaagaggttctggtgggagagaaaggtgcgtgtgagacaggagaattgtcttaagcatataaaacatgtatgattccagaattttagtatgttttgtataaaactatttttcattacggagactagaagtgaacagagaattacacaagtgtgactatacaaattgtaaaacagatactataatatttccttttattttagtgttatttagctttattacagatttctatttttgtcaaaacttcatggttcctttcaagatcttttttgccaaaacattttgatactatagcattgtacatttgaaagtagtgttctagactataaaaccaatgaacttctacatgagccctacagacaggcatgtgtagaaggcaatttatcaaacctattgcactgccatgaaaagtgtgtataataatttgctagcccaagcaagctagttttctttgcttgcttcttttctttcttttttccttccttttttttttttttttcttttttaacatgttgagattctctagttgttttctttggcgtatctaaccccttcttttgttttctgagacctggtaacccacgctcttgcattgtggattttaaaatgtatactctgtacggttctgtaaaccgaaaaacttttgtaaatatataaatatacatagacataaaaatactgtatgtgacagcacatagagtagttttcccacaccaaagttaatttttatgcatgctttaaaagtatatatcgggaccggcagaaatggaagtatccatacatttttaaaaagcaacaagtttgcacagctagagtgtttttgtaaataaatgtatttgtataacacagtcatgtaatatacagaactataagcagagactttgcaaaactaaataaagggctgcatgcttattattttttgtaccttgtcactataactacttcctagtcaaagaacgaaatgtaactgttaccgagttaaatgtttttccgctttgagggatgtaaccacatccactcagaggacactacttttctgaaagctctggggtgactaatgatgagttcctaataaattaattgcaagtgtggtgccttggatgtggcctgttggctcgctttcttctctgtggcttatcaaggtgtagatgacagaaagcaaacctggatacagagtttccaccctcagttcctggaggggctcttattattttctctctttttaaaaaacttccagtagaagtaaagtggaaataaaatgtctttatca

SEQ ID NO: 6810 - DNA, 568 bp, Homo sapiens
  source 1..568: mol_type = unassigned DNA; mol_type = unassigned DNA
gaggagcttttgcggcaggcagagacaatggaagaaaatgaaagccagaaatgtgagccgtgccttccttactcagcagacagaagacagatgcaggaacaaggcaaaggcaatctgcatgtaacatcaccagaagatgcagaatgccgcagaaccaaggaacgcctttctaatggaaacagtcgtggttcagtttccaagtcttcccgcaatatcccaaggagacacaccctaggggggccccgaagttccaaggaaatactgggaatgcaaacatctgagatggatcggaagagagaagcgttcctagaacatctgaagcagaagtacccccaccacgcctctgcaatcatgggtcaccaagagaggctgagagaccaggctttgaagggcatgctgatctctcttcaggcagaacttgacattcaaagacaaggagccccaaactgtctcacagtcctcaaccacccagtctgggtgacccggtcgagcatttatcagagacgtccgctgattctttggaagccatgtctgagggggatgctccaacccctttttccagaggcag

SEQ ID NO: 6811 - DNA, 2589 bp, Homo sapiens
  source 1..2589: mol_type = unassigned DNA; mol_type = unassigned DNA
aaaagaaaacagcccagacatggaggggggttttacctgacagctccgaaggaagaccctggagtccgttccagacaaaaacttccagaagaattagattttctgctttaactgccgcctcacctgtggagctctgggtacagacaaggagccccaaactgtctcacagtcctcaaccacccagtctgggtgacccggtcgagcatttatcagagacgtccgctgattctttggaagccatgtctgagggggatgctccaacccctttttccagaggcagccggactcgtgcgagccttcctgtggtgaggtcaaccaaccagacgaaagaaagatctctgggggttctctatctccagtatggagatgaaaccaagcagctcaggatgccgaatgaaatcacaagtgcagacacaatccgtgctctcttcgtaagtgcctttccacagcagctcaccatgaaaatgctggaatcgcccagtgtcgccatttacatcaaagatgaaagcagaaatgtctattatgaattaaatgatgtaaggaacattcaagacagatcactcctcaaagtgtacaacaaggatcctgcacatgcgtttaatcacacaccaaaaactatgaatggagacatgaggatgcagagagaacttgtttatgcaagaggagatggccctggggcccctcgccccggatctactgctcatccaccccatgcgattccaaattccccaccgtctactccagtgccccattccatgcccccctccccgtccagaattccttatgggggcacccgctccatggttgttcctggcaatgccaccatccccagggacagaatctccagcctgccagtctccagacccatctctccaagcccaagcgccattttagaaagaagagatgtcaagcctgatgaagacatgagtggcaaaaacattgcaatgtacagaaatgagggtttctatgctgatccttacctttatcacgagggacggatgagcatagcctcatcccatggtggacacccactggatgtccccgaccacatcattgcatatcaccgcaccgccatccggtcagcgagtgcttattgtaacccctcaatgcaagcggaaatgcatatggaacaatcactgtacagacagaaatcaaggaaatatccggatagccatttgcctacactgggctccaaaacaccccctgcctctcctcacagagtcagtgacctgaggatgatagacatgcacgctcactataatgcccacggcccccctcacaccatgcagccagaccgggcctctccgagccgccaggcctttaaaaaggagccaggcaccttggtgtatatagaaaagccacggagcgctgcaggattatccagccttgtagacctcggccctcctctaatggagaagcaagtttttgcctacagcacggcgacaatacccaaagacagagagaccagcgagaaaatgatgaaaaccacagccaacaggaaccacacagatagtgcaggaacgccccatgtgtctggtgggaagatgctcagtgctctggagtccacggtgcctcccagccagcctccacctgtgggcacctcagccatccacatgagcctgcttgagatgaggcggagcgtggcggaactcaggctccagctccagcagatgcggcagctccagctgcagaaccaggagttgctgagggcaatgatgaagaaggccgagctggaaatcagtggcaaagtgatggaaacaatgaagagactggaggatcccgtgcagcgacagcgcgtcctagtggagcaagagagacaaaaatatcttcatgaggaagagaagatcgtcaagaagttgtgcgagttggaagactttgttgaagacttgaagaaggactccacggcagccagccgattggttactctgaaagacgtggaagacggggctttcctcctgcgtcaagtgggagaggctgtagctaccctgaaaggagaatttccaaccttacaaaacaagatgcgagccatcctgcgcatagaagtggaggccgtgcggtttctgaaggaggagccacacaagctggacagtctcctgaagcgtgtgcgcagcatgacagacgtcctgaccatgctgcggagacatgtcactgatgggctcctgaaaggcacggacgcagcccaagccgcacagtacatggctatggaaaaggccacagccgcagaagtcctgaagagtcaggaggaggcagcccacacctccggccagcccttccacagcacaggtgcccctggcgatgcgaagtcggaagtggtgcctttgtccggcatgatggttcgccacgcgcagagctcccctgtggtcatccagccctcccagcactccgtggccctgctgaaccctgctcagaacttgcctcacgtggccagctccccagccgtcccccaggaagcaacctccactctgcagatgtcgcaggctccgcagtccccacagatacccatgaatgggtctgccatgcagagcttgttcattgaagaaatccacagtgtgagtgccaagaacagggcagtgtctatcgagaaagcag

SEQ ID NO: 6812 - DNA, 3281 bp, Homo sapiens
  source 1..3281: mol_type = unassigned DNA; mol_type = unassigned DNA
acacatggaagaaacatttctcgttagttcagcattggttttagttatgctgatttccgggacaggaaaaatgccttcctactcagaattaactttcatagagtagaaacaaaacctctgaatgtccgtgaaatagttttaacaagagtggatactgctcctttaaaccacatattttgactaaaagcttccttctgtaaaaaacccaaggcttgcatttagtcaccatgaagacaggcaaagctgaaagcattggagagaggggtggtttcgaggtctctgcaagtctagaaagtttcttctagaaaagaaaggctcacggaaaatgtaagatgcagagagaacttgtttatgcaagaggagatggccctggggcccctcgccccggatctactgctcatccaccccatgcgattccaaattccccaccgtctactccagtgccccattccatgcccccctccccgtccagaattccttatgggggcacccgctccatggttgttcctggcaatgccaccatccccagggacagaatctccagcctgccagtctccagacccatctctccaagcccaagcgccattttagaaagaagagatgtcaagcctgatgaagacatgagtggcaaaaacattgcaatgtacagaaatgagggtttctatgctgatccttacctttatcacgagggacggatgagcatagcctcatcccatggtggacacccactggatgtccccgaccacatcattgcatatcaccgcaccgccatccggtcagcgagtgcttattgtaacccctcaatgcaagcggaaatgcatatggaacaatcactgtacagacagaaatcaaggaaatatccggatagccatttgcctacactgggctccaaaacaccccctgcctctcctcacagagtcagtgacctgaggatgatagacatgcacgctcactataatgcccacggcccccctcacaccatgcagccagaccgggcctctccgagccgccaggcctttaaaaaggagccaggcaccttggtgtatatagaaaagccacggagcgctgcaggattatccagccttgtagacctcggccctcctctaatggagaagcaagtttttgcctacagcacggcgacaatacccaaagacagagagaccagcgagaaaatgatgaaaaccacagccaacaggaaccacacagatagtgcaggaacgccccatgtgtctggtgggaagatgctcagtgctctggagtccacggtgcctcccagccagcctccacctgtgggcacctcagccatccacatgagcctgcttgagatgaggcggagcgtggcggaactcaggctccagctccagcagatgcggcagctccagctgcagaaccaggagttgctgagggcaatgatgaagaaggccgagctggaaatcagtggcaaagtgatggaaacaatgaagagactggaggatcccgtgcagcgacagcgcgtcctagtggagcaagagagacaaaaatatcttcatgaggaagagaagatcgtcaagaagttgtgcgagttggaagactttgttgaagacttgaagaaggactccacggcagccagccgattggttactctgaaagacgtggaagacggggctttcctcctgcgtcaagtgggagaggctgtagctaccctgaaaggagaatttccaaccttacaaaacaagatgcgagccatcctgcgcatagaagtggaggccgtgcggtttctgaaggaggagccacacaagctggacagtctcctgaagcgtgtgcgcagcatgacagacgtcctgaccatgctgcggagacatgtcactgatgggctcctgaaaggcacggacgcagcccaagccgcacagtacatggctatggaaaaggccacagccgcagaagtcctgaagagtcaggaggaggcagcccacacctccggccagcccttccacagcacaggtgcccctggcgatgcgaagtcggaagtggtgcctttgtccggcatgatggttcgccacgcgcagagctcccctgtggtcatccagccctcccagcactccgtggccctgctgaaccctgctcagaacttgcctcacgtggccagctccccagccgtcccccaggaagcaacctccactctgcagatgtcgcaggctccgcagtccccacagatacccatgaatgggtctgccatgcagagcttgttcattgaagaaatccacagtgtgagtgccaagaacagggcagtgtctatcgagaaagcagaaaagaaatgggaggaaaaaaggcaaaatctggatcactataatgggaaagagtttgagaagctcctagaagaagctcaggccaatatcatgaagtcaataccaaatctggagatgccgccagccacaggcccactgccaaggggagatgccccagtggacaaggtggaactttcagaagattctccaaattcggaacaggacttggaaaagctggggggaaagtcgccccctcctcctccgccacctcctcgtcgaagctacctgccaggatcgggactcaccaccacgaggtcaggcgatgtggtctacaccggcagaaaggagaacatcaccgctaaggcaagcagtgaagatgctggaccaagcccacagaccagagctacaaaatatccagcagaggagcctgcttcagcctggaccccatccccaccgcctgtcaccacctcctcctcaaaggatgaggaggaagaagaagaagaaggagacaaaataatggcagaactccaggcattccagaagtgttcctttatggatgtaaattcaaacagtcatgctgagccatcccgggctgacagtcacgttaaagacactaggtcgggcgccacagtgccacccaaggagaagaagaatttggaatttttccatgaagatgtacggaaatctgatgttgaatatgaaaatggcccccaaatggaattccaaaagggctccagcggggccccacagacgagcaggatgcctgtccccatgagtgccaagaacagacccggaaccctggacaaacccggcaagcagtccaaactgcaggatccccgccaatatcgtcaggtagttttaccttaaacccacttttggatggacgctatttcagttaagcaagtcactgacttagtttataccaaatattgtgctttctttgtaagataacggtttacatagacatcctggatctgggggcatgaagaaagtctaaataaacctttgttacacttt

SEQ ID NO: 6813 - DNA, 3059 bp, Homo sapiens
  source 1..3059: mol_type = unassigned DNA; mol_type = unassigned DNA
atgccagtgtcagcttctctccgaaaactgggtaatacgaaatggtctttattggttgtgaacactcgagctgagaaacattttaggatctttgtgtcttttgtgatgattttgtttctgaagaggaagctgtctaaaatattcaagtgtgcaaccaaggatttagatgaagccagcaaacaaaggaatcatgtaatcaggacctgagcgaatgtgcttactcacggcgttagttacacaggtgatttccttaagaaaaaatgcagagagaacttgtttatgcaagaggagatggccctggggcccctcgccccggatctactgctcatccaccccatgcgattccaaattccccaccgtctactccagtgccccattccatgcccccctccccgtccagaattccttatgggggcacccgctccatggttgttcctggcaatgccaccatccccagggacagaatctccagcctgccagtctccagacccatctctccaagcccaagcgccattttagaaagaagagatgtcaagcctgatgaagacatgagtggcaaaaacattgcaatgtacagaaatgagggtttctatgctgatccttacctttatcacgagggacggatgagcatagcctcatcccatggtggacacccactggatgtccccgaccacatcattgcatatcaccgcaccgccatccggtcagcgagtgcttattgtaacccctcaatgcaagcggaaatgcatatggaacaatcactgtacagacagaaatcaaggaaatatccggatagccatttgcctacactgggctccaaaacaccccctgcctctcctcacagagtcagtgacctgaggatgatagacatgcacgctcactataatgcccacggcccccctcacaccatgcagccagaccgggcctctccgagccgccaggcctttaaaaaggagccaggcaccttggtgtatatagaaaagccacggagcgctgcaggattatccagccttgtagacctcggccctcctctaatggagaagcaagtttttgcctacagcacggcgacaatacccaaagacagagagaccagcgagaaaatgatgaaaaccacagccaacaggaaccacacagatagtgcaggaacgccccatgtgtctggtgggaagatgctcagtgctctggagtccacggtgcctcccagccagcctccacctgtgggcacctcagccatccacatgagcctgcttgagatgaggcggagcgtggcggaactcaggctccagctccagcagatgcggcagctccagctgcagaaccaggagttgctgagggcaatgatgaagaaggccgagctggaaatcagtggcaaagtgatggaaacaatgaagagactggaggatcccgtgcagcgacagcgcgtcctagtggagcaagagagacaaaaatatcttcatgaggaagagaagatcgtcaagaagttgtgcgagttggaagactttgttgaagacttgaagaaggactccacggcagccagccgattggttactctgaaagacgtggaagacggggctttcctcctgcgtcaagtgggagaggctgtagctaccctgaaaggagaatttccaaccttacaaaacaagatgcgagccatcctgcgcatagaagtggaggccgtgcggtttctgaaggaggagccacacaagctggacagtctcctgaagcgtgtgcgcagcatgacagacgtcctgaccatgctgcggagacatgtcactgatgggctcctgaaaggcacggacgcagcccaagccgcacagtacatggctatggaaaaggccacagccgcagaagtcctgaagagtcaggaggaggcagcccacacctccggccagcccttccacagcacaggtgcccctggcgatgcgaagtcggaagtggtgcctttgtccggcatgatggttcgccacgcgcagagctcccctgtggtcatccagccctcccagcactccgtggccctgctgaaccctgctcagaacttgcctcacgtggccagctccccagccgtcccccaggaagcaacctccactctgcagatgtcgcaggctccgcagtccccacagatacccatgaatgggtctgccatgcagagcttgttcattgaagaaatccacagtgtgagtgccaagaacagggcagtgtctatcgagaaagcagaaaagaaatgggaggaaaaaaggcaaaatctggatcactataatgggaaagagtttgagaagctcctagaagaagctcaggccaatatcatgaagtcaataccaaatctggagatgccgccagccacaggcccactgccaaggggagatgccccagtggacaaggtggaactttcagaagattctccaaattcggaacaggacttggaaaagctggggggaaagtcgccccctcctcctccgccacctcctcgtcgaagctacctgccaggatcgggactcaccaccacgaggtcaggcgatgtggtctacaccggcagaaaggagaacatcaccgctaaggcaagcagtgaagatgctggaccaagcccacagaccagagctacaaaatatccagcagaggagcctgcttcagcctggaccccatccccaccgcctgtcaccacctcctcctcaaaggatgaggaggaagaagaagaagaaggagacaaaataatggcagaactccagggctccagcggggccccacagacgagcaggatgcctgtccccatgagtgccaagaacagacccggaaccctggacaaacccggcaagcagtccaaactgcaggatccccgccaatatcgtcaggtagttttaccttaaacccacttttggatggacgctatttcagttaagcaagtcactgacttagtttataccaaatattgtgctttctttgtaagataacggtttacatagacatcctggatctgggggcatgaagaaagtctaaataaacctttgttacacttttttaccacgcttttgcatgcttgcaataaaacatcttttactttgtga

SEQ ID NO: 6814 - DNA, 5706 bp, Homo sapiens
  source 1..5706: mol_type = unassigned DNA; mol_type = unassigned DNA
atgccagtgtcagcttctctccgaaaactgggtaatacgaaatggtctttattggttgtgaacactcgagctgagaaacattttaggatctttgtgtcttttgtgatgattttgtttctgaagaggaagctgtctaaaatattcaagtgtgcaaccaaggatttagatgaagccagcaaacaaaggaatcatgtaatcaggacctgagcgaatgtgcttactcacggcgttagttacacaggtgatttccttaagaaaaaatgcagagagaacttgtttatgcaagaggagatggccctggggcccctcgccccggatctactgctcatccaccccatgcgattccaaattccccaccgtctactccagtgccccattccatgcccccctccccgtccagaattccttatgggggcacccgctccatggttgttcctggcaatgccaccatccccagggacagaatctccagcctgccagtctccagacccatctctccaagcccaagcgccattttagaaagaagagatgtcaagcctgatgaagacatgagtggcaaaaacattgcaatgtacagaaatgagggtttctatgctgatccttacctttatcacgagggacggatgagcatagcctcatcccatggtggacacccactggatgtccccgaccacatcattgcatatcaccgcaccgccatccggtcagcgagtgcttattgtaacccctcaatgcaagcggaaatgcatatggaacaatcactgtacagacagaaatcaaggaaatatccggatagccatttgcctacactgggctccaaaacaccccctgcctctcctcacagagtcagtgacctgaggatgatagacatgcacgctcactataatgcccacggcccccctcacaccatgcagccagaccgggcctctccgagccgccaggcctttaaaaaggagccaggcaccttggtgtatatagaaaagccacggagcgctgcaggattatccagccttgtagacctcggccctcctctaatggagaagcaagtttttgcctacagcacggcgacaatacccaaagacagagagaccagcgagaaaatgatgaaaaccacagccaacaggaaccacacagatagtgcaggaacgccccatgtgtctggtgggaagatgctcagtgctctggagtccacggtgcctcccagccagcctccacctgtgggcacctcagccatccacatgagcctgcttgagatgaggcggagcgtggcggaactcaggctccagctccagcagatgcggcagctccagctgcagaaccaggagttgctgagggcaatgatgaagaaggccgagctggaaatcagtggcaaagtgatggaaacaatgaagagactggaggatcccgtgcagcgacagcgcgtcctagtggagcaagagagacaaaaatatcttcatgaggaagagaagatcgtcaagaagttgtgcgagttggaagactttgttgaagacttgaagaaggactccacggcagccagccgattggttactctgaaagacgtggaagacggggctttcctcctgcgtcaagtgggagaggctgtagctaccctgaaaggagaatttccaaccttacaaaacaagatgcgagccatcctgcgcatagaagtggaggccgtgcggtttctgaaggaggagccacacaagctggacagtctcctgaagcgtgtgcgcagcatgacagacgtcctgaccatgctgcggagacatgtcactgatgggctcctgaaaggcacggacgcagcccaagccgcacagtacatggctatggaaaaggccacagccgcagaagtcctgaagagtcaggaggaggcagcccacacctccggccagcccttccacagcacaggtgcccctggcgatgcgaagtcggaagtggtgcctttgtccggcatgatggttcgccacgcgcagagctcccctgtggtcatccagccctcccagcactccgtggccctgctgaaccctgctcagaacttgcctcacgtggccagctccccagccgtcccccaggaagcaacctccactctgcagatgtcgcaggctccgcagtccccacagatacccatgaatgggtctgccatgcagagcttgttcattgaagaaatccacagtgtgagtgccaagaacagggcagtgtctatcgagaaagcagaaaagaaatgggaggaaaaaaggcaaaatctggatcactataatgggaaagagtttgagaagctcctagaagaagctcaggccaatatcatgaagtcaataccaaatctggagatgccgccagccacaggcccactgccaaggggagatgccccagtggacaaggtggaactttcagaagattctccaaattcggaacaggacttggaaaagctggggggaaagtcgccccctcctcctccgccacctcctcgtcgaagctacctgccaggatcgggactcaccaccacgaggtcaggcgatgtggtctacaccggcagaaaggagaacatcaccgctaaggcaagcagtgaagatgctggaccaagcccacagaccagagctacaaaatatccagcagaggagcctgcttcagcctggaccccatccccaccgcctgtcaccacctcctcctcaaaggatgaggaggaagaagaagaagaaggagacaaaataatggcagaactccaggcattccagaagtgttcctttatggatgtaaattcaaacagtcatgctgagccatcccgggctgacagtcacgttaaagacactaggtcgggcgccacagtgccacccaaggagaagaagggctccagcggggccccacagacgagcaggatgcctgtccccatgagtgccaagaacagacccggaaccctggacaaacccggcaagcagtccaaactgcaggatccccgccaatatcgtcaggtagttttaccttaaacccacttttggatggacgctatttcagttaagcaagtcactgacttagtttataccaaatattgtgctttctttgtaagataacggtttacatagacatcctggatctgggggcatgaagaaagtctaaataaacctttgttacacttttttaccacgcttttgcatgcttgcaataaaacatcttttactttgtgactccaaactccaaattttaactgttaacacacggtgccagaccaggtggcttttctttggtgaatgtagtgtttcatctgaacacctcgggaagcagagacaaaccaacctgtggttgaactgcccttaacgtcaccactactaacgtctatgttgactgtattgtgttagaagcacattaacactccgtcacaatgcccgacccccaccccagtaattatccagacgcatggcccacctggcacacaggaaatggtagagctggaatgatgggactcctctcacaaatgtattcttcctttcctcctttcccgtccatcctttgctatgtacatggggggtttctaccaggtccagtagagcacaacaagacttagctcaggccttgaactgtgtttggttggttttctttgattgaattattctcagaagggctgtgttgccaggccctgtgggttgatcatgtgaccgcctttctgacaaaatgtctcccgccatctttatttgcaggctaatggaagtgctaagaaatctggtggggactttaagcctacttccccctccttacctgcttctaagattccagccctttctcccagctctgggaaaagcagttctctgccctcttctagtggtgacagctctaacctccctaatccacctgctactaaaccatcgattgcttctaaccctctcagcccccaaacaggaccacctgctcactctgcctccctcatcccttctgtctctaatggctctttgaagtttcagagcctcactcatacaggtaaaggtcaccatctttcattctcaccgcagagtcaaaatggccgagcaccccctcctttgtcattttcctcctcccctccttctcctgcctcctccgtctcactgaatcaaggtgccaagggcaccaggaccatccatactcccagcctcaccagctacaaggcacagaatggaagttcaagcaaagccaccccatccacagcaaaagaaacctcttaaaggtcaaatcctattaggcacaagtcggagttacatttaaaaaaaattaacagtctacaacaactgttttcacaagagaatgtaacatattgctgtatcgtttgaggcttaatgctaaatatgtgctaaatactggattaatagatttcagtaaagctcgttcgttttgtttggttttctttttacctagttgctatagtgtctacagtctatactcaatacctataaaatgcagtaagcatgtgttacagaaagaggttctggtgggagagaaaggtgcgtgtgagacaggagaattgtcttaagcatataaaacatgtatgattccagaattttagtatgttttgtataaaactatttttcattacggagactagaagtgaacagagaattacacaagtgtgactatacaaattgtaaaacagatactataatatttccttttattttagtgttatttagctttattacagatttctatttttgtcaaaacttcatggttcctttcaagatcttttttgccaaaacattttgatactatagcattgtacatttgaaagtagtgttctagactataaaaccaatgaacttctacatgagccctacagacaggcatgtgtagaaggcaatttatcaaacctattgcactgccatgaaaagtgtgtataataatttgctagcccaagcaagctagttttctttgcttgcttcttttctttcttttttccttccttttttttttttttttcttttttaacatgttgagattctctagttgttttctttggcgtatctaaccccttcttttgttttctgagacctggtaacccacgctcttgcattgtggattttaaaatgtatactctgtacggttctgtaaaccgaaaaacttttgtaaatatataaatatacatagacataaaaatactgtatgtgacagcacatagagtagttttcccacaccaaagttaatttttatgcatgctttaaaagtatatatcgggaccggcagaaatggaagtatccatacatttttaaaaagcaacaagtttgcacagctagagtgtttttgtaaataaatgtatttgtataacacagtcatgtaatatacagaactataagcagagactttgcaaaactaaataaagggctgcatgcttattattttttgtaccttgtcactataactacttcctagtcaaagaacgaaatgtaactgttaccgagttaaatgtttttccgctttgagggatgtaaccacatccactcagaggacactacttttctgaaagctctggggtgactaatgatgagttcctaataaattaattgcaagtgtggtgccttggatgtggcctgttggctcgctttcttctctgtggcttatcaaggtgtagatgacagaaagcaaacctggatacagagtttccaccctcagttcctggaggggctcttattattttctctctttttaaaaaacttccagtagaagtaaagtggaaataaaatgtctttatca

SEQ ID NO: 6815 - DNA, 7383 bp, Homo sapiens
  source 1..7383: mol_type = unassigned DNA; mol_type = unassigned DNA
atgccagtgtcagcttctctccgaaaactgggtaatacgaaatggtctttattggttgtgaacactcgagctgagaaacattttaggatctttgtgtcttttgtgatgattttgtttctgaagaggaagctgtctaaaatattcaagtgtgcaaccaaggatttagatgaagccagcaaacaaaggaatcatgtaatcaggacctgagcgaatgtgcttactcacggcgttagttacacaggtgatttccttaagaaaaaatgcagagagaacttgtttatgcaagaggagatggccctggggcccctcgccccggatctactgctcatccaccccatgcgattccaaattccccaccgtctactccagtgccccattccatgcccccctccccgtccagaattccttatgggggcacccgctccatggttgttcctggcaatgccaccatccccagggacagaatctccagcctgccagtctccagacccatctctccaagcccaagcgccattttagaaagaagagatgtcaagcctgatgaagacatgagtggcaaaaacattgcaatgtacagaaatgagggtttctatgctgatccttacctttatcacgagggacggatgagcatagcctcatcccatggtggacacccactggatgtccccgaccacatcattgcatatcaccgcaccgccatccggtcagcgagtgcttattgtaacccctcaatgcaagcggaaatgcatatggaacaatcactgtacagacagaaatcaaggaaatatccggatagccatttgcctacactgggctccaaaacaccccctgcctctcctcacagagtcagtgacctgaggatgatagacatgcacgctcactataatgcccacggcccccctcacaccatgcagccagaccgggcctctccgagccgccaggcctttaaaaaggagccaggcaccttggtgtatatagaaaagccacggagcgctgcaggattatccagccttgtagacctcggccctcctctaatggagaagcaagtttttgcctacagcacggcgacaatacccaaagacagagagaccagcgagaaaatgatgaaaaccacagccaacaggaaccacacagatagtgcaggaacgccccatgtgtctggtgggaagatgctcagtgctctggagtccacggtgcctcccagccagcctccacctgtgggcacctcagccatccacatgagcctgcttgagatgaggcggagcgtggcggaactcaggctccagctccagcagatgcggcagctccagctgcagaaccaggagttgctgagggcaatgatgaagaaggccgagctggaaatcagtggcaaagtgatggaaacaatgaagagactggaggatcccgtgcagcgacagcgcgtcctagtggagcaagagagacaaaaatatcttcatgaggaagagaagatcgtcaagaagttgtgcgagttggaagactttgttgaagacttgaagaaggactccacggcagccagccgattggttactctgaaagacgtggaagacggggctttcctcctgcgtcaagtgggagaggctgtagctaccctgaaaggagaatttccaaccttacaaaacaagatgcgagccatcctgcgcatagaagtggaggccgtgcggtttctgaaggaggagccacacaagctggacagtctcctgaagcgtgtgcgcagcatgacagacgtcctgaccatgctgcggagacatgtcactgatgggctcctgaaaggcacggacgcagcccaagccgcacagtacatggctatggaaaaggccacagccgcagaagtcctgaagagtcaggaggaggcagcccacacctccggccagcccttccacagcacaggtgcccctggcgatgcgaagtcggaagtggtgcctttgtccggcatgatggttcgccacgcgcagagctcccctgtggtcatccagccctcccagcactccgtggccctgctgaaccctgctcagaacttgcctcacgtggccagctccccagccgtcccccaggaagcaacctccactctgcagatgtcgcaggctccgcagtccccacagatacccatgaatgggtctgccatgcagagcttgttcattgaagaaatccacagtgtgagtgccaagaacagggcagtgtctatcgagaaagcagaaaagaaatgggaggaaaaaaggcaaaatctggatcactataatgggaaagagtttgagaagctcctagaagaagctcaggccaatatcatgaagtcaataccaaatctggagatgccgccagccacaggcccactgccaaggggagatgccccagtggacaaggtggaactttcagaagattctccaaattcggaacaggacttggaaaagctggggggaaagtcgccccctcctcctccgccacctcctcgtcgaagctacctgccaggatcgggactcaccaccacgaggtcaggcgatgtggtctacaccggcagaaaggagaacatcaccgctaaggcaagcagtgaagatgctggaccaagcccacagaccagagctacaaaatatccagcagaggagcctgcttcagcctggaccccatccccaccgcctgtcaccacctcctcctcaaaggatgaggaggaagaagaagaagaaggagacaaaataatggcagaactccaggcattccagaagtgttcctttatggatgtaaattcaaacagtcatgctgagccatcccgggctgacagtcacgttaaagacactaggtcgggcgccacagtgccacccaaggagaagaagaatttggaatttttccatgaagatgtacggaaatctgatgttgaatatgaaaatggcccccaaatggaattccaaaaggttaccacaggggctgtaagacctagtgaccctcctaagtgggaaagaggaatggagaatagtatttctgatgcatcaagaacatcagaatataaaactgagatcataatgaaggaaaattccatatccaatatgagtttactcagagacagtagaaactattcccaggaaactgtgcctaaggccagtttcggtttctctggcattagtccattagaagatgaaataaacaaagggtctaaaatctcaggcctgcaatactctatacctgacaccgagaaccagacgctgaattacggaaagacaaaggagatggaaaagcaaaatacggataagtgtcacgtttcctctcacactagactaacagaatcaagcgtgcatgattttaaaacagaagatcaagaggttatcacgacagattttggccaagttgttctaagacccaaggaggcaaggcatgctaacgtgaaccctaatgaggatggagaatcaagttcaagttctcccactgaagaaaatgcagccactgacaatattgccttcatgattaccgaaaccactgtccaggttctttccagtggggaggtgcatgatattgttagccaaaagggagaagacatacagacggttaatatcgatgccagaaaagagatgaccccccgacaagaagggactgacaatgaggatccagtcgtgtgcctggacaagaaaccagtgatcatcattttcgatgagcccatggacatccggtctgcctataagagactttcaactatctttgaggaatgtgatgaggaattagagagaatgatgatggaggaaaagatagaggaggaggaagaggaggaaaatggggattctgtagtccagaataataacacttcccagatgtctcataagaaggtggccccaggcaatcttagaaccggacaacaggtggaaacaaagtcacagccacactccctggccacagagaccagaaacccaggaggacaggaaatgaacagaacggagctgaacaagttcagccacgtggattctccaaattcggaatgcaagggtgaggacgcgaccgatgaccagtttgaaagccccaagaaaaagtttaaattcaaattccctaagaagcaactcgccgctctcactcaagccattcgcaccggaactaaaacagggaagaagactttgcaagtggtagtctatgaagaagaggaagaggatggcaccctgaaacagcacaaagaagccaagcgcttcgaaatcgctaggtctcaacctgaagacacccctgaaaacacagtgaggaggcaagagcagcccagcatcgagagtacatctccgatttcaagaactgatgaaattagaaaaaacacctacagaacattggatagcctggagcagaccattaaacagctcgaaaatacaatcagtgaaatgagtcccaaagccctagttgatacctcatgttcttccaacagagattctgttgcaagttcatcccacatagcccaagaggcctctccccgacccttgctagttccggatgaaggtcccactgccctagagccccctacgtcgataccttcagcttcacgtaagggctccagcggggccccacagacgagcaggatgcctgtccccatgagtgccaagaacagacccggaaccctggacaaacccggcaagcagtccaaactgcaggatccccgccaatatcgtcaggtagttttaccttaaacccacttttggatggacgctatttcagttaagcaagtcactgacttagtttataccaaatattgtgctttctttgtaagataacggtttacatagacatcctggatctgggggcatgaagaaagtctaaataaacctttgttacacttttttaccacgcttttgcatgcttgcaataaaacatcttttactttgtgactccaaactccaaattttaactgttaacacacggtgccagaccaggtggcttttctttggtgaatgtagtgtttcatctgaacacctcgggaagcagagacaaaccaacctgtggttgaactgcccttaacgtcaccactactaacgtctatgttgactgtattgtgttagaagcacattaacactccgtcacaatgcccgacccccaccccagtaattatccagacgcatggcccacctggcacacaggaaatggtagagctggaatgatgggactcctctcacaaatgtattcttcctttcctcctttcccgtccatcctttgctatgtacatggggggtttctaccaggtccagtagagcacaacaagacttagctcaggccttgaactgtgtttggttggttttctttgattgaattattctcagaagggctgtgttgccaggccctgtgggttgatcatgtgaccgcctttctgacaaaatgtctcccgccatctttatttgcaggctaatggaagtgctaagaaatctggtggggactttaagcctacttccccctccttacctgcttctaagattccagccctttctcccagctctgggaaaagcagttctctgccctcttctagtggtgacagctctaacctccctaatccacctgctactaaaccatcgattgcttctaaccctctcagcccccaaacaggaccacctgctcactctgcctccctcatcccttctgtctctaatggctctttgaagtttcagagcctcactcatacaggtaaaggtcaccatctttcattctcaccgcagagtcaaaatggccgagcaccccctcctttgtcattttcctcctcccctccttctcctgcctcctccgtctcactgaatcaaggtgccaagggcaccaggaccatccatactcccagcctcaccagctacaaggcacagaatggaagttcaagcaaagccaccccatccacagcaaaagaaacctcttaaaggtcaaatcctattaggcacaagtcggagttacatttaaaaaaaattaacagtctacaacaactgttttcacaagagaatgtaacatattgctgtatcgtttgaggcttaatgctaaatatgtgctaaatactggattaatagatttcagtaaagctcgttcgttttgtttggttttctttttacctagttgctatagtgtctacagtctatactcaatacctataaaatgcagtaagcatgtgttacagaaagaggttctggtgggagagaaaggtgcgtgtgagacaggagaattgtcttaagcatataaaacatgtatgattccagaattttagtatgttttgtataaaactatttttcattacggagactagaagtgaacagagaattacacaagtgtgactatacaaattgtaaaacagatactataatatttccttttattttagtgttatttagctttattacagatttctatttttgtcaaaacttcatggttcctttcaagatcttttttgccaaaacattttgatactatagcattgtacatttgaaagtagtgttctagactataaaaccaatgaacttctacatgagccctacagacaggcatgtgtagaaggcaatttatcaaacctattgcactgccatgaaaagtgtgtataataatttgctagcccaagcaagctagttttctttgcttgcttcttttctttcttttttccttccttttttttttttttttcttttttaacatgttgagattctctagttgttttctttggcgtatctaaccccttcttttgttttctgagacctggtaacccacgctcttgcattgtggattttaaaatgtatactctgtacggttctgtaaaccgaaaaacttttgtaaatatataaatatacatagacataaaaatactgtatgtgacagcacatagagtagttttcccacaccaaagttaatttttatgcatgctttaaaagtatatatcgggaccggcagaaatggaagtatccatacatttttaaaaagcaacaagtttgcacagctagagtgtttttgtaaataaatgtatttgtataacacagtcatgtaatatacagaactataagcagagactttgcaaaactaaataaagggctgcatgcttattattttttgtaccttgtcactataactacttcctagtcaaagaacgaaatgtaactgttaccgagttaaatgtttttccgctttgagggatgtaaccacatccactcagaggacactacttttctgaaagctctggggtgactaatgatgagttcctaataaattaattgcaagtgtggtgccttggatgtggcctgttggctcgctttcttctctgtggcttatcaaggtgtagatgacagaaagcaaacctggatacagagtttccaccctcagttcctggaggggctcttattattttctctctttttaaaaaacttccagtagaagtaaagtggaaataaaatgtctttatca

SEQ ID NO: 6816 - DNA, 479 bp, Homo sapiens
  source 1..479: mol_type = unassigned DNA; mol_type = unassigned DNA
acacctgggaagccttttccatcctggccaattgtgatgctgatgctaaaataccttcattgcttaatcccatcactgccaattgcttcaaatagtggatggaatgggctttaaaaaaaaaaaaaaaggcattttggaaactgcatagctgactctctttttcttttattcagcgagaaaatgatgaaaaccacagccaacaggaaccacacagatagtgcaggaacgccccatgtgtctggtgggaagatgctcagtgctctggagtccacggtgcctcccagccagcctccacctgtgggcacctcagccatccacatgagcctgcttgagatgaggcggagcgtggcggaactcaggctccagctccagcagatgcggcagctccagctgcagaaccaggagttgctgagggcaatgatgaagaaggccgagctggaaatcagtggcaaagtgatggaaacaatgaagagactgga

SEQ ID NO: 6817 - DNA, 1358 bp, Homo sapiens
  source 1..1358: mol_type = unassigned DNA; mol_type = unassigned DNA
gagacaaaataatggcagaactccaggcattccagaagtgttcctttatggatgtaaattcaaacagtcatgctgagccatcccgggctgacagtcacgttaaagacactaggtcgggcgccacagtgccacccaaggagaagaagggcatttttggcagttggagaacaaagcaatccaagaatttggaatttttccatgaagatgtacggaaatctgatgttgaatatgaaaatggcccccaaatggaattccaaaaggttaccacaggggctgtaagacctagtgaccctcctaagtgggaaagaggaatggagaatagtatttctgatgcatcaagaacatcagaatataaaactgagatcataatgaaggaaaattccatatccaatatgagtttactcagagacagtagaaactattcccaggaaactgtgcctaaggccagtttcggtttctctggcattagtccattagaagatgaaataaacaaagggtctaaaatctcaggcctgcaatactctatacctgacaccgagaaccagacgctgaattacggaaagacaaaggagatggaaaagcaaaatacggataagtgtcacgtttcctctcacactagactaacagaatcaagcgtgcatgattttaaaacagaagatcaagaggttatcacgacagattttggccaagttgttctaagacccaaggaggcaaggcatgctaacgtgaaccctaatgaggatggagaatcaagttcaagttctcccactgaagaaaatgcagccactgacaatattgccttcatgattaccgaaaccactgtccaggttctttccagtggggaggtgcatgatattgttagccaaaagggagaagacatacagacggttaatatcgatgccagaaaagagatgaccccccgacaagaagggactgacaatgaggatccagtcgtgtgcctggacaagaaaccagtgatcatcattttcgatgagcccatggacatccggtctgcctataagagactttcaactatctttgaggaatgtgatgaggaattagagagaatgatgatggaggaaaagatagaggaggaggaagaggaggaaaatggggattctgtagtccagaataataacacttcccagatgtctcataagaaggtggccccaggcaatcttagaaccggacaacaggtggaaacaaagtcacagccacactccctggccacagagaccagaaacccaggaggacaggaaatgaacagaacggagctgaacaagttcagccacgtggattctccaaattcggaatgcaagggtgaggacgcgaccgatgaccagtttgaaagccccaag

SEQ ID NO: 6818 - DNA, 1177 bp, Homo sapiens
  source 1..1177: mol_type = unassigned DNA; mol_type = unassigned DNA
ccctttattttcttcaccactcccctacaaaattttaaattcttgaaatcttttgctaattgagattttcatcttgtgcaaacacagggcatttttggcagttggagaacaaagcaatccaaggtaaacagctgtaggctttggattggtgtgtaagaaatatgcgtggcccgcatgtcttagaaatgtaattaaaggaacgatttagttatagtccacttttttggggggatgtggttttgtggagtaacatgtcctacactattctaccagaatttggaatttttccatgaagatgtacggaaatctgatgttgaatatgaaaatggcccccaaatggaattccaaaaggttaccacaggggctgtaagacctagtgaccctcctaagtgggaaagaggaatggagaatagtatttctgatgcatcaagaacatcagaatataaaactgagatcataatgaaggaaaattccatatccaatatgagtttactcagagacagtagaaactattcccaggaaactgtgcctaaggccagtttcggtttctctggcattagtccattagaagatgaaataaacaaagggtctaaaatctcaggcctgcaatactctatacctgacaccgagaaccagacgctgaattacggaaagacaaaggagatggaaaagcaaaatacggataagtgtcacgtttcctctcacactagactaacagaatcaagcgtgcatgattttaaaacagaagatcaagaggttatcacgacagattttggccaagttgttctaagacccaaggaggcaaggcatgctaacgtgaaccctaatgaggatggagaatcaagttcaagttctcccactgaagaaaatgcagccactgacaatattgccttcatgattaccgaaaccactgtccaggttctttccagtggggaggtgcatgatattgttagccaaaagggagaagacatacagacggttaatatcgatgccagaaaagagatgaccccccgacaagaagggactgacaatgaggatccagtcgtgtgcctggacaagaaaccagtgatcatcattttcgatgagcccatggacatccggtctgcctataagagactttcaactatctttgaggaatgtgatgaggaattagagagaatgatgatggaggaaaaga

SEQ ID NO: 6819 - DNA, 5977 bp, Homo sapiens
  source 1..5977: mol_type = unassigned DNA; mol_type = unassigned DNA
agagcctcggtggtttgcagcagtggaaccaggcaggcccagttgtgggtaggagaggccgtcacctgttgaggcctcccccccacacccccgcatcgccctgccctggcagagcccagcccccagtccccggagagcgcgcctgaggacggacggacggacggacggacagacctagggacggagggccaggggcaggggagatccaagaggccccgcgctggaatgcagttttctcgggcgagggagactttgcaccggagtggaaaatagtttggggtggggtttcgcaccgtcccctcctccccagccccgggccccctcccaggcgctttctgggagcttttagaactgcgctctgaagtttccagagagcgaggagcttttgcggcaggcagagacaatggaagaaaatgaaagccagaaatgtgagccgtgccttccttactcagcagacagaagacagatgcaggaacaaggcaaaggcaatctgcatgtaacatcaccagaagatgcagaatgccgcagaaccaaggaacgcctttctaatggaaacagtcgtggttcagtttccaagtcttcccgcaatatcccaaggagacacaccctaggggggccccgaagttccaaggaaatactgggaatgcaaacatctgagatggatcggaagagagaagcgttcctagaacatctgaagcagaagtacccccaccacgcctctgcaatcatgggtcaccaagagaggctgagagaccagacaaggagccccaaactgtctcacagtcctcaaccacccagtctgggtgacccggtcgagcatttatcagagacgtccgctgattctttggaagccatgtctgagggggatgctccaacccctttttccagaggcagccggactcgtgcgagccttcctgtggtgaggtcaaccaaccagacgaaagaaagatctctgggggttctctatctccagtatggagatgaaaccaagcagctcaggatgccgaatgaaatcacaagtgcagacacaatccgtgctctcttcgtaagtgcctttccacagcagctcaccatgaaaatgctggaatcgcccagtgtcgccatttacatcaaagatgaaagcagaaatgtctattatgaattaaatgatgtaaggaacattcaagacagatcactcctcaaagtgtacaacaaggatcctgcacatgcgtttaatcacacaccaaaaactatgaatggagacatgaggatgcagagagaacttgtttatgcaagaggagatggccctggggcccctcgccccggatctactgctcatccaccccatgcgattccaaattccccaccgtctactccagtgccccattccatgcccccctccccgtccagaattccttatgggggcacccgctccatggttgttcctggcaatgccaccatccccagggacagaatctccagcctgccagtctccagacccatctctccaagcccaagcgccattttagaaagaagagatgtcaagcctgatgaagacatgagtggcaaaaacattgcaatgtacagaaatgagggtttctatgctgatccttacctttatcacgagggacggatgagcatagcctcatcccatggtggacacccactggatgtccccgaccacatcattgcatatcaccgcaccgccatccggtcagcgagtgcttattgtaacccctcaatgcaagcggaaatgcatatggaacaatcactgtacagacagaaatcaaggaaatatccggatagccatttgcctacactgggctccaaaacaccccctgcctctcctcacagagtcagtgacctgaggatgatagacatgcacgctcactataatgcccacggcccccctcacaccatgcagccagaccgggcctctccgagccgccaggcctttaaaaaggagccaggcaccttggtgtatatagaaaagccacggagcgctgcaggattatccagccttgtagacctcggccctcctctaatggagaagcaagtttttgcctacagcacggcgacaatacccaaagacagagagaccagcgagaaaatgatgaaaaccacagccaacaggaaccacacagatagtgcaggaacgccccatgtgtctggtgggaagatgctcagtgctctggagtccacggtgcctcccagccagcctccacctgtgggcacctcagccatccacatgagcctgcttgagatgaggcggagcgtggcggaactcaggctccagctccagcagatgcggcagctccagctgcagaaccaggagttgctgagggcaatgatgaagaaggccgagctggaaatcagtggcaaagtgatggaaacaatgaagagactggaggatcccgtgcagcgacagcgcgtcctagtggagcaagagagacaaaaatatcttcatgaggaagagaagatcgtcaagaagttgtgcgagttggaagactttgttgaagacttgaagaaggactccacggcagccagccgattggttactctgaaagacgtggaagacggggctttcctcctgcgtcaagtgggagaggctgtagctaccctgaaaggagaatttccaaccttacaaaacaagatgcgagccatcctgcgcatagaagtggaggccgtgcggtttctgaaggaggagccacacaagctggacagtctcctgaagcgtgtgcgcagcatgacagacgtcctgaccatgctgcggagacatgtcactgatgggctcctgaaaggcacggacgcagcccaagccgcacagtacatggctatggaaaaggccacagccgcagaagtcctgaagagtcaggaggaggcagcccacacctccggccagcccttccacagcacaggtgcccctggcgatgcgaagtcggaagtggtgcctttgtccggcatgatggttcgccacgcgcagagctcccctgtggtcatccagccctcccagcactccgtggccctgctgaaccctgctcagaacttgcctcacgtggccagctccccagccgtcccccaggaagcaacctccactctgcagatgtcgcaggctccgcagtccccacagatacccatgaatgggtctgccatgcagagcttgttcattgaagaaatccacagtgtgagtgccaagaacagggcagtgtctatcgagaaagcagaaaagaaatgggaggaaaaaaggcaaaatctggatcactataatgggaaagagtttgagaagctcctagaagaagctcaggccaatatcatgaagtcaataccaaatctggagatgccgccagccacaggcccactgccaaggggagatgccccagtggacaaggtggaactttcagaagattctccaaattcggaacaggacttggaaaagctggggggaaagtcgccccctcctcctccgccacctcctcgtcgaagctacctgccaggatcgggactcaccaccacgaggtcaggcgatgtggtctacaccggcagaaaggagaacatcaccgctaaggcaagcagtgaagatgctggaccaagcccacagaccagagctacaaaatatccagcagaggagcctgcttcagcctggaccccatccccaccgcctgtcaccacctcctcctcaaaggatgaggaggaagaagaagaagaaggagacaaaataatggcagaactccaggcattccagaagtgttcctttatggatgtaaattcaaacagtcatgctgagccatcccgggctgacagtcacgttaaagacactaggtcgggcgccacagtgccacccaaggagaagaagggctccagcggggccccacagacgagcaggatgcctgtccccatgagtgccaagaacagacccggaaccctggacaaacccggcaagcagtccaaactgcaggatccccgccaatatcgtcaggctaatggaagtgctaagaaatctggtggggactttaagcctacttccccctccttacctgcttctaagattccagccctttctcccagctctgggaaaagcagttctctgccctcttctagtggtgacagctctaacctccctaatccacctgctactaaaccatcgattgcttctaaccctctcagcccccaaacaggaccacctgctcactctgcctccctcatcccttctgtctctaatggctctttgaagtttcagagcctcactcatacaggtaaaggtcaccatctttcattctcaccgcagagtcaaaatggccgagcaccccctcctttgtcattttcctcctcccctccttctcctgcctcctccgtctcactgaatcaaggtgccaagggcaccaggaccatccatactcccagcctcaccagctacaaggcacagaatggaagttcaagcaaagccaccccatccacagcaaaagaaacctcttaaaggtcaaatcctattaggcacaagtcggagttacatttaaaaaaaattaacagtctacaacaactgttttcacaagagaatgtaacatattgctgtatcgtttgaggcttaatgctaaatatgtgctaaatactggattaatagatttcagtaaagctcgttcgttttgtttggttttctttttacctagttgctatagtgtctacagtctatactcaatacctataaaatgcagtaagcatgtgttacagaaagaggttctggtgggagagaaaggtgcgtgtgagacaggagaattgtcttaagcatataaaacatgtatgattccagaattttagtatgttttgtataaaactatttttcattacggagactagaagtgaacagagaattacacaagtgtgactatacaaattgtaaaacagatactataatatttccttttattttagtgttatttagctttattacagatttctatttttgtcaaaacttcatggttcctttcaagatcttttttgccaaaacattttgatactatagcattgtacatttgaaagtagtgttctagactataaaaccaatgaacttctacatgagccctacagacaggcatgtgtagaaggcaatttatcaaacctattgcactgccatgaaaagtgtgtataataatttgctagcccaagcaagctagttttctttgcttgcttcttttctttcttttttccttccttttttttttttttttcttttttaacatgttgagattctctagttgttttctttggcgtatctaaccccttcttttgttttctgagacctggtaacccacgctcttgcattgtggattttaaaatgtatactctgtacggttctgtaaaccgaaaaacttttgtaaatatataaatatacatagacataaaaatactgtatgtgacagcacatagagtagttttcccacaccaaagttaatttttatgcatgctttaaaagtatatatcgggaccggcagaaatggaagtatccatacatttttaaaaagcaacaagtttgcacagctagagtgtttttgtaaataaatgtatttgtataacacagtcatgtaatatacagaactataagcagagactttgcaaaactaaataaagggctgcatgcttattattttttgtaccttgtcactataactacttcctagtcaaagaacgaaatgtaactgttaccgagttaaatgtttttccgctttgagggatgtaaccacatccactcagaggacactacttttctgaaagctctggggtgactaatgatgagttcctaataaattaattgcaagtgtggtgccttggatgtggcctgttggctcgctttcttctctgtggcttatcaaggtgtagatgacagaaagcaaacctggatacagagtttccaccctcagttcctggaggggctcttattattttctctctttttaaaaaacttccagtagaagtaaagtggaaataaaatgtctttatcacttgg

SEQ ID NO: 6820 - DNA, 6052 bp, Homo sapiens
  source 1..6052: mol_type = unassigned DNA; mol_type = unassigned DNA
agagcctcggtggtttgcagcagtggaaccaggcaggcccagttgtgggtaggagaggccgtcacctgttgaggcctcccccccacacccccgcatcgccctgccctggcagagcccagcccccagtccccggagagcgcgcctgaggacggacggacggacggacggacagacctagggacggagggccaggggcaggggagatccaagaggccccgcgctggaatgcagttttctcgggcgagggagactttgcaccggagtggaaaatagtttggggtggggtttcgcaccgtcccctcctccccagccccgggccccctcccaggcgctttctgggagcttttagaactgcgctctgaagtttccagagagcgaggagcttttgcggcaggcagagacaatggaagaaaatgaaagccagaaatgtgagccgtgccttccttactcagcagacagaagacagatgcaggaacaaggcaaaggcaatctgcatgtaacatcaccagaagatgcagaatgccgcagaaccaaggaacgcctttctaatggaaacagtcgtggttcagtttccaagtcttcccgcaatatcccaaggagacacaccctaggggggccccgaagttccaaggaaatactgggaatgcaaacatctgagatggatcggaagagagaagcgttcctagaacatctgaagcagaagtacccccaccacgcctctgcaatcatgggtcaccaagagaggctgagagaccagacaaggagccccaaactgtctcacagtcctcaaccacccagtctgggtgacccggtcgagcatttatcagagacgtccgctgattctttggaagccatgtctgagggggatgctccaacccctttttccagaggcagccggactcgtgcgagccttcctgtggtgaggtcaaccaaccagacgaaagaaagatctctgggggttctctatctccagtatggagatgaaaccaagcagctcaggatgccgaatgaaatcacaagtgcagacacaatccgtgctctcttcgtaagtgcctttccacagcagctcaccatgaaaatgctggaatcgcccagtgtcgccatttacatcaaagatgaaagcagaaatgtctattatgaattaaatgatgtaaggaacattcaagacagatcactcctcaaagtgtacaacaaggatcctgcacatgcgtttaatcacacaccaaaaactatgaatggagacatgaggatgcagagagaacttgtttatgcaagaggagatggccctggggcccctcgccccggatctactgctcatccaccccatgcgattccaaattccccaccgtctactccagtgccccattccatgcccccctccccgtccagaattccttatgggggcacccgctccatggttgttcctggcaatgccaccatccccagggacagaatctccagcctgccagtctccagacccatctctccaagcccaagcgccattttagaaagaagagatgtcaagcctgatgaagacatgagtggcaaaaacattgcaatgtacagaaatgagggtttctatgctgatccttacctttatcacgagggacggatgagcatagcctcatcccatggtggacacccactggatgtccccgaccacatcattgcatatcaccgcaccgccatccggtcagcgagtgcttattgtaacccctcaatgcaagcggaaatgcatatggaacaatcactgtacagacagaaatcaaggaaatatccggatagccatttgcctacactgggctccaaaacaccccctgcctctcctcacagagtcagtgacctgaggatgatagacatgcacgctcactataatgcccacggcccccctcacaccatgcagccagaccgggcctctccgagccgccaggcctttaaaaaggagccaggcaccttggtgtatatagaaaagccacggagcgctgcaggattatccagccttgtagacctcggccctcctctaatggagaagcaagtttttgcctacagcacggcgacaatacccaaagacagagagaccagcgagaaaatgatgaaaaccacagccaacaggaaccacacagatagtgcaggaacgccccatgtgtctggtgggaagatgctcagtgctctggagtccacggtgcctcccagccagcctccacctgtgggcacctcagccatccacatgagcctgcttgagatgaggcggagcgtggcggaactcaggctccagctccagcagatgcggcagctccagctgcagaaccaggagttgctgagggcaatgatgaagaaggccgagctggaaatcagtggcaaagtgatggaaacaatgaagagactggaggatcccgtgcagcgacagcgcgtcctagtggagcaagagagacaaaaatatcttcatgaggaagagaagatcgtcaagaagttgtgcgagttggaagactttgttgaagacttgaagaaggactccacggcagccagccgattggttactctgaaagacgtggaagacggggctttcctcctgcgtcaagtgggagaggctgtagctaccctgaaaggagaatttccaaccttacaaaacaagatgcgagccatcctgcgcatagaagtggaggccgtgcggtttctgaaggaggagccacacaagctggacagtctcctgaagcgtgtgcgcagcatgacagacgtcctgaccatgctgcggagacatgtcactgatgggctcctgaaaggcacggacgcagcccaagccgcacagtacatggctatggaaaaggccacagccgcagaagtcctgaagagtcaggaggaggcagcccacacctccggccagcccttccacagcacaggtgcccctggcgatgcgaagtcggaagtggtgcctttgtccggcatgatggttcgccacgcgcagagctcccctgtggtcatccagccctcccagcactccgtggccctgctgaaccctgctcagaacttgcctcacgtggccagctccccagccgtcccccaggaagcaacctccactctgcagatgtcgcaggctccgcagtccccacagatacccatgaatgggtctgccatgcagagcttgttcattgaagaaatccacagtgtgagtgccaagaacagggcagtgtctatcgagaaagcagaaaagaaatgggaggaaaaaaggcaaaatctggatcactataatgggaaagagtttgagaagctcctagaagaagctcaggccaatatcatgaagtcaataccaaatctggagatgccgccagccacaggcccactgccaaggggagatgccccagtggacaaggtggaactttcagattctccaaattcggaacaggacttggaaaagctggggggaaagtcgccccctcctcctccgccacctcctcgtcgaagctacctgccaggatcgggactcaccaccacgaggtcaggcgatgtggtctacaccggcagaaaggagaacatcaccgctaaggcaagcagtgaagatgctggaccaagcccacagaccagagctacaaaatatccagcagaggagcctgcttcagcctggaccccatccccaccgcctgtcaccacctcctcctcaaaggatgaggaggaagaagaagaagaaggagacaaaataatggcagaactccaggcattccagaagtgttcctttatggatgtaaattcaaacagtcatgctgagccatcccgggctgacagtcacgttaaagacactaggtcgggcgccacagtgccacccaaggagaagaagaatttggaatttttccatgaagatgtacggaaatctgatgttgaatatgaaaatggcccccaaatggaattccaaaagggctccagcggggccccacagacgagcaggatgcctgtccccatgagtgccaagaacagacccggaaccctggacaaacccggcaagcagtccaaactgcaggatccccgccaatatcgtcaggctaatggaagtgctaagaaatctggtggggactttaagcctacttccccctccttacctgcttctaagattccagccctttctcccagctctgggaaaagcagttctctgccctcttctagtggtgacagctctaacctccctaatccacctgctactaaaccatcgattgcttctaaccctctcagcccccaaacaggaccacctgctcactctgcctccctcatcccttctgtctctaatggctctttgaagtttcagagcctcactcatacaggtaaaggtcaccatctttcattctcaccgcagagtcaaaatggccgagcaccccctcctttgtcattttcctcctcccctccttctcctgcctcctccgtctcactgaatcaaggtgccaagggcaccaggaccatccatactcccagcctcaccagctacaaggcacagaatggaagttcaagcaaagccaccccatccacagcaaaagaaacctcttaaaggtcaaatcctattaggcacaagtcggagttacatttaaaaaaaattaacagtctacaacaactgttttcacaagagaatgtaacatattgctgtatcgtttgaggcttaatgctaaatatgtgctaaatactggattaatagatttcagtaaagctcgttcgttttgtttggttttctttttacctagttgctatagtgtctacagtctatactcaatacctataaaatgcagtaagcatgtgttacagaaagaggttctggtgggagagaaaggtgcgtgtgagacaggagaattgtcttaagcatataaaacatgtatgattccagaattttagtatgttttgtataaaactatttttcattacggagactagaagtgaacagagaattacacaagtgtgactatacaaattgtaaaacagatactataatatttccttttattttagtgttatttagctttattacagatttctatttttgtcaaaacttcatggttcctttcaagatcttttttgccaaaacattttgatactatagcattgtacatttgaaagtagtgttctagactataaaaccaatgaacttctacatgagccctacagacaggcatgtgtagaaggcaatttatcaaacctattgcactgccatgaaaagtgtgtataataatttgctagcccaagcaagctagttttctttgcttgcttcttttctttcttttttccttccttttttttttttttttcttttttaacatgttgagattctctagttgttttctttggcgtatctaaccccttcttttgttttctgagacctggtaacccacgctcttgcattgtggattttaaaatgtatactctgtacggttctgtaaaccgaaaaacttttgtaaatatataaatatacatagacataaaaatactgtatgtgacagcacatagagtagttttcccacaccaaagttaatttttatgcatgctttaaaagtatatatcgggaccggcagaaatggaagtatccatacatttttaaaaagcaacaagtttgcacagctagagtgtttttgtaaataaatgtatttgtataacacagtcatgtaatatacagaactataagcagagactttgcaaaactaaataaagggctgcatgcttattattttttgtaccttgtcactataactacttcctagtcaaagaacgaaatgtaactgttaccgagttaaatgtttttccgctttgagggatgtaaccacatccactcagaggacactacttttctgaaagctctggggtgactaatgatgagttcctaataaattaattgcaagtgtggtgccttggatgtggcctgttggctcgctttcttctctgtggcttatcaaggtgtagatgacagaaagcaaacctggatacagagtttccaccctcagttcctggaggggctcttattattttctctctttttaaaaaacttccagtagaagtaaagtggaaataaaatgtctttatcacttgg

SEQ ID NO: 6821 - DNA, 5962 bp, Homo sapiens
  source 1..5962: mol_type = unassigned DNA; mol_type = unassigned DNA
agagcctcggtggtttgcagcagtggaaccaggcaggcccagttgtgggtaggagaggccgtcacctgttgaggcctcccccccacacccccgcatcgccctgccctggcagagcccagcccccagtccccggagagcgcgcctgaggacggacggacggacggacggacagacctagggacggagggccaggggcaggggagatccaagaggccccgcgctggaatgcagttttctcgggcgagggagactttgcaccggagtggaaaatagtttggggtggggtttcgcaccgtcccctcctccccagccccgggccccctcccaggcgctttctgggagcttttagaactgcgctctgaagtttccagagagcgaggagcttttgcggcaggcagagacaatggaagaaaatgaaagccagaaatgtgagccgtgccttccttactcagcagacagaagacagatgcaggaacaaggcaaaggcaatctgcatgtaacatcaccagaagatgcagaatgccgcagaaccaaggaacgcctttctaatggaaacagtcgtggttcagtttccaagtcttcccgcaatatcccaaggagacacaccctaggggggccccgaagttccaaggaaatactgggaatgcaaacatctgagatggatcggaagagagaagcgttcctagaacatctgaagcagaagtacccccaccacgcctctgcaatcatgggtcaccaagagaggctgagagaccagacaaggagccccaaactgtctcacagtcctcaaccacccagtctgggtgacccggtcgagcatttatcagagacgtccgctgattctttggaagccatgtctgagggggatgctccaacccctttttccagaggcagccggactcgtgcgagccttcctgtggtgaggtcaaccaaccagacgaaagaaagatctctgggggttctctatctccagtatggagatgaaaccaagcagctcaggatgccgaatgaaatcacaagtgcagacacaatccgtgctctcttcgtaagtgcctttccacagcagctcaccatgaaaatgctggaatcgcccagtgtcgccatttacatcaaagatgaaagcagaaatgtctattatgaattaaatgatgtaaggaacattcaagacagatcactcctcaaagtgtacaacaaggatcctgcacatgcgtttaatcacacaccaaaaactatgaatggagacatgaggatgcagagagaacttgtttatgcaagaggagatggccctggggcccctcgccccggatctactgctcatccaccccatgcgattccaaattccccaccgtctactccagtgccccattccatgcccccctccccgtccagaattccttatgggggcacccgctccatggttgttcctggcaatgccaccatccccagggacagaatctccagcctgccagtctccagacccatctctccaagcccaagcgccattttagaaagaagagatgtcaagcctgatgaagacatgagtggcaaaaacattgcaatgtacagaaatgagggtttctatgctgatccttacctttatcacgagggacggatgagcatagcctcatcccatggtggacacccactggatgtccccgaccacatcattgcatatcaccgcaccgccatccggtcagcgagtgcttattgtaacccctcaatgcaagcggaaatgcatatggaacaatcactgtacagacagaaatcaaggaaatatccggatagccatttgcctacactgggctccaaaacaccccctgcctctcctcacagagtcagtgacctgaggatgatagacatgcacgctcactataatgcccacggcccccctcacaccatgcagccagaccgggcctctccgagccgccaggcctttaaaaaggagccaggcaccttggtgtatatagaaaagccacggagcgctgcaggattatccagccttgtagacctcggccctcctctaatggagaagcaagtttttgcctacagcacggcgacaatacccaaagacagagagaccagagagaggatgcaagccatggagaaacagattgccagtttaactggccttgttcagtctgcgctttttaaagggcccattacaagttatagcaaagatgcgtctagcgagaaaatgatgaaaaccacagccaacaggaaccacacagatagtgcaggaacgccccatgtgtctggtgggaagatgctcagtgctctggagtccacggtgcctcccagccagcctccacctgtgggcacctcagccatccacatgagcctgcttgagatgaggcggagcgtggcggaactcaggctccagctccagcagatgcggcagctccagctgcagaaccaggagttgctgagggcaatgatgaagaaggccgagctggaaatcagtggcaaagtgatggaaacaatgaagagactggaggatcccgtgcagcgacagcgcgtcctagtggagcaagagagacaaaaatatcttcatgaggaagagaagatcgtcaagaagttgtgcgagttggaagactttgttgaagacttgaagaaggactccacggcagccagccgattggttactctgaaagacgtggaagacggggctttcctcctgcgtcaagtgggagaggctgtagctaccctgaaaggagaatttccaaccttacaaaacaagatgcgagccatcctgcgcatagaagtggaggccgtgcggtttctgaaggaggagccacacaagctggacagtctcctgaagcgtgtgcgcagcatgacagacgtcctgaccatgctgcggagacatgtcactgatgggctcctgaaaggcacggacgcagcccaagccgcacagtacatggctatggaaaaggccacagccgcagaagtcctgaagagtcaggaggaggcagcccacacctccggccagcccttccacagcacaggtgcccctggcgatgcgaagtcggaagtggtgcctttgtccggcatgatggttcgccacgcgcagagctcccctgtggtcatccagccctcccagcactccgtggccctgctgaaccctgctcagaacttgcctcacgtggccagctccccagccgtcccccaggaagcaacctccactctgcagatgtcgcaggctccgcagtccccacagatacccatgaatgggtctgccatgcagagcttgttcattgaagaaatccacagtgtgagtgccaagaacagggcagtgtctatcgagaaagcagaaaagaaatgggaggaaaaaaggcaaaatctggatcactataatgggaaagagtttgagaagctcctagaagaagctcaggccaatatcatgaagtcaataccaaatctggagatgccgccagccacaggcccactgccaaggggagatgccccagtggacaaggtggaactttcagaagattctccaaattcggaacaggacttggaaaagctggggggaaagtcgccccctcctcctccgccacctcctcgtcgaagctacctgccaggatcgggactcaccaccacgaggtcaggcgatgtggtctacaccggcagaaaggagaacatcaccgctaaggcaagcagtgaagatgctggaccaagcccacagaccagagctacaaaatatccagcagaggagcctgcttcagcctggaccccatccccaccgcctgtcaccacctcctcctcaaaggatgaggaggaagaagaagaagaaggagacaaaataatggcagaactccagggctccagcggggccccacagacgagcaggatgcctgtccccatgagtgccaagaacagacccggaaccctggacaaacccggcaagcagtccaaactgcaggatccccgccaatatcgtcaggctaatggaagtgctaagaaatctggtggggactttaagcctacttccccctccttacctgcttctaagattccagccctttctcccagctctgggaaaagcagttctctgccctcttctagtggtgacagctctaacctccctaatccacctgctactaaaccatcgattgcttctaaccctctcagcccccaaacaggaccacctgctcactctgcctccctcatcccttctgtctctaatggctctttgaagtttcagagcctcactcatacaggtaaaggtcaccatctttcattctcaccgcagagtcaaaatggccgagcaccccctcctttgtcattttcctcctcccctccttctcctgcctcctccgtctcactgaatcaaggtgccaagggcaccaggaccatccatactcccagcctcaccagctacaaggcacagaatggaagttcaagcaaagccaccccatccacagcaaaagaaacctcttaaaggtcaaatcctattaggcacaagtcggagttacatttaaaaaaaattaacagtctacaacaactgttttcacaagagaatgtaacatattgctgtatcgtttgaggcttaatgctaaatatgtgctaaatactggattaatagatttcagtaaagctcgttcgttttgtttggttttctttttacctagttgctatagtgtctacagtctatactcaatacctataaaatgcagtaagcatgtgttacagaaagaggttctggtgggagagaaaggtgcgtgtgagacaggagaattgtcttaagcatataaaacatgtatgattccagaattttagtatgttttgtataaaactatttttcattacggagactagaagtgaacagagaattacacaagtgtgactatacaaattgtaaaacagatactataatatttccttttattttagtgttatttagctttattacagatttctatttttgtcaaaacttcatggttcctttcaagatcttttttgccaaaacattttgatactatagcattgtacatttgaaagtagtgttctagactataaaaccaatgaacttctacatgagccctacagacaggcatgtgtagaaggcaatttatcaaacctattgcactgccatgaaaagtgtgtataataatttgctagcccaagcaagctagttttctttgcttgcttcttttctttcttttttccttccttttttttttttttttcttttttaacatgttgagattctctagttgttttctttggcgtatctaaccccttcttttgttttctgagacctggtaacccacgctcttgcattgtggattttaaaatgtatactctgtacggttctgtaaaccgaaaaacttttgtaaatatataaatatacatagacataaaaatactgtatgtgacagcacatagagtagttttcccacaccaaagttaatttttatgcatgctttaaaagtatatatcgggaccggcagaaatggaagtatccatacatttttaaaaagcaacaagtttgcacagctagagtgtttttgtaaataaatgtatttgtataacacagtcatgtaatatacagaactataagcagagactttgcaaaactaaataaagggctgcatgcttattattttttgtaccttgtcactataactacttcctagtcaaagaacgaaatgtaactgttaccgagttaaatgtttttccgctttgagggatgtaaccacatccactcagaggacactacttttctgaaagctctggggtgactaatgatgagttcctaataaattaattgcaagtgtggtgccttggatgtggcctgttggctcgctttcttctctgtggcttatcaaggtgtagatgacagaaagcaaacctggatacagagtttccaccctcagttcctggaggggctcttattattttctctctttttaaaaaacttccagtagaagtaaagtggaaataaaatgtctttatcacttgg

SEQ ID NO: 6822 - DNA, 2099 bp, Homo sapiens
  source 1..2099: mol_type = unassigned DNA; mol_type = unassigned DNA
acgccaccggtgacctccgacgccccgggcaagagaacgccaggagggataacgggaggaaggccggccggggccgccaaggcagtcccaggctcgcgtaggaggcgcgcagaccttgcaccttgcaccttcgcagcgccctgcaccccgccaccatgtgcgagctgtacagtaagcgggacactctggggctgaggaagaagcacatcgggccctcatgcaaagttttctttgcatcggatcccatcaaaatagtgagagcccagaggcagtacatgtttgatgagaacggtgaacagtacttggactgcatcaacaatgttgcccatgtgggacactgtcacccaggagtggtcaaagctgccctgaaacagatggaactgctaaatacaaattctcgattcctccacgacaacattgttgagtatgccaaacgcctttcagcaactctgccggagaaactctctgtttgttattttacaaattcaggatccgaagccaacgacttagccttacgcctggctcggcagttcagaggccaccaggatgtgatcactcttgaccatgcttaccatggtcacctatcatccttaattgagattagcccatataagtttcagaaaggaaaagatgtcaaaaaagaatttgtacatgtggcaccaactccagatacttacagaggaaaatatagagaagaccatgcagactcagccagtgcttatgcagatgaagtgaagaaaatcattgaagatgctcataacagtggaaggaagattgctgcctttattgctgaatccatgcagagttgtggcggacaaataattcctccagcaggctacttccagaaagtggcagaatatgtacacggtgcagggggtgtgtttatagctgatgaagttcaagtgggctttggcagagttgggaaacatttctggagcttccagatgtatggtgaagactttgttccagacatcgtcacaatgggaaaaccgatgggcaacggccacccggtggcatgtgtggtaacaaccaaagaaattgcagaagccttcagcagctctgggatggaatattttaatacgtatggaggaaatccagtatcttgtgctgttggtttggctgtcctggatataattgaaaatgaagaccttcaaggaaatgccaagagagtagggaattatctcactgagttactgaaaaaacagaaggctaaacacactttgataggagatattaggggcattggcctttttattggaattgatttagtgaaggaccatctgaaaaggacccctgccacagctgaagctcagcacatcatctacaagatgaaagaaaaacgagtgcttctcagtgccgatggacctcatagaaatgtacttaaaataaaaccacctatgtgcttcactgaagaagatgcaaagttcatggtggaccaacttgataggattctaacagttttagaagaagctatgggaaccaaaaccgaaagtgtgacctctgagaatactccatgcaaaacaaagatgctgaaagaagcccacatagaactgcttagggacagcaccactgactccaaagaaaatcccagcagaaagagaaatggaatgtgcacggatacacattcactgctcagtaagaggctcaagacatgactgatttgcattttaaagcaagatgcgatgtccagagttacagagaatgagtagatgtgtctcatcggttaatagctctattatacctctaaaggtggaattgtcagtttagattcataaatgaaaaggtaaatgagtaatcagaataaaccaagtgataatcaaaccatgtcaagattattagttcagactctagcctgttaattttcttagttgatttctgaagctacctgatttattctattaaattgtaagcttgcaaactcaaaataaattggcagatttacctctcatgttttaatgtgtcaaattagagagcaaagtataacaggtgccttcacttttgagacttagtgccttaaaatatgtattctataatgatttcatatataaaagtatatttattgactgtaataaaataaaatatgatgtaaacaaaaaaaa

SEQ ID NO: 6823 - DNA, 2028 bp, Homo sapiens
  source 1..2028: mol_type = unassigned DNA; mol_type = unassigned DNA
gggataacgggaggaaggccggccggggccgccaaggcagtcccaggctcgcgtaggaggcgcgcagaccttgcaccttgcaccttcgcagcgccctgcaccccgccaccatgtgcgagctgtacagtaagcgggacactctggggctgaggaagaagcacatcgggccctcatgcaaagttttctttgcatcggatcccatcaaaatagtgagagcccagaggcagtacatgtttgatgagaacggtgaacagtacttggactgcatcaacaatgttgcccatggagtggtcaaagctgccctgaaacagatggaactgctaaatacaaattctcgattcctccacgacaacattgttgagtatgccaaacgcctttcagcaactctgccggagaaactctctgtttgttattttacaaattcaggatccgaagccaacgacttagccttacgcctggctcggcagttcagaggccaccaggatgtgatcactcttgaccatgcttaccatggtcacctatcatccttaattgagattagcccatataagtttcagaaaggaaaagatgtcaaaaaagaatttgtacatgtggcaccaactccagatacttacagaggaaaatatagagaagaccatgcagactcagccagtgcttatgcagatgaagtgaagaaaatcattgaagatgctcataacagtggaaggaagattgctgcctttattgctgaatccatgcagagttgtggcggacaaataattcctccagcaggctacttccagaaagtggcagaatatgtacacggtgcagggggtgtgtttatagctgatgaagttcaagtgggctttggcagagttgggaaacatttctggagcttccagatgtatggtgaagactttgttccagacatcgtcacaatgggaaaaccgatgggcaacggccacccggtggcatgtgtggtaacaaccaaagaaattgcagaagccttcagcagctctgggatggaatattttaatacgtatggaggaaatccagtatcttgtgctgttggtttggctgtcctggatataattgaaaatgaagaccttcaaggaaatgccaagagagtagggaattatctcactgagttactgaaaaaacagaaggctaaacacactttgataggagatattaggggcattggcctttttattggaattgatttagtgaaggaccatctgaaaaggacccctgccacagctgaagctcagcacatcatctacaagatgaaagaaaaacgagtgcttctcagtgccgatggacctcatagaaatgtacttaaaataaaaccacctatgtgcttcactgaagaagatgcaaagttcatggtggaccaacttgataggattctaacagttttagaagaagctatgggaaccaaaaccgaaagtgtgacctctgagaatactccatgcaaaacaaagatgctgaaagaagcccacatagaactgcttagggacagcaccactgactccaaagaaaatcccagcagaaagagaaatggaatgtgcacggatacacattcactgctcagtaagaggctcaagacatgactgatttgcattttaaagcaagatgcgatgtccagagttacagagaatgagtagatgtgtctcatcggttaatagctctattatacctctaaaggtggaattgtcagtttagattcataaatgaaaaggtaaatgagtaatcagaataaaccaagtgataatcaaaccatgtcaagattattagttcagactctagcctgttaattttcttagttgatttctgaagctacctgatttattctattaaattgtaagcttgcaaactcaaaataaattggcagatttacctctcatgttttaatgtgtcaaattagagagcaaagtataacaggtgccttcacttttgagacttagtgccttaaaatatgtattctataatgatttcatatataaaagtatatttattgactgtaataaaataaaatatgatgtaaac

SEQ ID NO: 6824 - DNA, 1561 bp, Homo sapiens
  source 1..1561: mol_type = unassigned DNA; mol_type = unassigned DNA
aggctcgcgtaggaggcgcgcagaccttgcaccttgcaccttcgcagcgccctgcaccccgccaccatgtgcgagctgtacagtaagcgggacactctggggctgaggaagaagcacatcgggtaagggcaccctggcccggaatgggacactgtcacccaggagtggtcaaagctgccctgaaacagatggaactgctaaatacaaattctcgattcctccacgacaacattgttgagtatgccaaacgcctttcagcaactctgccggagaaactctctgtttgttattttacaaattcaggatccgaagccaacgacttagccttacgcctggctcggcagttcagaggccaccaggatgtgatcactcttgaccatgcttaccatggtcacctatcatccttaattgagattagcccatataagtttcagaaaggaaaagatgtcaaaaaagaatttgtacatgtggcaccaactccagatacttacagaggaaaatatagagaagaccatgcagactcagccagtgcttatgcagatgaagtgaagaaaatcattgaagatgctcataacagtggaaggaagattgctgcctttattgctgaatccatgcagagttgtggcggacaaataattcctccagcaggctacttccagaaagtggcagaatatgtacacggtgcagggggtgtgtttatagctgatgaagttcaagtgggctttggcagagttgggaaacatttctggagcttccagatgtatggtgaagactttgttccagacatcgtcacaatgggaaaaccgatgggcaacggccacccggtggcatgtgtggtaacaaccaaagaaattgcagaagccttcagcagctctgggatggaatattttaatacgtatggaggaaatccagtatcttgtgctgttggtttggctgtcctggatataattgaaaatgaagaccttcaaggaaatgccaagagagtagggaattatctcactgagttactgaaaaaacagaaggctaaacacactttgataggagatattaggggcattggcctttttattggaattgatttagtgaaggaccatctgaaaaggacccctgccacagctgaagctcagcacatcatctacaagatgaaagaaaaacgagtgcttctcagtgccgatggacctcatagaaatgtacttaaaataaaaccacctatgtgcttcactgaagaagatgcaaagttcatggtggaccaacttgataggattctaacagttttagaagaagctatgggaaccaaaaccgaaagtgtgacctctgagaatactccatgcaaaacaaagatgctgaaagaagcccacatagaactgcttagggacagcaccactgactccaaagaaaatcccagcagaaagagaaatggaatgtgcacggatacacattcactgctcagtaagaggctcaagacatgactgatttgcattttaaagcaagatgcgatgtccagagttacagagaatgagtagatgtgtctcatcggttaatagctctattatacctctaa

SEQ ID NO: 6825 - DNA, 1692 bp, Homo sapiens
  source 1..1692: mol_type = unassigned DNA; mol_type = unassigned DNA
acgccaccggtgacctccgacgccccgggcaagagaacgccaggagggataacgggaggaaggccggccggggccgccaaggcagtcccaggctcgcgtaggaggcgcgcagaccttgcaccttgcaccttcgcagcgccctgcaccccgccaccatgtgcgagctgtacagtaagcgggacactctggggctgaggaagaagcacatcgggtaagggcaccctggcccggaagccctcatgcaaagttttctttgcatcggatcccatcaaaatagtgagagcccagaggcagtacatgtttgatgagaacggtgaacagtacttggactgcatcaacaatgttgcccatgtgggacactgtcacccaggagtggtcaaagctgccctgaaacagatggaactgctaaatacaaattctcgattcctccacgacaacattgttgagtatgccaaacgcctttcagcaactctgccggagaaactctctgtttgttattttacaaattcaggatccgaagccaacgacttagccttacgcctggctcggcagttcagaggccaccaggatgtgatcactcttgaccatgcttaccatggtcacctatcatccttaattgagattagcccatataagtttcagaaaggaaaagatgtcaaaaaagaatttgtacatgtggcaccaactccagatacttacagaggaaaatatagagaagaccatgcagactcagccagtgcttatgcagatgaagtgaagaaaatcattgaagatgctcataacagtggaaggaagattgctgcctttattgctgaatccatgcagagttgtggcggacaaataattcctccagcaggctacttccagaaagtggcagaatatgtacacggtgcagggggtgtgtttatagctgatgaagttcaagtgggctttggcagagttgggaaacatttctggagcttccagatgtatggtgaagactttgttccagacatcgtcacaatgggaaaaccgatgggcaacggccacccggtggcatgtgtggtaacaaccaaagaaattgcagaagccttcagcagctctgggatggaatattttaatacgtatggaggaaatccagtatcttgtgctgttggtttggctgtcctggatataattgaaaatgaagaccttcaaggaaatgccaagagagtagggaattatctcactgagttactgaaaaaacagaaggctaaacacactttgataggagatattaggggcattggcctttttattggaattgatttagtgaaggaccatctgaaaaggacccctgccacagctgaagctcagcacatcatctacaagatgaaagaaaaacgagtgcttctcagtgccgatggacctcatagaaatgtacttaaaataaaaccacctatgtgcttcactgaagaagatgcaaagttcatggtggaccaacttgataggattctaacagttttagaagaagctatgggaaccaaaaccgaaagtgtgacctctgagaatactccatgcaaaacaaagatgctgaaagaagcccacatagaactgcttagggacagcaccactgactccaaagaaaatcccagcagaaagagaaatggaatgtgcacggatacacattcactgctcagtaagaggctcaagacatgactgatttgcatttta

SEQ ID NO: 6826 - DNA, 675 bp, Homo sapiens
  source 1..675: mol_type = unassigned DNA; mol_type = unassigned DNA
attgctgaatccatgcagagttgtggcggacaaataattcctccagcaggctacttccagaaagtggcagaatatgtacacggtgcagggggtgtgtttatagctgatgaagttcaagtgggctttggcagagttgggaaacatttctggagcttccagatgtatggtgaagactttgttccagacatcgtcacaatgggaaaaccgatgggcaacggccacccggtggcatgtgtggtaacaaccaaagaaattgcagaagccttcagcagctctgggatggaatattttaatacgtatggaggaaatccagtatcttgtgctgttggtttggctgtcctggatataattgaaaatgaagaccttcaaggaaatgccaagagagtagggaattatctcactgagttactgaaaaaacagaaggctaaacacactttgataggagatattaggtatgttcattatgaagttgtcatgtagttactcatttttttcaaaataataatagtttataggctgggcaacatggtgagaccccgtctctattaaaactacaaaaaattagccaggtgtggtggcacacacaaatagtcccagctactcgggaggctgaggcatgagaatcacttgagcctgggaggcagaggttgcagtgagccgagattgtgccactgc

SEQ ID NO: 6827 - DNA, 680 bp, Homo sapiens
  source 1..680: mol_type = unassigned DNA; mol_type = unassigned DNA
gcaccttcgcagcgccctgcaccccgccaccatgtgcgagctgtacagtaagcgggacactctggggctgaggaagaagcacatcgggccctcatgcaaagttttctttgcatcggatcccatcaaaatagtgagagcccagaggcagtacatgtttgatgagaacggtgaacagtacttggactgcatcaacaatgttgcccatgatccgaagccaacgacttagccttacgcctggctcggcagttcagaggccaccaggatgtgatcactcttgaccatgcttaccatggtcacctatcatccttaattgagattagcccatataagtttcagaaaggaaaagatgtcaaaaaagaatttgtacatgtggcaccaactccagatacttacagaggaaaatatagagaagaccatgcagactcagccagtgcttatgcagatgaagtgaagaaaatcattgaagatgctcataacagtggaaggaagattgctgcctttattgctgaatccatgcagagttgtggcggacaaataattcctccagcaggctacttccagaaagtggcagaatatgtacacggtgcagggggtgtgtttatagctgatgaagttcaagtgggctttggcagagttgggaaacatttctggagcttccagatgtatggtgaagactttgt

SEQ ID NO: 6828 - DNA, 260 bp, Homo sapiens
  source 1..260: mol_type = unassigned DNA; mol_type = unassigned DNA
gcaacactggttttcatatacttgaaaatatctctcttggaattattttgattactgcttttttttctttgtctcttcagtgcttaccatggtcacctatcatccttaattgagattagcccatataagtttcagaaaggaaaagatgtcaaaaaagaatttgtacatgtggcaccaactccagatacttacagaggaaaatatagagaagaccatgcagactcagccagtgcttatgcagatgaagtgaagaaaatcat

SEQ ID NO: 6829 - DNA, 576 bp, Homo sapiens
  source 1..576: mol_type = unassigned DNA; mol_type = unassigned DNA
gacgccaccggtgacctccgacgccccgggcaagagaacgccaggagggataacgggaggaaggccggccggggccgccaaggcagtcccaggctcgcgtaggaggcgcgcagaccttgcaccttgcaccttcgcagcgccctgcaccccgccaccatgtgcgagctgtacagtaagcgggacactctggggctgaggaagaagcacatcggtgggacactgtcacccaggagtggtcaaagctgccctgaaacagatggaactgctaaatacaaattctcgattcctccacgacaacattgttgagtatgccaaacgcctttcagcaactctgccggagaaactctctgtttgttattttacaaattcaggatccgaagccaacgacttagccttacgcctggctcggcagttcagaggccaccaggatgtgatcactcttgaccatgcttaccatggtcacctatcatccttaattgagattagcccatataagtttcagaaaggaaaagatgtcaaaaaagaatttgtacatgtggcaccaactccagatacttacagaggaaaatatagaga

SEQ ID NO: 6830 - DNA, 567 bp, Homo sapiens
  source 1..567: mol_type = unassigned DNA; mol_type = unassigned DNA
agacaccattccagggatgggagatgggtggaagaaggatagcgctccgccacccccacacaactcgaaagtttttggaaactgtgaactgagaaatattttttcatgatggctccgcaaacaaaccaattctgacaatttttacttaaagtgagctttttcttcttgcatgcttggttaagtgatgaagggtttatctagccaatagaaaaacttgaaaccaccttctgttagaaaagcagagactttatttagatccctcttacccaacttgctctcccaagctgtgttcttcccagcctgcttgtcttgcccccgtcacaaacgacttagtaatataaagtgggacactgtcacccaggagtggtcaaagctgccctgaaacagatggaactgctaaatacaaattctcgattcctccacgacaacattgttgagtatgccaaacgcctttcagcaactctgccggagaaactctctgtttgttattttacaaattcaggatccgaagccaacgacttagccttacgcctggctcggcagttcagaggccaccaggatgtgatc

SEQ ID NO: 6831 - DNA, 543 bp, Homo sapiens
  source 1..543: mol_type = unassigned DNA; mol_type = unassigned DNA
gtgcacgcgccccgcgcgcctccacctgcaggggccgcgcggactcccagaaacgctcctggaacccggaacgctgggcttcctgcccgctcgaaagtccccggctcgctctgcagccggcggactagcgggggctgccggccggctagaggggttggtggatgacggccaatagccctagcagacaccattccagggatgggagatgggtggaagaaggatagcgctccgccacccccacacaactcgaaagtttttggaaactgtgaactgagaaatattttttcatgatggctccgcaaacaaaccaattctgacaatttttacttaaatgggacactgtcacccaggagtggtcaaagctgccctgaaacagatggaactgctaaatacaaattctcgattcctccacgacaacattgttgagtatgccaaacgcctttcagcaactctgccggagaaactctctgtttgttattttacaaattcaggatccgaagccaacgacttagccttacgcctggctcggcagttcagaggcca

SEQ ID NO: 6832 - DNA, 5139 bp, Homo sapiens
  source 1..5139: mol_type = unassigned DNA; mol_type = unassigned DNA
agttggaaagagaccacagactttgagggaagctcactcaggatctgctctccggcaaagtagtaagtgaggtgctgagagcagaatgagctactttgtggattctgctgggagcagccccgtcccttactcagcgcctcgtcctgcagtggtgaggcaaggacctagcaacacttatgaagatcctcgaatgaactgtggtttccagtccaattatcaccagcaaagaccttgctaccccttttgggatgagatggcaactcaggaagttcctactggtcttgaacactgtgtctcagatatggaatgtgcagatgtcccactattaactccaagcagcaaagaaatgatgtctcaagcattaaaagctactttcagtggtttcactaaagaacagcaacgactggggatcccaaaagacccccggcagtggacagaaacccatgttcgggactgggtgatgtgggctgtgaatgaattcagcctgaaaggtgtagacttccagaagttctgtatgaatggagcagccctctgcgccctgggtaaagactgctttctcgagctggccccagactttgttggggacatcttatgggaacatctagagatcctgcagaaagaggatgtgaaaccatatcaagttaatggagtcaacccagcctatccagaatcccgctatacctcggattacttcattagctatggtattgagcatgcccagtgtgttccaccatcggagttctcagagcccagcttcatcacagagtcctatcagacgctccatcccatcagctcggaagagctcctctccctcaagtatgagaatgactacccctcggtcattctccgagaccctctccagacagacaccttgcagaatgactactttgctatcaaacaagaagtcgtcaccccagacaacatgtgcatggggaggaccagtcgtggtaaactcgggggccaggactcttttgaaagcatagagagctacgatagttgtgatcgcctcacccagtcctggagcagccagtcatctttcaacagcctgcagcgtgttccctcctatgacagcttcgactcagaggactatccggctgccctgcccaaccacaagcccaagggcaccttcaaggactatgtgcgggaccgtgctgacctcaataaggacaagcctgtcattcctgctgctgccctagctggctacacaggcagtggaccaatccagctatggcagtttcttctggaattactcactgataaatcctgtcagtcttttatcagctggacaggagatggctgggaattcaaactttctgacccagatgaggtggccaggagatggggaaagaggaaaaacaaacctaagatgaattatgagaaactgagccgtggcctacgctactattacgacaaaaacatcatccacaagacagcggggaaacgctacgtgtaccgctttgtgtgtgacctgcagagcctgctggggtacacccctgaggagctgcacgccatgctggacgtcaagccagatgccgacgagtgatggcactgaaggggctggggaaaccctgctgagaccttccaaggacagccgtgttggttggactctgaattttgaattgttattctattttttattttccagaactcattttttaccttcaggggtgggagctaagtcagttgcagctgtaatcaattgtgcgcagttgggaaaggaaagccaggacttgtggggtgggtgggaccagaaattcttgagcaaattttcaggagagggagaagggccttctcagaagcttgaaggctctggcttaacagagaaagagactaatgtgtccaatcatttttaaaaatcatccatgaaaaagtgtcttgagttgtggacccattagcaagtgacattgtcacatcagaactcatgaaactgatgtaaggcaattaatttgcttctgtttttaggtctgggagggcaaaaaagaggtgggtgggatgaaacatgttttggggggggatgcactgaaaatctgagaactatttacctatcactctagttttgaagcaaagatggacttcagtggggaggggccaaaaccgttgttgtgttaaaatttattttattaaattttgtgccagtattttttttcttaaaaatcgtcttaagctctaaggtggtctcagtattgcaatatcatgtaagtttgtttttatttgccggctgaggattctgtcacaatgaaagaaaactgtttatatagaccccattggaaaagcaaaacgctctcactgagatcagggatcccaaattcatgggacttatataagaaggacaattaatgctgatttgggtacaggggaattatgtgtgtgaatgtcatctacaattaaaaaaaattagcacatccctttacttacttgttatcagtggattctcggggtttggacttaatgttgagctaagaagcattaagtctttgaactgaatgtattttgcatccctggttttggacgacagtaaacgtaggagcactgttgaagtcctggaagggagatcgaaggaggaagattgacttggttctttcttagtcctatatctgtagcatagatgacttggaataaaagctgtatgcatgggcattacccctcaggtcctaagaaataagtcctgaatgcatgtcgttccaaactaacactctgtaatttttcttttatgtcttattttccaagagtcctccattttttgcaccccctcaccgccaactctgttattcagtagagagaagtgtacggctttctgattggtgagtgaaaaagtaacttgagacacgacctaagttgaagagtttagacttgctgagttttagaagtgatggaaattaagagagcatttcaataaaatgtgacttggctgtctttggaagagaagtgcaaggctttcctttgaagaatttaaattagtccggtaggatgtcaggtgagactgtgtatgcaaaatgaatggcacaggtgatgccagggcctcttgcttgggtctgatgtcttggcacagggtaagtgaaggttaattccagaagagaggaatgacttgaaggcaaaggaaactaaggaaggaggttcagtgaggaaaataaggttgtccatgagatttgaatagatttttagttcccccaaggtttaaatacaaacatagtcaagcaaggtagtcatctttctgctggttgtgagggggaatctgaaaatggagttttagaggaaaagtcaacatctaactagtgaggaaaagtgcctaatacaattagaatctccctcactctatagttgcccagttgaaaggataaggaggaggggtggcttttatggacttccatgagagaaggaaagaaatatttcaggtaagcttctcagggctggccctttttgggatttggatgagaaattggaagtactaactactttctagcatatctttaagaaaattgattgttatttactcccagatcctcttgcagacccagaattatcaggaacatagctctgtgattcatgagtgtccccatactgatgaattggagcatccatatggaaagcaaaggcagaattatcccagctgtattattttgatcttttggatgcaggtgccttaatgaagctctcaaaatattttaggagctgctcagggagtgttgggtggaactgtttggactacattgttttctcttagattatgtgatttttgttgggcactggcaaaaggtgtgtgtgtgaatgtgtgcatgtgtgtgaatgttgtgtgtgtgtgtgtgtgtgtgtgtgtgtgtgtgtgtgtgtgtgtttgcagacatgcaaaactgcagctgaaataataccttagatttctaggtaagtctttccacatttcaataatgggtaagagtagaaccagggccgggtatcaattattgcttgctgtttgcaaccaggcataaaatcactttctcaaatcatccaccgttcctattaaatttatgccggaaactctccttctgtgagtataactcctgcagttcctatagcagataagatataagaaagtgcctcctagtgctcctccgcccgcttgtttgctaaaattccctttctctctaagtccaccattttcaagatttgtagatagtgtattagttaagacagctttgtcgatctggccagatgttttttctcctttgtccaaaggccagagaccatcccaggaagagtggtgggtggtttatacactggaaatgttgcgtttatgctttttaaaaacacacgttaacttcagaggaaggatgggcaaatctggtctagctgggtgaaacccttattttcccagagatgccttaacctttgttggttttggctttagggttcagagtcacttttgttcccttctccattctggagagggacttcccctacatagagccctgatttttgtggctgtggggattggaggtagcattcaaagatcagatgtgcttttcctcactttggagatgaacactctgggttttacagcattaacctgcctaaccttcatggtgagaaatacaccatctctcttctagtcatgctgtgcatgccgcttactctgttggggtctatataaatttgttgaactcttacctacattccaaagaagtttcaaggaaccataaatatatgtatacatatacatatataaaatatatatattaaaataaaattatcaggaatactgcctcagttattgaacttttttttttaagaatactttttttttaagctgagaagtatagggatgaaaaagatgttatattgtgtttgactattttccaacttgtattttcatataatttatattttttaaaagctgaaaatttagaagcaagatgaaaaaaaggaaaagcaggtgctttttaaaaatcagaactgaggtagcttagagatgtagcgatgtaagtgtcgatgtttttttaaaaaaaaatgcaaaaaaattcttatggcggagttttttgtttgtttattttagtagctgatgctggcacatcattttgctggagagttttttatatactgtagcctgatttcatattgtattttaaactgtgtgaaattaaaaacaaagaatttcattcataa

SEQ ID NO: 6833 - DNA, 3389 bp, Homo sapiens
  source 1..3389: mol_type = unassigned DNA; mol_type = unassigned DNA
ttcgccgcaaagtgccaacttcccctggagtgccgggcgcgcaccgtccgggcgcgggggaaagaaaggcagcgggaatttgagatttttgggaagaaagtcggatttcccccgtccccttccccctgttactaatcctcattaaaaagaaaaacaacagtaactgcaaacttgctaccatcccgtacgtcccccactcctggcaccatgaaggcggccgtcgatctcaagccgactctcaccatcatcaagacggaaaaagtcgatctggagcttttcccctccccggatatggaatgtgcagatgtcccactattaactccaagcagcaaagaaatgatgtctcaagcattaaaagctactttcagtggtttcactaaagaacagcaacgactggggatcccaaaagacccccggcagtggacagaaacccatgttcgggactgggtgatgtgggctgtgaatgaattcagcctgaaaggtgtagacttccagaagttctgtatgaatggagcagccctctgcgccctgggtaaagactgctttctcgagctggccccagactttgttggggacatcttatgggaacatctagagatcctgcagaaagaggatgtgaaaccatatcaagttaatggagtcaacccagcctatccagaatcccgctatacctcggattacttcattagctatggtattgagcatgcccagtgtgttccaccatcggagttctcagagcccagcttcatcacagagtcctatcagacgctccatcccatcagctcggaagagctcctctccctcaagtatgagaatgactacccctcggtcattctccgagaccctctccagacagacaccttgcagaatgactactttgctatcaaacaagaagtcgtcaccccagacaacatgtgcatggggaggaccagtcgtggcagtggaccaatccagctatggcagtttcttctggaattactcactgataaatcctgtcagtcttttatcagctggacaggagatggctgggaattcaaactttctgacccagatgaggtggccaggagatggggaaagaggaaaaacaaacctaagatgaattatgagaaactgagccgtggcctacgctactattacgacaaaaacatcatccacaagacagcggggaaacgctacgtgtaccgctttgtgtgtgacctgcagagcctgctggggtacacccctgaggagctgcacgccatgctggacgtcaagccagatgccgacgagtgatggcactgaaggggctggggaaaccctgctgagaccttccaaggacagccgtgttggttggactctgaattttgaattgttattctattttttattttccagaactcattttttaccttcaggggtgggagctaagtcagttgcagctgtaatcaattgtgcgcagttgggaaaggaaagccaggacttgtggggtgggtgggaccagaaattcttgagcaaattttcaggagagggagaagggccttctcagaagcttgaaggctctggcttaacagagaaagagactaatgtgtccaatcatttttaaaaatcatccatgaaaaagtgtcttgagttgtggacccattagcaagtgacattgtcacatcagaactcatgaaactgatgtaaggcaattaatttgcttctgtttttaggtctgggagggcaaaaaagaggtgggtgggatgaaacatgttttggggggggatgcactgaaaatctgagaactatttacctatcactctagttttgaagcaaagatggacttcagtggggaggggccaaaaccgttgttgtgttaaaatttattttattaaattttgtgccagtattttttttcttaaaaatcgtcttaagctctaaggtggtctcagtattgcaatatcatgtaagtttgtttttatttgccggctgaggattctgtcacaatgaaagaaaactgtttatatagaccccattggaaaagcaaaacgctctcactgagatcagggatcccaaattcatgggacttatataagaaggacaattaatgctgatttgggtacaggggaattatgtgtgtgaatgtcatctacaattaaaaaaaattagcacatccctttacttacttgttatcagtggattctcggggtttggacttaatgttgagctaagaagcattaagtctttgaactgaatgtattttgcatccctggttttggacgacagtaaacgtaggagcactgttgaagtcctggaagggagatcgaaggaggaagattgacttggttctttcttagtcctatatctgtagcatagatgacttggaataaaagctgtatgcatgggcattacccctcaggtcctaagaaataagtcctgaatgcatgtcgttccaaactaacactctgtaatttttcttttatgtcttattttccaagagtcctccattttttgcaccccctcaccgccaactctgttattcagtagagagaagtgtacggctttctgattggtgagtgaaaaagtaacttgagacacgacctaagttgaagagtttagacttgctgagttttagaagtgatggaaattaagagagcatttcaataaaatgtgacttggctgtctttggaagagaagtgcaaggctttcctttgaagaatttaaattagtccggtaggatgtcaggtgagactgtgtatgcaaaatgaatggcacaggtgatgccagggcctcttgcttgggtctgatgtcttggcacagggtaagtgaaggttaattccagaagagaggaatgacttgaaggcaaaggaaactaaggaaggaggttcagtgaggaaaataaggttgtccatgagatttgaatagatttttagttcccccaaggtttaaatacaaacatagtcaagcaaggtagtcatctttctgctggttgtgagggggaatctgaaaatggagttttagaggaaaagtcaacatctaactagtgaggaaaagtgcctaatacaattagaatctccctcactctatagttgcccagttgaaaggataaggaggaggggtggcttttatggacttccatgagagaaggaaagaaatatttcaggtaagcttctcagggctggccctttttgggatttggatgagaaattggaagtactaactactttctagcatatctttaagaaaattgattgttatttactcccagatcctcttgcagacccagaattatcaggaacatagctctgtgattcatgagtgtccccatactgatgaattggagcatccatatggaaagcaaaggcagaattatcccagctgtattattttgatcttttggatgcaggtgccttaatgaagctctcaaaata

SEQ ID NO: 6834 - DNA, 2134 bp, Homo sapiens
  source 1..2134: mol_type = unassigned DNA; mol_type = unassigned DNA
ggcgagggccgggcaggaggagcgggcgcggcgcgggcgaggctgggacccgagcgcgctcacttcgccgcaaagtgccaacttcccctggagtgccgggcgcgcaccgtccgggcgcgggggaaagaaaggcagcgggaatttgagatttttgggaagaaagtcggatttcccccgtccccttccccctgttactaatcctcattaaaaagaaaaacaacagtaactgcaaacttgctaccatcccgtacgtcccccactcctggcaccatgaaggcggccgtcgatctcaagccgactctcaccatcatcaagacggaaaaagtcgatctggagcttttcccctccccggatatggaatgtgcagatgtcccactattaactccaagcagcaaagaaatgatgtctcaagcattaaaagctactttcagtggtttcactaaagaacagcaacgactggggatcccaaaagacccccggcagtggacagaaacccatgttcgggactgggtgatgtgggctgtgaatgaattcagcctgaaaggtgtagacttccagaagttctgtatgaatggagcagccctctgcgccctgggtaaagactgctttctcgagctggccccagactttgttggggacatcttatgggaacatctagagatcctgcagaaagaggatgtgaaaccatatcaagttaatggagtcaacccagcctatccagaatcccgctatacctcggattacttcattagctatggtattgagcatgcccagtgtgttccaccatcggagttctcagagcccagcttcatcacagagtcctatcagacgctccatcccatcagctcggaagagctcctctccctcaagtatgagaatgactacccctcggtcattctccgagaccctctccagacagacaccttgcagaatgactactttgctatcaaacaagaagtcgtcaccccagacaacatgtgcatggggaggaccagtcgtggtaaactcgggggccaggactcttttgaaagcatagagagctacgatagttgtggccaggagatggggaaagaggaaaaacaaacctaagatgaattatgagaaactgagccgtggcctacgctactattacgacaaaaacatcatccacaagacagcggggaaacgctacgtgtaccgctttgtgtgtgacctgcagagcctgctggggtacacccctgaggagctgcacgccatgctggacgtcaagccagatgccgacgagtgatggcactgaaggggctggggaaaccctgctgagaccttccaaggacagccgtgttggttggactctgaattttgaattgttattctattttttattttccagaactcattttttaccttcaggggtgggagctaagtcagttgcagctgtaatcaattgtgcgcagttgggaaaggaaagccaggacttgtggggtgggtgggaccagaaattcttgagcaaattttcaggagagggagaagggccttctcagaagcttgaaggctctggcttaacagagaaagagactaatgtgtccaatcatttttaaaaatcatccatgaaaaagtgtcttgagttgtggacccattagcaagtgacattgtcacatcagaactcatgaaactgatgtaaggcaattaatttgcttctgtttttaggtctgggagggcaaaaaagaggtgggtgggatgaaacatgttttggggggggatgcactgaaaatctgagaactatttacctatcactctagttttgaagcaaagatggacttcagtggggaggggccaaaaccgttgttgtgttaaaatttattttattaaattttgtgccagtattttttttcttaaaaatcgtcttaagctctaaggtggtctcagtattgcaatatcatgtaagtttgtttttatttgccggctgaggattctgtcacaatgaaagaaaactgtttatatagaccccattggaaaagcaaaacgctctcactgagatcagggatcccaaattcatgggacttatataagaaggacaattaatgctgatttgggtacaggggaattatgtgtgtgaatgtcatctacaattaaaaaaaattagcacatcccttta

SEQ ID NO: 6835 - DNA, 2231 bp, Homo sapiens
  source 1..2231: mol_type = unassigned DNA; mol_type = unassigned DNA
gagagcgaacgaggcagccgccggcggagaggagggagcgggcgagggccgggcaggaggagcgggcgcggcgcgggcgaggctgggacccgagcgcgctcacttcgccgcaaagtgccaacttcccctggagtgccgggcgcgcaccgtccgggcgcgggggaaagaaaggcagcgggaatttgagatttttgggaagaaagtcggatttcccccgtccccttccccctgttactaatcctcattaaaaagaaaaacaacagtaactgcaaacttgctaccatcccgtacgtcccccactcctggcaccatgaaggcggccgtcgatctcaagccgactctcaccatcatcaagacggaaaaagtcgatctggagcttttcccctccccggatatggaatgtgcagatgtcccactattaactccaagcagcaaagaaatgatgtctcaagcattaaaagctactttcagtggtttcactaaagaacagcaacgactggggatcccaaaagacccccggcagtggacagaaacccatgttcgggactgggtgatgtgggctgtgaatgaattcagcctgaaaggtgtagacttccagaagttctgtatgaatggagcagccctctgcgccctgggtaaagactgctttctcgagctggccccagactttgttggggacatcttatgggaacatctagagatcctgcagaaagaggatgtgaaaccatatcaagttaatggagtcaacccagcctatccagaatcccgctatacctcggattacttcattagctatggtattgagcatgcccagtgtgttccaccatcggagttctcagagcccagcttcatcacagagtcctatcagacgctccatcccatcagctcggaagagctcctctccctcaagtatgagaatgactacccctcggtcattctccgagaccctctccagacagacaccttgcagaatgactactttgctatcaaacaagaagtcgtcaccccagacaacatgtgcatggggaggaccagtcgtggtaaactcgggggccaggactcttttgaaagcatagagagctacgatagttgtgatcgcctcacccagtcctggagcagccagtcatctttcaacagcctgcagcgtgttccctcctatgacagcttcgactcagaggactatccggctgccctgcccaaccacaagcccaagggcaccttcaaggactatgtgcgggaccgtgctgacctcaataaggacaagcctgtcattcctgctgctgccctagctggctacacaggcagtggaccaatccagctatggcagtttcttctggaattactcactgataaatcctgtcagtcttttatcagctggacaggagatggctgggaattcaaactttctgacccagatgaggtggccaggagatggggaaagaggaaaaacaaacctaagatgaattatgagaaactgagccgtggcctacgctactattacgacaaaaacatcatccacaagacagcggggaaacgctacgtgtaccgctttgtgtgtgacctgcagagcctgctggggtacacccctgaggagctgcacgccatgctggacgtcaagccagatgccgacgagtgatggcactgaaggggctggggaaaccctgctgagaccttccaaggacagccgtgttggttggactctgaattttgaattgttattctattttttattttccagaactcattttttaccttcaggggtgggagctaagtcagttgcagctgtaatcaattgtgcgcagttgggaaaggaaagccaggacttgtggggtgggtgggaccagaaattcttgagcaaattttcaggagagggagaagggccttctcagaagcttgaaggctctggcttaacagagaaagagactaatgtgtccaatcatttttaaaaatcatccatgaaaaagtgtcttgagttgtggacccattagcaagtgacattgtcacatcagaactcatgaaactgatgtaaggcaattaatttgcttctgtttttaggtctgggagggcaaaaaagaggtgggtgggatgaaacatgttttggggggggatgcactgaaaatctgagaactatttacctatcactctagttttgaagcaaagatggacttcagtggggaggggccaaaaccgttgttgtgttaaaatttattttattaaattttgtgccagta

SEQ ID NO: 6836 - DNA, 475 bp, Homo sapiens
  source 1..475: mol_type = unassigned DNA; mol_type = unassigned DNA
tgccttagaatatcccagaggataggcacagtgttctctttctagaatttgtttagcaataaaaatgaaccgatccttaagttaatcaaaataaagcacttgacacattttcttccatgcttttgttttatagggaggcctttgtcttttctatctgttcgagctcataacacttcctccgacatgtgcactgtctgttgccttcattttctcctggctggatgggctgagagaagagggatgtgggagtgccgtgtgtggggattagctgcgtagagtgctgaatatctggtgtaatgattcacaatggcttgtgtttctaggcagtggaccaatccagctatggcagtttcttctggaattactcactgataaatcctgtcagtcttttatcagctggacaggagatggctgggaattcaaactttctgacccagatgaggtggccaggagatggggaaagaggaaaaacaaa

SEQ ID NO: 6837 - DNA, 545 bp, Homo sapiens
  source 1..545: mol_type = unassigned DNA
aactagagctgcttgtgttacttcaggccatggcctttctgggggtcaacagatagcttcattaattagatagatcagattcaacttactggccagtgcccctgatattaagttctggctttgtcagtggggtttgttgtattccctcaaccctatcaccatggctcagtgaccctatttggaataccagcaggactagaagggtagtggtgtaaaacctttaaatgatatgaggcactctgcctttcagtgctttttagataaaggttcatagatcactgaagttaactgcagtcttcactctttctggattgacaggaatagcaccctcaaatttcagagccatcagacaccatggtatcatgctatcggagttgactgttgaaagttgcttaatatccctgatatggaatgtgcagatgtcccactattaactccaagcagcaaagaaatgatgtctcaagcattaaaagctactttcagtggtttcactaaagaacagcaacgactggggatcccaaaagacccccggcagtggacagaaa

SEQ ID NO: 6838 - DNA, 655 bp, Homo sapiens
  source 1..655: mol_type = unassigned DNA
cagactttgagggaagctcactcaggatctgctctccggcaaagtagtaagtgaggtgctgagagcagaatgagctactttgtggattctgctgggagcagccccgtcccttactcagcgcctcgtcctgcagtggtgaggcaaggacctagcaacacttatgaagatcctcgaatgaactgtggtttccagtccaattatcaccagcaaagaccttgctaccccttttgggatgagatggcaactcaggaagttcctactggtcttgaacactgtgtctcagaattacaaggccagcttagcctgaagtcattgcttaaataacctgctaactggaatgtattgacatgaactgtcaacacggctgctcccttcaaccaattccaagctctttctcctcctaatgagaggcttcttgtgtgtcttgatttggctgttatgcctcttaacattgctcacagtctcaattggatcagaaaacagctttttctagaccacagaatgtatgctattctctgaaatcttaagctcttaagatctctacagtctgtttacccaatgtattgaattcttgtacccaatatctcatgataatgttcatttatgatacatatttcttctcttcttactatttgaataaattatattgactata

SEQ ID NO: 6839 - DNA, 628 bp, Homo sapiens
  source 1..628: mol_type = unassigned DNA
actcaggatctgctctccggcaaagtagtaagtgaggtgtgctgagagcagaatgagctactttgtggattctgctgggagcagccccgtcccttactcagcgcctcgtcctgcagtggtgtgaaatacggacagataagtttattttatttatttttttctttttcttttttttttttctgtcactcaggctggagtgcagtggcacaatcttggctcactccaacctctatcttctgggttcaagcaattctcctgccttagcctcccaagtagctgggattacagacctgcaccaccacgcctggctaatttttgtatttttagtagagaaggggtttcaccatgttggccaggctggtctcgaactcatgacctcaagtgatctttctttgagatggtctcgctctgttgcccaggctggagtgcagtggtttgatctctgctcactgcaacctgtgcctcccgtgttcaagcgattctcctgcctcagcctcccgagtggctgggattacaggtgcccaccaccacgcccaactaattttttgtatttttagtagagacagagtttcaccatgttggccaggctggtctcaaactcctgacctcgggtgatccatccacctct

SEQ ID NO: 6840 - DNA, 4594 bp, Homo sapiens
  source 1..4594: mol_type = unassigned DNA
gagatcgagagcgaacgaggcagccgccggcggagaggagggagcgggcgagggccgggcaggaggagcgggcgcggcgcgggcgaggctgggacccgagcgcgctcacttcgccgcaaagtgccaacttcccctggagtgccgggcgcgcaccgtccgggcgcgggggaaagaaaggcagcgggaatttgagatttttgggaagaaagtcggatttcccccgtccccttccccctgttactaatcctcattaaaaagaaaaacaacagtaactgcaaacttgctaccatcccgtacgtcccccactcctggcaccatgaaggcggccgtcgatctcaagccgactctcaccatcatcaagacggaaaaagtcgatctggagcttttcccctccccgggtaaactcgggggccaggactcttttgaaagcatagagagctacgatagttgtgatcgcctcacccagtcctggagcagccagtcatctttcaacagcctgcagcgtgttccctcctatgacagcttcgactcagaggactatccggctgccctgcccaaccacaagcccaagggcaccttcaaggactatgtgcgggaccgtgctgacctcaataaggacaagcctgtcattcctgctgctgccctagctggctacacaggcagtggaccaatccagctatggcagtttcttctggaattactcactgataaatcctgtcagtcttttatcagctggacaggagatggctgggaattcaaactttctgacccagatgaggtggccaggagatggggaaagaggaaaaacaaacctaagatgaattatgagaaactgagccgtggcctacgctactattacgacaaaaacatcatccacaagacagcggggaaacgctacgtgtaccgctttgtgtgtgacctgcagagcctgctggggtacacccctgaggagctgcacgccatgctggacgtcaagccagatgccgacgagtgatggcactgaaggggctggggaaaccctgctgagaccttccaaggacagccgtgttggttggactctgaattttgaattgttattctattttttattttccagaactcattttttaccttcaggggtgggagctaagtcagttgcagctgtaatcaattgtgcgcagttgggaaaggaaagccaggacttgtggggtgggtgggaccagaaattcttgagcaaattttcaggagagggagaagggccttctcagaagcttgaaggctctggcttaacagagaaagagactaatgtgtccaatcatttttaaaaatcatccatgaaaaagtgtcttgagttgtggacccattagcaagtgacattgtcacatcagaactcatgaaactgatgtaaggcaattaatttgcttctgtttttaggtctgggagggcaaaaaagaggtgggtgggatgaaacatgttttggggggggatgcactgaaaatctgagaactatttacctatcactctagttttgaagcaaagatggacttcagtggggaggggccaaaaccgttgttgtgttaaaatttattttattaaattttgtgccagtattttttttcttaaaaatcgtcttaagctctaaggtggtctcagtattgcaatatcatgtaagtttgtttttatttgccggctgaggattctgtcacaatgaaagaaaactgtttatatagaccccattggaaaagcaaaacgctctcactgagatcagggatcccaaattcatgggacttatataagaaggacaattaatgctgatttgggtacaggggaattatgtgtgtgaatgtcatctacaattaaaaaaaattagcacatccctttacttacttgttatcagtggattctcggggtttggacttaatgttgagctaagaagcattaagtctttgaactgaatgtattttgcatccctggttttggacgacagtaaacgtaggagcactgttgaagtcctggaagggagatcgaaggaggaagattgacttggttctttcttagtcctatatctgtagcatagatgacttggaataaaagctgtatgcatgggcattacccctcaggtcctaagaaataagtcctgaatgcatgtcgttccaaactaacactctgtaatttttcttttatgtcttattttccaagagtcctccattttttgcaccccctcaccgccaactctgttattcagtagagagaagtgtacggctttctgattggtgagtgaaaaagtaacttgagacacgacctaagttgaagagtttagacttgctgagttttagaagtgatggaaattaagagagcatttcaataaaatgtgacttggctgtctttggaagagaagtgcaaggctttcctttgaagaatttaaattagtccggtaggatgtcaggtgagactgtgtatgcaaaatgaatggcacaggtgatgccagggcctcttgcttgggtctgatgtcttggcacagggtaagtgaaggttaattccagaagagaggaatgacttgaaggcaaaggaaactaaggaaggaggttcagtgaggaaaataaggttgtccatgagatttgaatagatttttagttcccccaaggtttaaatacaaacatagtcaagcaaggtagtcatctttctgctggttgtgagggggaatctgaaaatggagttttagaggaaaagtcaacatctaactagtgaggaaaagtgcctaatacaattagaatctccctcactctatagttgcccagttgaaaggataaggaggaggggtggcttttatggacttccatgagagaaggaaagaaatatttcaggtaagcttctcagggctggccctttttgggatttggatgagaaattggaagtactaactactttctagcatatctttaagaaaattgattgttatttactcccagatcctcttgcagacccagaattatcaggaacatagctctgtgattcatgagtgtccccatactgatgaattggagcatccatatggaaagcaaaggcagaattatcccagctgtattattttgatcttttggatgcaggtgccttaatgaagctctcaaaatattttaggagctgctcagggagtgttgggtggaactgtttggactacattgttttctcttagattatgtgatttttgttgggcactggcaaaaggtgtgtgtgtgaatgtgtgcatgtgtgtgaatgttgtgtgtgtgtgtgtgtgtgtgtgtgtgtgtgtgtgtgtgtgtgtttgcagacatgcaaaactgcagctgaaataataccttagatttctaggtaagtctttccacatttcaataatgggtaagagtagaaccagggccgggtatcaattattgcttgctgtttgcaaccaggcataaaatcactttctcaaatcatccaccgttcctattaaatttatgccggaaactctccttctgtgagtataactcctgcagttcctatagcagataagatataagaaagtgcctcctagtgctcctccgcccgcttgtttgctaaaattccctttctctctaagtccaccattttcaagatttgtagatagtgtattagttaagacagctttgtcgatctggccagatgttttttctcctttgtccaaaggccagagaccatcccaggaagagtggtgggtggtttatacactggaaatgttgcgtttatgctttttaaaaacacacgttaacttcagaggaaggatgggcaaatctggtctagctgggtgaaacccttattttcccagagatgccttaacctttgttggttttggctttagggttcagagtcacttttgttcccttctccattctggagagggacttcccctacatagagccctgatttttgtggctgtggggattggaggtagcattcaaagatcagatgtgcttttcctcactttggagatgaacactctgggttttacagcattaacctgcctaaccttcatggtgagaaatacaccatctctcttctagtcatgctgtgcatgccgcttactctgttggggtctatataaatttgttgaactcttacctacattccaaagaagtttcaaggaaccataaatatatgtatacatatacatatataaaatatatatattaaaataaaattatcaggaatactgcctcagttattgaacttttttttttaagaatactttttttttaagctgagaagtatagggatgaaaaagatgttatattgtgtttgactattttccaacttgtattttcatataatttatattttttaaaagctgaaaatttagaagcaagatgaaaaaaaggaaaagcaggtgctttttaaaaatcagaactgaggtagcttagagatgtagcgatgtaagtgtcgatgtttttttaaaaaaaaatgcaaaaaaattcttatggcggagttttttgtttgtttattttagtagctgatgctggcacatcattttgctggagagttttttatatactgtagcctgatttcatattgtattttaaactgtgtgaaattaaaaacaaagaatttcattcataatgct

SEQ ID NO: 6841 - DNA, 6740 bp, Homo sapiens
  source 1..6740: mol_type = unassigned DNA
gtatccccaggcgccttaacaataagcagcgggttacagaggaaatcgagtctctccgtggcgcttccaggctgaggacccagcgcctaccggccgagcaccccctagggcagaggggcgagggagacccgcgggaaggggcagcaagccgcctgattgacagcccgaaatctgatcttgtgaaagagacgcggagccaatgggaggcagcgatccatcagtttggattggaggcccctggaggagaagtagaggaaaaaccaccgaattgagctctgtcagaggcgctttcggcttccaagggggaagtgctgggctataattaatgtttttattaaatttggagggaagtttttgcagcctttcgcctagcgtggccttcagtcccgttaggtgcaaagcaagtctcgttgatcgccattgctagttttgcacacgtttgcgaatcagagctgcccggggtacaccgaccgcgcagggaaacatcgagagtgtaaataaatacatcgcctcttgttcggatttttgctactaccgaaaatatgtaaattgtgaactctgttggctctctttggatccaggttgatagaagtccagatcctgaggaaatctccagctaaatgctcaaaatataaaatactgagctgagatttgcgaagagcagcagcatggatggattttatgaccagcaagtgccttacatggtcaccaatagtcagcgtgggagaaattgtaacgagaaaccaacaaatgtcaggaaaagaaaattcattaacagagatctggctcatgattcagaagaactctttcaagatctaagtcaattacaggaaacatggcttgcagaagctcaggtacctgacaatgatgagcagtttgtaccagactatcaggctgaaagtttggcttttcatggcctgccactgaaaatcaagaaagaaccccacagtccatgttcagaaatcagctctgcctgcagtcaagaacagccctttaaattcagctatggagaaaagtgcctgtacaatgtcagtgcctatgatcagaagccacaagtgggaatgaggccctccaacccccccacaccatccagcacgccagtgtccccactgcatcatgcatctccaaactcaactcatacaccgaaacctgaccgggccttcccagctcacctccctccatcgcagtccataccagatagcagctaccccatggaccacagatttcgccgccagctttctgaaccctgtaactcctttcctcctttgccgacgatgccaagggaaggacgtcctatgtaccaacgccagatgtctgagccaaacatccccttcccaccacaaggctttaagcaggagtaccacgacccagtgtatgaacacaacaccatggttggcagtgcggccagccaaagctttccccctcctctgatgattaaacaggaacccagagattttgcatatgactcagaagtgcctagctgccactccatttatatgaggcaagaaggcttcctggctcatcccagcagaacagaaggctgtatgtttgaaaagggccccaggcagttttatgatgacacctgtgttgtcccagaaaaattcgatggagacatcaaacaagagccaggaatgtatcgggaaggacccacataccaacggcgaggatcacttcagctctggcagtttttggtagctcttctggatgacccttcaaattctcattttattgcctggactggtcgaggcatggaatttaaactgattgagcctgaagaggtggcccgacgttggggcattcagaaaaacaggccagctatgaactatgataaacttagccgttcactccgctattactatgagaaaggaattatgcaaaaggtggctggagagagatatgtctacaagtttgtgtgtgatccagaagcccttttctccatggcctttccagataatcagcgtccactgctgaagacagacatggaacgtcacatcaacgaggaggacacagtgcctctttctcactttgatgagagcatggcctacatgccggaagggggctgctgcaacccccacccctacaacgaaggctacgtgtattaacacaagtgacagtcaagcagggcgtttttgcgcttttccttttttctgcaagatacagagaattgctgaatctttgttttatttctgttgtttgtattttatttttaaataataatacacaaaaaggggcttttcctgttgcattattctatggtctgccatggactgtgcactttatttgagggtgggtgggagtaatctaaacatttattctgtgtaacaggaagctaatgggtgaatgggcagagggatttggggattactttttacttaggcttgggatggggtcctacaagttttgagtatgatgaaactatatcatgtctgtttgatttcataacaacataagataatgtttattttatcggggtatctatggtacagttaatttcacgttgtgtaaatatccacttggagactatttgccttgggcattttcccctgtcatttatgagtctctgcaggtgtacaaaaaaaccccaatctactgtaaatggcagtttaattgttagaaatgactgtttttgcaccacttgtaaaaaggtatttagcgattgcatttgctgtttgttgttttattttgctttatatatgacttgcagaggataaccataaaatgggtaattctctctgaagttgaataatcaccatgactgtaaatgaggggcacaattttggactctggcgccaaactgagtcataggccagtagcattacgtgtatctggtgccaccttgctgtttagatacaaatcataccgtcttttaaatattttgaagcccatttcagttaaataatgacatgtcatggtcctttggaatcttcatttaaatgttaaatctggaatcaaaatgaagcaaaaaatatctgtctccttttcactttcttcagtacataaatacattatttaatcaataagaattaactgtactaaatcatgtattatgctgttctagttacagcaaacactctttaagaaaaatatccaatacactaaataggtactatagtaatttttagacatggtacccattgatatgcatttaaaccttttactgctgtgttatgttgataacatatataaatattagataatgctaatgcttctgctgctgtcttttctgtaatattctctttcatgctgaatttactatgaccatttataagcagtgcagttaactacagatagcatttcaggacaaaatagatgactcaaaccatttattgcttaaaaaatagcttacgccatgctatgctataagcagcttttatgcacattgacaaatgaagagtaagcttcagcttgctaaaggaaactgtggaaccttttgtaacttttggtgatatggaaaattatttacaaaccgtcaaagaatatgaggaagttgctgtatgacatagtgctggcactgatattatccatcatctctttttggacacttctgtaaatgtgattggattgtttgaaagaagatttaaagtttcaaagttttttgttctgtttttgctttgcatttggagaaaatattgaaagcagggtatgttgtttcattcaccttgaaaaaaccatgagtaaatggggatatagaatctctgaatagctcgctaaaagattcaagcaagggacatgaattttgttccatctatcaataatatccagaagaacaacttttttaaagagtctatagcaaaaagcaaaaaaaaaaaaaaattctaaacacaaagtcaaaataaacctattgtaaaagcatttcgtgatgagcatgaaaaagattgtttaaagatgatccccccagctacccattttccaaaactacacagatcacagctcatttctctaagtggagcagttatcaagaaacccaaacaccaaaattgctactcttcacatttaatcctacaaaaagtactccaatttcaaaatatgtatgtaacctgcgatttcaatgattgttgttcatatacatcatgtattattttggcccattttgggcctaaaaaagaaaactatgccttaaaaatcagaaccttttctccccactatgcttatgtggccatctacagcacttagaataaaaacagatgttaaaatattcagtgaaagttttattggaaaaaggaattgagatatataattgagatttggtgaaattgaaggagaaaatttaagtgagtctttaaaatatattctgaatgaaaactgtattgaggattcatttttgttccttttttttctttttctcttttctcctttttcttctttttaatagtctagttttagtcagtcagtgaggaagaattgggccatgctaacgttatcacaagagaacaatggcagaaatggtattagttatataatatttaaggacaaactatatgttttgctgttttaacgtagtgactcactgaactaaatacataattgaccaacattaagtgtatttccaatacagaagggttgaaaatattacattataaactcttttgaaaaatgtatctaaaattttttaagttctgttttgattccactttttggttgagtttttatgtttttgttttcaggtagattaataaatctggcagctgatttctgcaagattcttgtgttttgaatttctcattgaattggctactcaaacatagaaatcatttgttaatgatgtaatgtcttctctcagcttttatcttcactgctgtttgctgtctcttgatgatgacatgttaatacccaatagattaattgcaacaaacacttatactcaaataactaagtaaaaataatttttcttgttatgtccatgaaaagtgcttcagaataaaaatccacaagactgacagtgcagaacatttttctcaaatcatgggcggatcttggaggtctagtttcccgtagatgctgtaaccaattaccacaacttcagtaatttacacaaatttatcttatagttctggaggcagaagttcaaaagaagccttaagagactaaaaccaagatgtccttaggtctggttccttctggaggctccaggggagattcttccagctttcacttctagagtctgctgacattccttggctcctggctacatcacttcaatctctgcttccatggtcacatactcttctactatagtcaaatttccttcctgcctcttataaggatgcttgtgattacatttaggggatgctcagataatccaggacaatctctccatctcaagatccttaacttaatgacgtgtgccaagtccctttggctagataattattcataggtcccagggattaggacatggatgtaaggggtgagggcagggctgttattcagaacaccgcacggaggaggaagactgtgtagcaaagactctaattgatttactcaggaacagtggagttctgctgagggatctaggatttgaaagtactagagtttgcttttatttaccactgagatattttccccttattctgcataaataattttgaaaactttctatattaaatttcaactattccactaaaatgtctggtaatcacatcaagcctttagattattcaaatccttccccagcccccaggaaaacactaagtcatgaaacagaaaaacagaaggtatgataataatagtaataacagttaaatcagtggtctaatccagattttattttttaatacatttcttttggtgttaatatgggttactatgtgatcttatcatttgctagtgattattacttattaggtaagaacaatgtgtaaaatatgtctattactcaaaagaacaattgcaaaatgagtcaacttatctttatataaccaggaaagaaatatattgccagaagctacagaattttgccagatgatagggatttctaaaatgagccactttgtctatcatgcagccttttcagagcttgtaatgagaaaacattacagaggagaaggtcatttggatgtttgttacttggaatcctagaaaacaaaaactaaaatttaaaaataagaagtgagtaagctattttccatttgcgatttggtatggagaagagaggaaatagaattattaaaaaaatacaaattgggtaaaagtgatggtggaaaaaatataaagaaggcaaatgtacatattaagcaattctactaagaattggaaaaatcaagtttcaaaaagatggtaatagttgggcatgatactagaaaatttcacccagtttattcagagctcaactagtacttttaggacttctttttttatatacatgagactcactttgacatacttaaaaaaaaaacagtttatggaaagtacagtttaagaggagaatttgattagactaagtggatatctttatagaaatattaatgatttcagaattttcagttacaagtgtatataccgtggctattgtttatggattcatatgtaaggtagggtcttttttgcatatagactccagtattagttactttcattctaaaattatatttatgcttctatggggaagaaaatttttaattcacttggttgtattaaaattatacttacggtttgagaaaacatgctatgaaaatcatgattatagcaaattaaatatgctcaaaatttaaatctaaaataaaagcccagaaactgaaaat

SEQ ID NO: 6842 - DNA, 4402 bp, Homo sapiens
  source 1..4402: mol_type = unassigned DNA
gagctctgtcagaggcgctttcggcttccaagggggaagtgctgggctataattaatgtttttattaaatttggagggaagtttttgcagcctttcgcctagcgtggccttcaggttgatagaagtccagatcctgaggaaatctccagctaaatgctcaaaatataaaatactgagctgagatttgcgaagagcagcagcatggatggattttatgaccagcaagtgccttacatggtcaccaatagtcagcgtgggagaaattgtaacgagaaaccaacaaatgtcaggaaaagaaaattcattaacagagatctggctcatgattcagaagaactctttcaagatctaagtcaattacaggaaacatggcttgcagaagctcaggtacctgacaatgatgagcagtttgtaccagactatcaggctgaaagtttggcttttcatggcctgccactgaaaatcaagaaagaaccccacagtccatgttcagaaatcagctctgcctgcagtcaagaacagccctttaaattcagctatggagaaaagtgcctgtacaatgtcagtgcctatgatcagaagccacaagtgggaatgaggccctccaacccccccacaccatccagcacgccagtgtccccactgcatcatgcatctccaaactcaactcatacaccgaaacctgaccgggccttcccagctcacctccctccatcgcagtccataccagatagcagctaccccatggaccacagatttcgccgccagctttctgaaccctgtaactcctttcctcctttgccgacgatgccaagggaaggacgtcctatgtaccaacgccagatgtctgagccaaacatccccttcccaccacaaggctttaagcaggagtaccacgacccagtgtatgaacacaacaccatggttggcagtgcggccagccaaagctttccccctcctctgatgattaaacaggaacccagagattttgcatatgactcaggctgtatgtttgaaaagggccccaggcagttttatgatgacacctgtgttgtcccagaaaaattcgatggagacatcaaacaagagccaggaatgtatcgggaaggacccacataccaacggcgaggatcacttcagctctggcagtttttggtagctcttctggatgacccttcaaattctcattttattgcctggactggtcgaggcatggaatttaaactgattgagcctgaagaggtggcccgacgttggggcattcagaaaaacaggccagctatgaactatgataaacttagccgttcactccgctattactatgagaaaggaattatgcaaaaggtggctggagagagatatgtctacaagtttgtgtgtgatccagaagcccttttctccatggcctttccagataatcagcgtccactgctgaagacagacatggaacgtcacatcaacgaggaggacacagtgcctctttctcactttgatgagagcatggcctacatgccggaagggggctgctgcaacccccacccctacaacgaaggctacgtgtattaacacaagtgacagtcaagcagggcgtttttgcgcttttccttttttctgcaagatacagagaattgctgaatctttgttttatttctgttgtttgtattttatttttaaataataatacacaaaaaggggcttttcctgttgcattattctatggtctgccatggactgtgcactttatttgagggtgggtgggagtaatctaaacatttattctgtgtaacaggaagctaatgggtgaatgggcagagggatttggggattactttttacttaggcttgggatggggtcctacaagttttgagtatgatgaaactatatcatgtctgtttgatttcataacaacataagataatgtttattttatcggggtatctatggtacagttaatttcacgttgtgtaaatatccacttggagactatttgccttgggcattttcccctgtcatttatgagtctctgcaggtgtacaaaaaaaccccaatctactgtaaatggcagtttaattgttagaaatgactgtttttgcaccacttgtaaaaaggtatttagcgattgcatttgctgtttgttgttttattttgctttatatatgacttgcagaggataaccataaaatgggtaattctctctgaagttgaataatcaccatgactgtaaatgaggggcacaattttggactctggcgccaaactgagtcataggccagtagcattacgtgtatctggtgccaccttgctgtttagatacaaatcataccgtcttttaaatattttgaagcccatttcagttaaataatgacatgtcatggtcctttggaatcttcatttaaatgttaaatctggaatcaaaatgaagcaaaaaatatctgtctccttttcactttcttcagtacataaatacattatttaatcaataagaattaactgtactaaatcatgtattatgctgttctagttacagcaaacactctttaagaaaaatatccaatacactaaataggtactatagtaatttttagacatggtacccattgatatgcatttaaaccttttactgctgtgttatgttgataacatatataaatattagataatgctaatgcttctgctgctgtcttttctgtaatattctctttcatgctgaatttactatgaccatttataagcagtgcagttaactacagatagcatttcaggacaaaatagatgactcaaaccatttattgcttaaaaaatagcttacgccatgctatgctataagcagcttttatgcacattgacaaatgaagagtaagcttcagcttgctaaaggaaactgtggaaccttttgtaacttttggtgatatggaaaattatttacaaaccgtcaaagaatatgaggaagttgctgtatgacatagtgctggcactgatattatccatcatctctttttggacacttctgtaaatgtgattggattgtttgaaagaagatttaaagtttcaaagttttttgttctgtttttgctttgcatttggagaaaatattgaaagcagggtatgttgtttcattcaccttgaaaaaaccatgagtaaatggggatatagaatctctgaatagctcgctaaaagattcaagcaagggacatgaattttgttccatctatcaataatatccagaagaacaacttttttaaagagtctatagcaaaaagcaaaaaaaaaaaaaaattctaaacacaaagtcaaaataaacctattgtaaaagcatttcgtgatgagcatgaaaaagattgtttaaagatgatccccccagctacccattttccaaaactacacagatcacagctcatttctctaagtggagcagttatcaagaaacccaaacaccaaaattgctactcttcacatttaatcctacaaaaagtactccaatttcaaaatatgtatgtaacctgcgatttcaatgattgttgttcatatacatcatgtattattttggcccattttgggcctaaaaaagaaaactatgccttaaaaatcagaaccttttctccccactatgcttatgtggccatctacagcacttagaataaaaacagatgttaaaatattcagtgaaagttttattggaaaaaggaattgagatatataattgagatttggtgaaattgaaggagaaaatttaagtgagtctttaaaatatattctgaatgaaaactgtattgaggattcatttttgttccttttttttctttttctcttttctcctttttcttctttttaatagtctagttttagtcagtcagtgaggaagaattgggccatgctaacgttatcacaagagaacaatggcagaaatggtattagttatataatatttaaggacaaactatatgttttgctgttttaacgtagtgactcactgaactaaatacataattgaccaacattaagtgtatttccaatacagaagggttgaaaatattacattataaactcttttgaaaaatgtatctaaaattttttaagttctgttttgattccactttttggttgagtttttatgtttttgttttcaggtagattaataaatctggcagctgatttctgcaagattcttgtgttttgaatttctcattgaattggctactcaaacatagaaatcatttgttaatgatgtaatgtcttctctcagcttttatcttcactgctgtttgctgtctcttgatgatgacatgttaatacccaatagattaattgcaacaaacacttatactcaaataactaagtaaaaataatttttcttgttatgtccatgaaaagtgcttcagaataaaaatccacaagactgac

SEQ ID NO: 6843 - DNA, 4181 bp, Homo sapiens
  source 1..4181: mol_type = unassigned DNA
gactctgcttctagaagcccagtcttcaaaatgagcttacctttcagtgatttggataaggcatagttttgtttttaagacccctttttctgattaaagtgcccaacatgagtggaagaggagatggagggcagcagcagctgctgcactcaaagtttttggctgggtttgtctgccacattgaaaagaatgaaagtcagcgtgggagaaattgtaacgagaaaccaacaaatgtcaggaaaagaaaattcattaacagagatctggctcatgattcagaagaactctttcaagatctaagtcaattacaggaaacatggcttgcagaagctcaggtacctgacaatgatgagcagtttgtaccagactatcaggctgaaagtttggcttttcatggcctgccactgaaaatcaagaaagaaccccacagtccatgttcagaaatcagctctgcctgcagtcaagaacagccctttaaattcagctatggagaaaagtgcctgtacaatgtcagtgcctatgatcagaagccacaagtgggaatgaggccctccaacccccccacaccatccagcacgccagtgtccccactgcatcatgcatctccaaactcaactcatacaccgaaacctgaccgggccttcccagctcacctccctccatcgcagtccataccagatagcagctaccccatggaccacagatttcgccgccagctttctgaaccctgtaactcctttcctcctttgccgacgatgccaagggaaggacgtcctatgtaccaacgccagatgtctgagccaaacatccccttcccaccacaaggctttaagcaggagtaccacgacccagtgtatgaacacaacaccatggttggcagtgcggccagccaaagctttccccctcctctgatgattaaacaggaacccagagattttgcatatgactcagaagtgcctagctgccactccatttatatgaggcaagaaggcttcctggctcatcccagcagaacagaaggctgtatgtttgaaaagggccccaggcagttttatgatgacacctgtgttgtcccagaaaaattcgatggagacatcaaacaagagccaggaatgtatcgggaaggacccacataccaacggcgaggatcacttcagctctggcagtttttggtagctcttctggatgacccttcaaattctcattttattgcctggactggtcgaggcatggaatttaaactgattgagcctgaagaggtggcccgacgttggggcattcagaaaaacaggccagctatgaactatgataaacttagccgttcactccgctattactatgagaaaggaattatgcaaaaggtggctggagagagatatgtctacaagtttgtgtgtgatccagaagcccttttctccatggcctttccagataatcagcgtccactgctgaagacagacatggaacgtcacatcaacgaggaggacacagtgcctctttctcactttgatgagagcatggcctacatgccggaagggggctgctgcaacccccacccctacaacgaaggctacgtgtattaacacaagtgacagtcaagcagggcgtttttgcgcttttccttttttctgcaagatacagagaattgctgaatctttgttttatttctgttgtttgtattttatttttaaataataatacacaaaaaggggcttttcctgttgcattattctatggtctgccatggactgtgcactttatttgagggtgggtgggagtaatctaaacatttattctgtgtaacaggaagctaatgggtgaatgggcagagggatttggggattactttttacttaggcttgggatggggtcctacaagttttgagtatgatgaaactatatcatgtctgtttgatttcataacaacataagataatgtttattttatcggggtatctatggtacagttaatttcacgttgtgtaaatatccacttggagactatttgccttgggcattttcccctgtcatttatgagtctctgcaggtgtacaaaaaaaccccaatctactgtaaatggcagtttaattgttagaaatgactgtttttgcaccacttgtaaaaaggtatttagcgattgcatttgctgtttgttgttttattttgctttatatatgacttgcagaggataaccataaaatgggtaattctctctgaagttgaataatcaccatgactgtaaatgaggggcacaattttggactctggcgccaaactgagtcataggccagtagcattacgtgtatctggtgccaccttgctgtttagatacaaatcataccgtcttttaaatattttgaagcccatttcagttaaataatgacatgtcatggtcctttggaatcttcatttaaatgttaaatctggaatcaaaatgaagcaaaaaatatctgtctccttttcactttcttcagtacataaatacattatttaatcaataagaattaactgtactaaatcatgtattatgctgttctagttacagcaaacactctttaagaaaaatatccaatacactaaataggtactatagtaatttttagacatggtacccattgatatgcatttaaaccttttactgctgtgttatgttgataacatatataaatattagataatgctaatgcttctgctgctgtcttttctgtaatattctctttcatgctgaatttactatgaccatttataagcagtgcagttaactacagatagcatttcaggacaaaatagatgactcaaaccatttattgcttaaaaaatagcttacgccatgctatgctataagcagcttttatgcacattgacaaatgaagagtaagcttcagcttgctaaaggaaactgtggaaccttttgtaacttttggtgatatggaaaattatttacaaaccgtcaaagaatatgaggaagttgctgtatgacatagtgctggcactgatattatccatcatctctttttggacacttctgtaaatgtgattggattgtttgaaagaagatttaaagtttcaaagttttttgttctgtttttgctttgcatttggagaaaatattgaaagcagggtatgttgtttcattcaccttgaaaaaaccatgagtaaatggggatatagaatctctgaatagctcgctaaaagattcaagcaagggacatgaattttgttccatctatcaataatatccagaagaacaacttttttaaagagtctatagcaaaaagcaaaaaaaaaaaaaaattctaaacacaaagtcaaaataaacctattgtaaaagcatttcgtgatgagcatgaaaaagattgtttaaagatgatccccccagctacccattttccaaaactacacagatcacagctcatttctctaagtggagcagttatcaagaaacccaaacaccaaaattgctactcttcacatttaatcctacaaaaagtactccaatttcaaaatatgtatgtaacctgcgatttcaatgattgttgttcatatacatcatgtattattttggcccattttgggcctaaaaaagaaaactatgccttaaaaatcagaaccttttctccccactatgcttatgtggccatctacagcacttagaataaaaacagatgttaaaatattcagtgaaagttttattggaaaaaggaattgagatatataattgagatttggtgaaattgaaggagaaaatttaagtgagtctttaaaatatattctgaatgaaaactgtattgaggattcatttttgttccttttttttctttttctcttttctcctttttcttctttttaatagtctagttttagtcagtcagtgaggaagaattgggccatgctaacgttatcacaagagaacaatggcagaaatggtattagttatataatatttaaggacaaactatatgttttgctgttttaacgtagtgactcactgaactaaatacataattgaccaacattaagtgtatttccaatacagaagggttgaaaatattacattataaactcttttgaaaaatgtatctaaaattttttaagttctgttttgattccactttttggttgagtttttatgtttttgttttcaggtagattaataaatctggcagctgatttctgcaaga

SEQ ID NO: 6844 - DNA, 3363 bp, Homo sapiens
  source 1..3363: mol_type = unassigned DNA
gtcatgcatacattagagcctctgatgagtttgtctttggggactctggggctgtactacccagtgtcatcacaaattaccaggagaaattgcttccagctcacaatcacatctgcttttggcaagaactaatgcaccaagacttcaagttctaagcctctgttcagattttaattgcaattgatcaggtttatattattgtacctccagagacctcctagagccagaacccggctggcttgctgtttcctttagagcagcgcatatcattatttggtgttctggtggaggacttttctgatggcagaaattagtttctctgggttcatcaggacgggatgcttcaagatttaagtgcaagtgtcttctttccaccttgttcacaacacagaacgttagctcaggtacctgacaatgatgagcagtttgtaccagactatcaggctgaaagtttggcttttcatggcctgccactgaaaatcaagaaagaaccccacagtccatgttcagaaatcagctctgcctgcagtcaagaacagccctttaaattcagctatggagaaaagtgcctgtacaatgtcagtgcctatgatcagaagccacaagtgggaatgaggccctccaacccccccacaccatccagcacgccagtgtccccactgcatcatgcatctccaaactcaactcatacaccgaaacctgaccgggccttcccagctcacctccctccatcgcagtccataccagatagcagctaccccatggaccacagatttcgccgccagctttctgaaccctgtaactcctttcctcctttgccgacgatgccaagggaaggacgtcctatgtaccaacgccagatgtctgagccaaacatccccttcccaccacaaggctttaagcaggagtaccacgacccagtgtatgaacacaacaccatggttggcagtgcggccagccaaagctttccccctcctctgatgattaaacaggaacccagagattttgcatatgactcagaagtgcctagctgccactccatttatatgaggcaagaaggcttcctggctcatcccagcagaacagaaggctgtatgtttgaaaagggccccaggcagttttatgatgacacctgtgttgtcccagaaaaattcgatggagacatcaaacaagagccaggaatgtatcgggaaggacccacataccaacggcgaggatcacttcagctctggcagtttttggtagctcttctggatgacccttcaaattctcattttattgcctggactggtcgaggcatggaatttaaactgattgagcctgaagaggtggcccgacgttggggcattcagaaaaacaggccagctatgaactatgataaacttagccgttcactccgctattactatgagaaaggaattatgcaaaaggtggctggagagagatatgtctacaagtttgtgtgtgatccagaagcccttttctccatggcctttccagataatcagcgtccactgctgaagacagacatggaacgtcacatcaacgaggaggacacagtgcctctttctcactttgatgagagcatggcctacatgccggaagggggctgctgcaacccccacccctacaacgaaggctacgtgtattaacacaagtgacagtcaagcagggcgtttttgcgcttttccttttttctgcaagatacagagaattgctgaatctttgttttatttctgttgtttgtattttatttttaaataataatacacaaaaaggggcttttcctgttgcattattctatggtctgccatggactgtgcactttatttgagggtgggtgggagtaatctaaacatttattctgtgtaacaggaagctaatgggtgaatgggcagagggatttggggattactttttacttaggcttgggatggggtcctacaagttttgagtatgatgaaactatatcatgtctgtttgatttcataacaacataagataatgtttattttatcggggtatctatggtacagttaatttcacgttgtgtaaatatccacttggagactatttgccttgggcattttcccctgtcatttatgagtctctgcaggtgtacaaaaaaaccccaatctactgtaaatggcagtttaattgttagaaatgactgtttttgcaccacttgtaaaaaggtatttagcgattgcatttgctgtttgttgttttattttgctttatatatgacttgcagaggataaccataaaatgggtaattctctctgaagttgaataatcaccatgactgtaaatgaggggcacaattttggactctggcgccaaactgagtcataggccagtagcattacgtgtatctggtgccaccttgctgtttagatacaaatcataccgtcttttaaatattttgaagcccatttcagttaaataatgacatgtcatggtcctttggaatcttcatttaaatgttaaatctggaatcaaaatgaagcaaaaaatatctgtctccttttcactttcttcagtacataaatacattatttaatcaataagaattaactgtactaaatcatgtattatgctgttctagttacagcaaacactctttaagaaaaatatccaatacactaaataggtactatagtaatttttagacatggtacccattgatatgcatttaaaccttttactgctgtgttatgttgataacatatataaatattagataatgctaatgcttctgctgctgtcttttctgtaatattctctttcatgctgaatttactatgaccatttataagcagtgcagttaactacagatagcatttcaggacaaaatagatgactcaaaccatttattgcttaaaaaatagcttacgccatgctatgctataagcagcttttatgcacattgacaaatgaagagtaagcttcagcttgctaaaggaaactgtggaaccttttgtaacttttggtgatatggaaaattatttacaaaccgtcaaagaatatgaggaagttgctgtatgacatagtgctggcactgatattatccatcatctctttttggacacttctgtaaatgtgattggattgtttgaaagaagatttaaagtttcaaagttttttgttctgtttttgctttgcatttggagaaaatattgaaagcagggtatgttgtttcattcaccttgaaaaaaccatgagtaaatggggatatagaatctctgaatagctcgctaaaagattcaagcaagggacatgaattttgttccatctatcaataatatccagaagaacaacttttttaaagagtctatagcaaaaagcaaaaaaaaaaaaaaa

SEQ ID NO: 6845 - DNA, 3391 bp, Homo sapiens
  source 1..3391: mol_type = unassigned DNA
agtatccccaggcgccttaacaataagcagcgggttacagaggaaatcgagtctctccgtggcgcttccaggctgaggacccagcgcctaccggccgagcaccccctagggcagaggggcgagggagacccgcgggaaggggcagcaagccgcctgattgacagcccgaaatctgatcttgtgaaagagacgcggagccaatgggaggcagcgatccatcagtttggattggaggcccctggaggagaagtagaggaaaaaccaccgaattgagctctgtcagaggcgctttcggcttccaagggggaagtgctgggctataattaatgtttttattaaatttggagggaagtttttgcagcctttcgcctagcgtggccttcaggttgatagaagtccagatcctgaggaaatctccagctaaatgctcaaaatataaaatactgagctgagatttgcgaagagcagcagcatggatggattttatgaccagcaagtgccttacatggtcaccaatagtcagcgtgggagaaattgtaacgagaaaccaacaaatgtcaggaaaagaaaattcattaacagagatctggctcatgattcagaagaactctttcaagatctaagtcaattacaggaaacatggcttgcagaagctcaggtacctgacaatgatgagcagtttgtaccagactatcaggctgaaagtttggcttttcatggcctgccactgaaaatcaagaaagaaccccacagtccatgttcagaaatcagctctgcctgcagtcaagaacagccctttaaattcagctatggagaaaagtgcctgtacaatgtcagtgcctatgatcagaagccacaagtgggaatgaggccctccaacccccccacaccatccagcacgccagtgtccccactgcatcatgcatctccaaactcaactcatacaccgaaacctgaccgggccttcccagctcacctccctccatcgcagtccataccagatagcagctaccccatggaccacagatttcgccgccagctttctgaaccctgtaactcctttcctcctttgccgacgatgccaagggaaggacgtcctatgtaccaacgccagatgtctgagccaaacatccccttcccaccacaaggctttaagcaggagtaccacgacccagtgtatgaacacaacaccatggttggcagtgcggccagccaaagctttccccctcctctgatgattaaacaggaacccagagattttgcatatgactcagaagtgcctagctgccactccatttatatgaggcaagaaggcttcctggctcatcccagcagaacagaaggctgtatgtttgaaaagggccccaggcagttttatgatgacacctgtgttgtcccagaaaaattcgatggagacatcaaacaagagccaggaatgtatcgggaaggacccacataccaacggcgaggatcacttcagctctggcagtttttggtagctcttctggatgacccttcaaattctcattttattgcctggactggtcgaggcatggaatttaaactgattgagcctgaagaggtggcccgacgttggggcattcagaaaaacaggccagctatgaactatgataaacttagccgttcactccgctattactatgagaaaggaattatgcaaaaggtggctggagagagatatgtctacaagtttgtgtgtgatccagaagcccttttctccatggcctttccagataatcagcgtccactgctgaagacagacatggaacgtcacatcaacgaggaggacacagtgcctctttctcactttgatgagagcatggcctacatgccggaagggggctgctgcaacccccacccctacaacgaaggctacgtgtattaacacaagtgacagtcaagcagggcgtttttgcgcttttccttttttctgcaagatacagagaattgctgaatctttgttttatttctgttgtttgtattttatttttaaataataatacacaaaaaggggcttttcctgttgcattattctatggtctgccatggactgtgcactttatttgagggtgggtgggagtaatctaaacatttattctgtgtaacaggaagctaatgggtgaatgggcagagggatttggggattactttttacttaggcttgggatggggtcctacaagttttgagtatgatgaaactatatcatgtctgtttgatttcataacaacataagataatgtttattttatcggggtatctatggtacagttaatttcacgttgtgtaaatatccacttggagactatttgccttgggcattttcccctgtcatttatgagtctctgcaggtgtacaaaaaaaccccaatctactgtaaatggcagtttaattgttagaaatgactgtttttgcaccacttgtaaaaaggtatttagcgattgcatttgctgtttgttgttttattttgctttatatatgacttgcagaggataaccataaaatgggtaattctctctgaagttgaataatcaccatgactgtaaatgaggggcacaattttggactctggcgccaaactgagtcataggccagtagcattacgtgtatctggtgccaccttgctgtttagatacaaatcataccgtcttttaaatattttgaagcccatttcagttaaataatgacatgtcatggtcctttggaatcttcatttaaatgttaaatctggaatcaaaatgaagcaaaaaatatctgtctccttttcactttcttcagtacataaatacattatttaatcaataagaattaactgtactaaatcatgtattatgctgttctagttacagcaaacactctttaagaaaaatatccaatacactaaataggtactatagtaatttttagacatggtacccattgatatgcatttaaaccttttactgctgtgttatgttgataacatatataaatattagataatgctaatgcttctgctgctgtcttttctgtaatattctctttcatgctgaatttactatgaccatttataagcagtgcagttaactacagatagcatttcaggacaaaatagatgactcaaaccatttattgcttaaaaaatagcttacgccatgctatgctataagcagcttttatgcacattgacaaatgaagagtaagcttcagcttgctaaaggaaactgtggaaccttttgtaacttttggtgatatggaaaattatttacaaaccgtcaaagaatatgaggaagttgctgtatgacatagtgctggcactgatattatccatcatctctttttggacacttctgtaaatgtgattggattgtttgaaagaagatttaaagtttc

SEQ ID NO: 6846 - DNA, 2050 bp, Homo sapiens
  source 1..2050: mol_type = unassigned DNA
aagtggcttcagagatgcagccctcactgcttaacgtcctagttattgtccttgaaacccgagccatctcaccgctcgcccccaaccctgggctctggctgtttaaaagctggagaggaagtgaaagcgtcaagtacatcccgttaggtgcaaagcaagtctcgttgatcgccattgctagttttgcacacgtttgcgaatcagagctgcccggggtacaccgaccgcgcagggaaacatcgagagtgtaaataaatacatcgcctcttgttcggatttttgctactaccgaaaatatgtaaattgtgaactctgttggctctctttggatccaggttgatagaagtccagatcctgaggaaatctccagctaaatgctcaaaatataaaatactgagctgagatttgcgaagagcagcagcatggatggattttatgaccagcaagtgccttacatggtcaccaatagtcagcgtgggagaaattgtaacgagaaaccaacaaatgtcaggaaaagaaaattcattaacagagatctggctcatgattcagaagaactctttcaagatctaagtcaattacaggaaacatggcttgcagaagctcaggtacctgacaatgatgagcagtttgtaccagactatcaggctgaaagtttggcttttcatggcctgccactgaaaatcaagaaagaaccccacagtccatgttcagaaatcagctctgcctgcagtcaagaacagccctttaaattcagctatggagaaaagtgcctgtacaatgtcagtgcctatgatcagaagccacaagtgggaatgaggccctccaacccccccacaccatccagcacgccagtgtccccactgcatcatgcatctccaaactcaactcatacaccgaaacctgaccgggccttcccagctcacctccctccatcgcagtccataccagatagcagctaccccatggaccacagatttcgccgccagctttctgaaccctgtaactcctttcctcctttgccgacgatgccaagggaaggacgtcctatgtaccaacgccagatgtctgagccaaacatccccttcccaccacaaggctttaagcaggagtaccacgacccagtgtatgaacacaacaccatggttggcagtgcggccagccaaagctttccccctcctctgatgattaaacaggaacccagagattttgcatatgactcagaagtgcctagctgccactccatttatatgaggcaagaaggcttcctggctcatcccagcagaacagaaggctgtatgtttgaaaagggccccaggcagttttatgatgacacctgtgttgtcccagaaaaattcgatggtttttcaaatgttgccctttctgtaattattttaagaggtatatgtctctctactgaccataggagacatcaaacaagagccaggaatgtatcgggaaggacccacataccaacggcgaggatcacttcagctctggcagtttttggtagctcttctggatgacccttcaaattctcattttattgcctggactggtcgaggcatggaatttaaactgattgagcctgaagaggtggcccgacgttggggcattcagaaaaacaggccagctatgaactatgataaacttagccgttcactccgctattactatgagaaaggaattatgcaaaaggtggctggagagagatatgtctacaagtttgtgtgtgatccagaagcccttttctccatggcctttccagataatcagcgtccactgctgaagacagacatggaacgtcacatcaacgaggaggacacagtgcctctttctcactttgatgagagcatggcctacatgccggaagggggctgctgcaacccccacccctacaacgaaggctacgtgtattaacacaagtgacagtcaagcagggcgtttttgcgcttttccttttttctgcaagatacagagaattgctgaatctttgttttatttctgttgtttgtattttatttttaaataataatacacaaaaaggggc

SEQ ID NO: 6847 - DNA, 1603 bp, Homo sapiens
  source 1..1603: mol_type = unassigned DNA
accccctgcttggttgcaccctcagatagtacccatgagcttcactgttcagcctcggggcccaggcgcttcctggaatctctccttggccggggttaaaatgcagttcccgctcaaaatgcttataggttgatagaagtccagatcctgaggaaatctccagctaaatgctcaaaatataaaatactgagctgagatttgcgaagagcagcagcatggatggattttatgaccagcaagtgccttacatggtcaccaatagtcagcgtgggagaaattgtaacgagaaaccaacaaatgtcaggaaaagaaaattcattaacagagatctggctcatgattcagaagaactctttcaagatctaagtcaattacaggaaacatggcttgcagaagtggcttttcatggcctgccactgaaaatcaagaaagaaccccacagtccatgttcagaaatcagctctgcctgcagtcaagaacagccctttaaattcagctatggagaaaagtgcctgtacaatgtcagtgcctatgatcagaagccacaagtgggaatgaggccctccaacccccccacaccatccagcacgccagtgtccccactgcatcatgcatctccaaactcaactcatacaccgaaacctgaccgggccttcccagctcacctccctccatcgcagtccataccagatagcagctaccccatggaccacagatttcgccgccagctttctgaaccctgtaactcctttcctcctttgccgacgatgccaagggaaggacgtcctatgtaccaacgccagatgtctgagccaaacatccccttcccaccacaaggctttaagcaggagtaccacgacccagtgtatgaacacaacaccatggttggcagtgcggccagccaaagctttccccctcctctgatgattaaacaggaacccagagattttgcatatgactcagaagtgcctagctgccactccatttatatgaggcaagaaggcttcctggctcatcccagcagaacagaaggctgtatgtttgaaaagggccccaggcagttttatgatgacacctgtgttgtcccagaaaaattcgatggagacatcaaacaagagccaggaatgtatcgggaaggacccacataccaacggcgaggatcacttcagctctggcagtttttggtagctcttctggatgacccttcaaattctcattttattgcctggactggtcgaggcatggaatttaaactgattgagcctgaagaggtggcccgacgttggggcattcagaaaaacaggccagctatgaactatgataaacttagccgttcactccgctattactatgagaaaggaattatgcaaaaggtggctggagagagatatgtctacaagtttgtgtgtgatccagaagcccttttctccatggcctttccagataatcagcgtccactgctgaagacagacatggaacgtcacatcaacgaggaggacacagtgcctctttctcactttgatgagagcatggcctacatgccggaagggggctgctgcaacccccacccctacaacgaaggctacgtgtattaacacaagtg

SEQ ID NO: 6848 - DNA, 536 bp, Homo sapiens
  source 1..536: mol_type = unassigned DNA
ccttcaaattctcattttattgcctggactggtcgaggcatggaatttaaactgattgagcctgaagaggtggcccgacgttggggcattcagaaaaacaggccagctatgaactatgataaacttagccgttcactccgctattactatgagaaaggaattatgcaaaaggtgagcagctaatacagcattaaaattcattgaaatgttgcacattaatctgaacatcatactttaaacgccacatatcattgcattgctgaagcgagtttttcactcattttaacaaatgcttagctcttggttttggtattacaagcctttctatgtataaatgcctagacattgtagacaaatgtgtagtgatattgtatacagaataataggctttctggaaggtcctactttgctgcacatggttaaaaaagattgttttagtattaatagcacatctgtcttcagaagtttttattgcacattgtctacaattatataattttggaatgcttttgtttatagcaataaagaatctttag

SEQ ID NO: 6849 - DNA, 1296 bp, Homo sapiens
  source 1..1296: mol_type = unassigned DNA
atgtaaaataagtttctttgttttgctgatagtctagttctccaaagagctttttcaatctttatcaatctttaaagttaaatagctttcctaatagtcctttgaaaggatgattgtatttatatgttaatgaagctcaggtacctgacaatgatgagcagtttgtaccagactatcaggctgaaagtttggcttttcatggcctgccactgaaaatcaagaaagaaccccacagtccatgttcagaaatcagctctgcctgcagtcaagaacagccctttaaattcagctatggagaaaagtgcctgtacaatgtcagtgcctatgatcagaagccacaagtgggaatgaggccctccaacccccccacaccatccagcacgccagtgtccccactgcatcatgcatctccaaactcaactcatacaccgaaacctgaccgggccttcccagctcacctccctccatcgcagtccataccagatagcagctaccccatggaccacagatttcgccgccagctttctgaaccctgtaactcctttcctcctttgccgacgatgccaagggaaggacgtcctatgtaccaacgccagatgtctgagccaaacatccccttcccaccacaaggctttaagcaggagtaccacgacccagtgtatgaacacaacaccatggttggcagtgcggccagccaaagctttccccctcctctgatgattaaacaggaacccagagattttgcatatgactcagaagtgcctagctgccactccatttatatgaggcaagaaggcttcctggctcatcccagcagaacagaaggctgtatgtttgaaaagggccccaggcagttttatgatgacacctgtgttgtcccagaaaaattcgatggagacatcaaacaagagccaggaatgtatcgggaaggacccacataccaacggcgaggatcacttcagctctggcagtttttggtagctcttctggatgacccttcaaattctcattttattgcctggactggtcgaggcatggaatttaaactgattgagcctgaagaggttagtttaatagattttaattaggacactcagacatgttataacataaagaaactgacacatttgattaatataccaaaaatgtattcttaatcatttcaagactttagggaaactttctgaattaaaaagcatgcaaagataaaacatgtctacctttaaaatcaccaatgtattgcgtgttccttccggttgtatacaatcctacaaaattgatgttggagaaaattaa

SEQ ID NO: 6850 - DNA, 1141 bp, Homo sapiens
  source 1..1141: mol_type = unassigned DNA
agtgtcatcacaaattaccaggagaaattgcttccagctcacaatcacatctgcttttggcaagaactaatgcaccaagacttcaagttctaagcctctgttcagattttaattgcaattgatcaggtttatattattgtacctccagagacctcctagagccagaacccggctggcttgctgtttcctttagagcagcgcatatcattatttggtgttctggtggaggacttttctgatggcagaaattagtttctctgggttcatcaggacgggatgcttcaagatttaagtgcaagtgtcttctttccaccttgttcacaacacagaacgttagtggcttttcatggcctgccactgaaaatcaagaaagaaccccacagtccatgttcagaaatcagctctgcctgcagtcaagaacagccctttaaattcagctatggagaaaagtgcctgtacaatgtcagtgcctatgatcagaagccacaagtgggaatgaggccctccaacccccccacaccatccagcacgccagtgtccccactgcatcatgcatctccaaactcaactcatacaccgaaacctgaccgggccttcccagctcacctccctccatcgcagtccataccagatagcagctaccccatggaccacagatttcgccgccagctttctgaaccctgtaactcctttcctcctttgccgacgatgccaagggaaggacgtcctatgtaccaacgccagatgtctgagccaaacatccccttcccaccacaaggctttaagcaggagtaccacgacccagtgtatgaacacaacaccatggttggcagtgcggccagccaaagctttccccctcctctgatgattaaacaggaacccagagattttgcatatgactcagaagtgcctagctgccactccatttatatgaggcaagaaggcttcctggctcatcccagcagaacagaaggctgtatgtttgaaaagggccccaggcagttttatgatgacacctgtgttgtcccagaaaaattcgatggagacatcaaacaagagccaggaatgtatcgggaaggacccacataccaacggcgaggatcacttcagctctggcagtttttggtagctcttctggatg

SEQ ID NO: 6851 - DNA, 848 bp, Homo sapiens
  source 1..848: mol_type = unassigned DNA
cttgaatgcagttgatcaagttgctgttagcatgtaaaataagtttctttgttttgctgatagtctagttctccaaagagctttttcaatctttatcaatctttaaagttaaatagctttcctaatagtcctttgaaaggatgattgtatttatatgttaatgaagctcaggtacctgacaatgatgagcagtttgtaccagactatcaggctgaaagtttggcttttcatggcctgccactgaaaatcaagaaagaaccccacagtccatgttcagaaatcagctctgcctgcagtcaagaacagccctttaaattcagctatggagaaaagtgcctgtacaatgtcagtgcctatgatcagaagccacaagtgggaatgaggccctccaacccccccacaccatccagcacgccagtgtccccactgcatcatgcatctccaaactcaactcatacaccgaaacctgaccgggccttcccagctcacctccctccatcgcagtccataccagatagcagctaccccatggaccacagatttcgccgccagctttctgaaccctgtaactcctttcctcctttgccgacgatgccaagggaaggacgtcctatgtaccaacgccagatgtctgagccaaacatccccttcccaccacaaggctttaagcaggagtaccacgacccagtgtatgaacacaacaccatggttggcagtgcggccagccaaagctttccccctcctctgatgattaaacaggaacccagagattttgcatatgactcagaagtgcctagctgccactccatttatatgaggcaagaaggcttcctggctcatcccagcag

SEQ ID NO: 6852 - DNA, 784 bp, Homo sapiens
  source 1..784: mol_type = unassigned DNA
aaattaccaggagaaattgcttccagctcacaatcacatctgcttttggcaagaactaatgcaccaagacttcaagttctaagcctctgttcagattttaattgcaattgatcaggtttatattattgtacctccagagacctcctagagccagaacccggctggcttgctgtttcctttagagcagcgcatatcattatttggtgttctggtggaggacttttctgatggcagaaattagtttctctgggttcatcaggacgggatgcttcaagatttaagtgcaagtgtcttctttccaccttgttcacaacacagaacgttagctcaggtacctgacaatgatgagcagtttgtaccagactatcaggctgaaagtttggcttttcatggcctgccactgaaaatcaagaaagaaccccacagtccatgttcagaaatcagctctgcctgcagtcaagaacagccctttaaattcagctatggagaaaagtgcctgtacaatgtcagatttcgccgccagctttctgaaccctgtaactcctttcctcctttgccgacgatgccaagggaaggacgtcctatgtaccaacgccagatgtctgagccaaacatccccttcccaccacaaggctttaagcaggagtaccacgacccagtgtatgaacacaacaccatggttggcagtgcggccagccaaagctttccccctcctctgatgattaaacaggaacccagagattttgcatatgactcagaagtgcctagctgccactccatttat

SEQ ID NO: 6853 - DNA, 584 bp, Homo sapiens
  source 1..584: mol_type = unassigned DNA
aaggaagatttcagtgaacagacacatattcacctcagcctttttgtgaattctgaactctttcaagatctaagtcaattacaggaaacatggcttgcagaagctcaggtacctgacaatgatgagcagtttgtaccagactatcaggctgaaagtttggcttttcatggcctgccactgaaaatcaagaaagaaccccacagtccatgttcagaaatcagctctgcctgcagtcaagaacagccctttaaattcagctatggagaaaagtgcctgtacaatgtcagtgcctatgatcagaagccacaagtgggaatgaggccctccaacccccccacaccatccagcacgccagtgtccccactgcatcatgcatctccaaactcaactcatacaccgaaacctgaccgggccttcccagctcacctccctccatcgcagtccataccagatagcagctaccccatggaccacagatttcgccgccagctttctgaaccctgtaactcctttcctcctttgccgacgatgccaagggaaggacgtcctatgtaccaacgccagatgtctgagccaaacatccc

SEQ ID NO: 6854 - DNA, 846 bp, Homo sapiens
  source 1..846: mol_type = unassigned DNA
gttttaatctagcattgaaccagcctaaaaacaactttaagtgtaaatgcttcaggttgttttgatgctgagataccatgaatatatgattgataaatagtaatgtgctaagatcggcactgggaagcaactctccctgcctgcttaacataagctttcactgtcaaataagtgagaaaatgaatattagagttgatactatggacttctatttttctattcagagaagatccattagacttatgtatgcatgtctgtgtgtgtgtgtgtgcgcgcgcgtgtgcgtgtgtgtgatctgaggtttacattcttttaaaggattttatctttccctttgtagagtcagcgtgggagaaattgtaacgagaaaccaacaaatgtcaggaaaagaaaattcattaacagagatctggctcatgattcagaagaactctttcaagatctaagtcaattacaggaaacatggcttgcagaagctcaggtacctgacaatgatgagcagtttgtaccagactatcaggctgaaagtttggcttttcatggcctgccactgaaaatcaagaaagaaccccacagtccatgttcagaaatcagctctgcctgcagtcaagaacagccctttaaattcagctatggagaaaagtgcctgtacaatgtcagtgcctatgatcagaagccacaagtgggaatgaggccctccaacccccccacaccatccagcacgccagtgtccccactgcatcatgcatctccaaactcaactcatacaccgaaacctgaccgggccttcccagctcacctccctccatcgcagtccataccagatagcagctaccccatggacca

SEQ ID NO: 6855 - DNA, 554 bp, Homo sapiens
  source 1..554: mol_type = unassigned DNA
cgttattggctgcgggaagaacctcgccgggacctaacccgaagctccgccccctcgcggttaccctggatacccgtcaggctcgggctgcagagaaggttgatagaagtccagatcctgaggaaatctccagctaaatgctcaaaatataaaatactgagctgagatttgcgaagagcagcagcatggatggattttatgaccagcaagtgccttacatggtcaccaatagtcagcgtgggagaaattgtaacgagaaaccaacaaatgtcaggaaaagaaaattcattaacagagatctggctcatgattcagaagaactctttcaagatctaagtcaattacaggaaacatggcttgcagaagctcaggtacctgacaatgatgagcagtttgtaccagactatcaggctgaaagtttggcttttcatggcctgccactgaaaatcaagaaagaaccccacagtccatgttcagaaatcagctctgcctgcagtcaagaacagccctttaaattcagctatggagaaaagtgcctgtacaatgtcagtgcc

SEQ ID NO: 6856 - DNA, 580 bp, Homo sapiens
  source 1..580: mol_type = unassigned DNA
aagctccgccccctcgcggttaccctggatacccgtcaggctcgggctgcagagaaggaggatcagggcaagtggcttcagagatgcagccctcactgcttaacgtcctagttattgtccttgaaacccgagccatctcaccgctcgcccccaaccctgggctctggctgtttaaaagctggagaggaagtgaaagcgtcaagtacagttgatagaagtccagatcctgaggaaatctccagctaaatgctcaaaatataaaatactgagctgagatttgcgaagagcagcagcatggatggattttatgaccagcaagtgccttacatggtcaccaatagtcagcgtgggagaaattgtaacgagaaaccaacaaatgtcaggaaaagaaaattcattaacagagatctggctcatgattcagaagaactctttcaagatctaagtcaattacaggaaacatggcttgcagaagctcaggtacctgacaatgatgagcagtttgtaccagactatcaggctgaaagtttggcttttcatggcctgccactgaaaatcaagaaagaaccccacagtccat

SEQ ID NO: 6857 - DNA, 570 bp, Homo sapiens
  source 1..570: mol_type = unassigned DNA
taaatgctcaaaatataaaatactgagctgagatttgcgaagagcagcagcatggatggattttatgaccagcaagtgccttacatggtcaccaatagtcagcgtgggagaaattgtaacgagaaaccaacaaatgtcaggaaaagaaaattcattaacagagatctggctcatgattcagaagaactctttcaagatctaagtcaattacaggaaacatggcttgcagaagctcaggtacctgacaatgatgagcagtttgtaccagactatcaggctgaaagttcaagatcaacacagattggagtacttgagaaagacttcatgaagaaaatgaagcctgacttacaacagaatgagaaatctactcaatgaaatattagaaatgacaggaacctggagataattcacccaatatctctgtgtttgttggataataatagctaatacttgtgtaatgctcacgatgtgctagttcctcttctaaacactttataaatatcttaatgcagccaatcttcataacatccttatttagtagaaactattatctctttcttttggtgagaa

SEQ ID NO: 6858 - DNA, 622 bp, Homo sapiens
  source 1..622: mol_type = unassigned DNA
agtgctgggctataattaatgtttttattaaatttggagggaagtttttgcagcctttcgcctagcgtggccttcaggttgatagaagtccagatcctgaggaaatctccagctaaatgctcaaaatataaaatactgagctgagatttgcgaagagcagcagcatggatggattttatgaccagcaagtgccttacatggtcaccaatagtcagcgtgggagaaattgtaacgagaaaccaacaaatgtcaggaaaagaaaattcattaacagagatctggctcatgattcagaagaactctttcaagatctaagtcaattacaggaaacatggcttgcagaagctcaggtacctgacaatgatgagcagtttgtaccagactatcaggctgaaagttacatgtctggatactggctactggctactgtattggtcagcacagctttgaacagcgatgtcttccacattgttgtctccagcctggttcttccctccgaagctgtccattggacatcctcacctgatccctgctagtgtccctgtgcagattagaaaaaggcaacacctctggacttgctcccttagcccttggctgtgcattgcacaaaacaccatctaca

SEQ ID NO: 6859 - DNA, 546 bp, Homo sapiens
  source 1..546: mol_type = unassigned DNA
agaggcgctttcggcttccaagggggaagtgctgggctataattaatgtttttattaaatttggagggaagtttttgcagcctttcgcctagcgtggccttcaggtgggtctttccaacaactttttatgtctctccagataattgcatggttgtgggtcgcaaaaactatcctgatgaaagaggtgtctccgtctctttagtcccgttaggtgcaaagcaagtctcgttgatcgccattgctagttttgcacacgtttgcgaatcagagctgcccggggtacaccgaccgcgcagggaaacatcgagagtgtaaataaatacatcgcctcttgttcggatttttgctactaccgaaaatatgtaaattgtgaactctgttggctctctttggatccaggttgatagaagtccagatcctgaggaaatctccagctaaatgctcaaaatataaaatactgagctgagatttgcgaagagcagcagcatggatggattttatgaccagcaagtgccttacatggtcaccaatagtcagcgtgggaga

SEQ ID NO: 6860 - DNA, 550 bp, Homo sapiens
  source 1..550: mol_type = unassigned DNA
gatatacgagcaaccccaagcactccctcctcctccccacagccacagtggactggaagtaccttttcccagtgcacacgctgaggacccagcgcctaccggccgagcaccccctagggcagaggggcgagggagacccgcgggaaggggcagcaagccgcctgattgacagcccgaaatctgatcttgtgaaagagacgcggagccaatgggaggcagcgatccatcagtttggattggaggcccctggaggagaagtagaggaaaaaccaccgaattgagctctgtcagaggcgctttcggcttccaagggggaagtgctgggctataattaatgtttttattaaatttggagggaagtttttgcagcctttcgcctagcgtggccttcagtcccgttaggtgcaaagcaagtctcgttgatcgccattgctagttttgcacacgtttgcgaatcagagctgcccggggtacaccgaccgcgcagggaaacatcgagagtgtaaataaatacatcgcctcttgttcggatttttgctactaccgaaaa

SEQ ID NO: 6861 - DNA, 6231 bp, Homo sapiens
  source 1..6231: mol_type = unassigned DNA
gtcatgcatacattagagcctctgatgagtttgtctttggggactctggggctgtactacccagtgtcatcacaaattaccaggagaaattgcttccagctcacaatcacatctgcttttggcaagaactaatgcaccaagacttcaagttctaagcctctgttcagattttaattgcaattgatcaggtttatattattgtacctccagagacctcctagagccagaacccggctggcttgctgtttcctttagagcagcgcatatcattatttggtgttctggtggaggacttttctgatggcagaaattagtttctctgggttcatcaggacgggatgcttcaagatttaagtgcaagtgtcttctttccaccttgttcacaacacagaacgttagtggcttttcatggcctgccactgaaaatcaagaaagaaccccacagtccatgttcagaaatcagctctgcctgcagtcaagaacagccctttaaattcagctatggagaaaagtgcctgtacaatgtcagtgcctatgatcagaagccacaagtgggaatgaggccctccaacccccccacaccatccagcacgccagtgtccccactgcatcatgcatctccaaactcaactcatacaccgaaacctgaccgggccttcccagctcacctccctccatcgcagtccataccagatagcagctaccccatggaccacagatttcgccgccagctttctgaaccctgtaactcctttcctcctttgccgacgatgccaagggaaggacgtcctatgtaccaacgccagatgtctgagccaaacatccccttcccaccacaaggctttaagcaggagtaccacgacccagtgtatgaacacaacaccatggttggcagtgcggccagccaaagctttccccctcctctgatgattaaacaggaacccagagattttgcatatgactcagaagtgcctagctgccactccatttatatgaggcaagaaggcttcctggctcatcccagcagaacagaaggctgtatgtttgaaaagggccccaggcagttttatgatgacacctgtgttgtcccagaaaaattcgatggagacatcaaacaagagccaggaatgtatcgggaaggacccacataccaacggcgaggatcacttcagctctggcagtttttggtagctcttctggatgacccttcaaattctcattttattgcctggactggtcgaggcatggaatttaaactgattgagcctgaagaggtggcccgacgttggggcattcagaaaaacaggccagctatgaactatgataaacttagccgttcactccgctattactatgagaaaggaattatgcaaaaggtggctggagagagatatgtctacaagtttgtgtgtgatccagaagcccttttctccatggcctttccagataatcagcgtccactgctgaagacagacatggaacgtcacatcaacgaggaggacacagtgcctctttctcactttgatgagagcatggcctacatgccggaagggggctgctgcaacccccacccctacaacgaaggctacgtgtattaacacaagtgacagtcaagcagggcgtttttgcgcttttccttttttctgcaagatacagagaattgctgaatctttgttttatttctgttgtttgtattttatttttaaataataatacacaaaaaggggcttttcctgttgcattattctatggtctgccatggactgtgcactttatttgagggtgggtgggagtaatctaaacatttattctgtgtaacaggaagctaatgggtgaatgggcagagggatttggggattactttttacttaggcttgggatggggtcctacaagttttgagtatgatgaaactatatcatgtctgtttgatttcataacaacataagataatgtttattttatcggggtatctatggtacagttaatttcacgttgtgtaaatatccacttggagactatttgccttgggcattttcccctgtcatttatgagtctctgcaggtgtacaaaaaaaccccaatctactgtaaatggcagtttaattgttagaaatgactgtttttgcaccacttgtaaaaaggtatttagcgattgcatttgctgtttgttgttttattttgctttatatatgacttgcagaggataaccataaaatgggtaattctctctgaagttgaataatcaccatgactgtaaatgaggggcacaattttggactctggcgccaaactgagtcataggccagtagcattacgtgtatctggtgccaccttgctgtttagatacaaatcataccgtcttttaaatattttgaagcccatttcagttaaataatgacatgtcatggtcctttggaatcttcatttaaatgttaaatctggaatcaaaatgaagcaaaaaatatctgtctccttttcactttcttcagtacataaatacattatttaatcaataagaattaactgtactaaatcatgtattatgctgttctagttacagcaaacactctttaagaaaaatatccaatacactaaataggtactatagtaatttttagacatggtacccattgatatgcatttaaaccttttactgctgtgttatgttgataacatatataaatattagataatgctaatgcttctgctgctgtcttttctgtaatattctctttcatgctgaatttactatgaccatttataagcagtgcagttaactacagatagcatttcaggacaaaatagatgactcaaaccatttattgcttaaaaaatagcttacgccatgctatgctataagcagcttttatgcacattgacaaatgaagagtaagcttcagcttgctaaaggaaactgtggaaccttttgtaacttttggtgatatggaaaattatttacaaaccgtcaaagaatatgaggaagttgctgtatgacatagtgctggcactgatattatccatcatctctttttggacacttctgtaaatgtgattggattgtttgaaagaagatttaaagtttcaaagttttttgttctgtttttgctttgcatttggagaaaatattgaaagcagggtatgttgtttcattcaccttgaaaaaaccatgagtaaatggggatatagaatctctgaatagctcgctaaaagattcaagcaagggacatgaattttgttccatctatcaataatatccagaagaacaacttttttaaagagtctatagcaaaaagcaaaaaaaaaaaaaaattctaaacacaaagtcaaaataaacctattgtaaaagcatttcgtgatgagcatgaaaaagattgtttaaagatgatccccccagctacccattttccaaaactacacagatcacagctcatttctctaagtggagcagttatcaagaaacccaaacaccaaaattgctactcttcacatttaatcctacaaaaagtactccaatttcaaaatatgtatgtaacctgcgatttcaatgattgttgttcatatacatcatgtattattttggcccattttgggcctaaaaaagaaaactatgccttaaaaatcagaaccttttctccccactatgcttatgtggccatctacagcacttagaataaaaacagatgttaaaatattcagtgaaagttttattggaaaaaggaattgagatatataattgagatttggtgaaattgaaggagaaaatttaagtgagtctttaaaatatattctgaatgaaaactgtattgaggattcatttttgttccttttttttctttttctcttttctcctttttcttctttttaatagtctagttttagtcagtcagtgaggaagaattgggccatgctaacgttatcacaagagaacaatggcagaaatggtattagttatataatatttaaggacaaactatatgttttgctgttttaacgtagtgactcactgaactaaatacataattgaccaacattaagtgtatttccaatacagaagggttgaaaatattacattataaactcttttgaaaaatgtatctaaaattttttaagttctgttttgattccactttttggttgagtttttatgtttttgttttcaggtagattaataaatctggcagctgatttctgcaagattcttgtgttttgaatttctcattgaattggctactcaaacatagaaatcatttgttaatgatgtaatgtcttctctcagcttttatcttcactgctgtttgctgtctcttgatgatgacatgttaatacccaatagattaattgcaacaaacacttatactcaaataactaagtaaaaataatttttcttgttatgtccatgaaaagtgcttcagaataaaaatccacaagactgacagtgcagaacatttttctcaaatcatgggcggatcttggaggtctagtttcccgtagatgctgtaaccaattaccacaacttcagtaatttacacaaatttatcttatagttctggaggcagaagttcaaaagaagccttaagagactaaaaccaagatgtccttaggtctggttccttctggaggctccaggggagattcttccagctttcacttctagagtctgctgacattccttggctcctggctacatcacttcaatctctgcttccatggtcacatactcttctactatagtcaaatttccttcctgcctcttataaggatgcttgtgattacatttaggggatgctcagataatccaggacaatctctccatctcaagatccttaacttaatgacgtgtgccaagtccctttggctagataattattcataggtcccagggattaggacatggatgtaaggggtgagggcagggctgttattcagaacaccgcacggaggaggaagactgtgtagcaaagactctaattgatttactcaggaacagtggagttctgctgagggatctaggatttgaaagtactagagtttgcttttatttaccactgagatattttccccttattctgcataaataattttgaaaactttctatattaaatttcaactattccactaaaatgtctggtaatcacatcaagcctttagattattcaaatccttccccagcccccaggaaaacactaagtcatgaaacagaaaaacagaaggtatgataataatagtaataacagttaaatcagtggtctaatccagattttattttttaatacatttcttttggtgttaatatgggttactatgtgatcttatcatttgctagtgattattacttattaggtaagaacaatgtgtaaaatatgtctattactcaaaagaacaattgcaaaatgagtcaacttatctttatataaccaggaaagaaatatattgccagaagctacagaattttgccagatgatagggatttctaaaatgagccactttgtctatcatgcagccttttcagagcttgtaatgagaaaacattacagaggagaaggtcatttggatgtttgttacttggaatcctagaaaacaaaaactaaaatttaaaaataagaagtgagtaagctattttccatttgcgatttggtatggagaagagaggaaatagaattattaaaaaaatacaaattgggtaaaagtgatggtggaaaaaatataaagaaggcaaatgtacatattaagcaattctactaagaattggaaaaatcaagtttcaaaaagatggtaatagttgggcatgatactagaaaatttcacccagtttattcagagctcaactagtacttttaggacttctttttttatatacatgagactcactttgacatacttaaaaaaaaaacagtttatggaaagtacagtttaagaggagaatttgattagactaagtggatatctttatagaaatattaatgatttcagaattttcagttacaagtgtatataccgtggctattgtttatggattcatatgtaaggtagggtcttttttgcatatagactccagtattagttactttcattctaaaattatatttatgcttctatggggaagaaaatttttaattcacttggttgtattaaaattatacttacggtttgagaaaacatgctatgaaaatcatgattatagcaaattaaatatgctcaaaatttaaatctaaaataaaagcccagaaactg

SEQ ID NO: 6862 - DNA, 6348 bp, Homo sapiens
  source 1..6348: mol_type = unassigned DNA
cgttattggctgcgggaagaacctcgccgggacctaacccgaagctccgccccctcgcggttaccctggatacccgtcaggctcgggctgcagagaaggaggatcagggcaagtggcttcagagatgcagccctcactgcttaacgtcctagttattgtccttgaaacccgagccatctcaccgctcgcccccaaccctgggctctggctgtttaaaagctggagaggaagtgaaagcgtcaagtacagttgatagaagtccagatcctgaggaaatctccagctaaatgctcaaaatataaaatactgagctgagatttgcgaagagcagcagcatggatggattttatgaccagcaagtgccttacatggtcaccaatagtcagcgtgggagaaattgtaacgagaaaccaacaaatgtcaggaaaagaaaattcattaacagagatctggctcatgattcagaagaactctttcaagatctaagtcaattacaggaaacatggcttgcagaagtggcttttcatggcctgccactgaaaatcaagaaagaaccccacagtccatgttcagaaatcagctctgcctgcagtcaagaacagccctttaaattcagctatggagaaaagtgcctgtacaatgtcagtgcctatgatcagaagccacaagtgggaatgaggccctccaacccccccacaccatccagcacgccagtgtccccactgcatcatgcatctccaaactcaactcatacaccgaaacctgaccgggccttcccagctcacctccctccatcgcagtccataccagatagcagctaccccatggaccacagatttcgccgccagctttctgaaccctgtaactcctttcctcctttgccgacgatgccaagggaaggacgtcctatgtaccaacgccagatgtctgagccaaacatccccttcccaccacaaggctttaagcaggagtaccacgacccagtgtatgaacacaacaccatggttggcagtgcggccagccaaagctttccccctcctctgatgattaaacaggaacccagagattttgcatatgactcagaagtgcctagctgccactccatttatatgaggcaagaaggcttcctggctcatcccagcagaacagaaggctgtatgtttgaaaagggccccaggcagttttatgatgacacctgtgttgtcccagaaaaattcgatggagacatcaaacaagagccaggaatgtatcgggaaggacccacataccaacggcgaggatcacttcagctctggcagtttttggtagctcttctggatgacccttcaaattctcattttattgcctggactggtcgaggcatggaatttaaactgattgagcctgaagaggtggcccgacgttggggcattcagaaaaacaggccagctatgaactatgataaacttagccgttcactccgctattactatgagaaaggaattatgcaaaaggtggctggagagagatatgtctacaagtttgtgtgtgatccagaagcccttttctccatggcctttccagataatcagcgtccactgctgaagacagacatggaacgtcacatcaacgaggaggacacagtgcctctttctcactttgatgagagcatggcctacatgccggaagggggctgctgcaacccccacccctacaacgaaggctacgtgtattaacacaagtgacagtcaagcagggcgtttttgcgcttttccttttttctgcaagatacagagaattgctgaatctttgttttatttctgttgtttgtattttatttttaaataataatacacaaaaaggggcttttcctgttgcattattctatggtctgccatggactgtgcactttatttgagggtgggtgggagtaatctaaacatttattctgtgtaacaggaagctaatgggtgaatgggcagagggatttggggattactttttacttaggcttgggatggggtcctacaagttttgagtatgatgaaactatatcatgtctgtttgatttcataacaacataagataatgtttattttatcggggtatctatggtacagttaatttcacgttgtgtaaatatccacttggagactatttgccttgggcattttcccctgtcatttatgagtctctgcaggtgtacaaaaaaaccccaatctactgtaaatggcagtttaattgttagaaatgactgtttttgcaccacttgtaaaaaggtatttagcgattgcatttgctgtttgttgttttattttgctttatatatgacttgcagaggataaccataaaatgggtaattctctctgaagttgaataatcaccatgactgtaaatgaggggcacaattttggactctggcgccaaactgagtcataggccagtagcattacgtgtatctggtgccaccttgctgtttagatacaaatcataccgtcttttaaatattttgaagcccatttcagttaaataatgacatgtcatggtcctttggaatcttcatttaaatgttaaatctggaatcaaaatgaagcaaaaaatatctgtctccttttcactttcttcagtacataaatacattatttaatcaataagaattaactgtactaaatcatgtattatgctgttctagttacagcaaacactctttaagaaaaatatccaatacactaaataggtactatagtaatttttagacatggtacccattgatatgcatttaaaccttttactgctgtgttatgttgataacatatataaatattagataatgctaatgcttctgctgctgtcttttctgtaatattctctttcatgctgaatttactatgaccatttataagcagtgcagttaactacagatagcatttcaggacaaaatagatgactcaaaccatttattgcttaaaaaatagcttacgccatgctatgctataagcagcttttatgcacattgacaaatgaagagtaagcttcagcttgctaaaggaaactgtggaaccttttgtaacttttggtgatatggaaaattatttacaaaccgtcaaagaatatgaggaagttgctgtatgacatagtgctggcactgatattatccatcatctctttttggacacttctgtaaatgtgattggattgtttgaaagaagatttaaagtttcaaagttttttgttctgtttttgctttgcatttggagaaaatattgaaagcagggtatgttgtttcattcaccttgaaaaaaccatgagtaaatggggatatagaatctctgaatagctcgctaaaagattcaagcaagggacatgaattttgttccatctatcaataatatccagaagaacaacttttttaaagagtctatagcaaaaagcaaaaaaaaaaaaaaattctaaacacaaagtcaaaataaacctattgtaaaagcatttcgtgatgagcatgaaaaagattgtttaaagatgatccccccagctacccattttccaaaactacacagatcacagctcatttctctaagtggagcagttatcaagaaacccaaacaccaaaattgctactcttcacatttaatcctacaaaaagtactccaatttcaaaatatgtatgtaacctgcgatttcaatgattgttgttcatatacatcatgtattattttggcccattttgggcctaaaaaagaaaactatgccttaaaaatcagaaccttttctccccactatgcttatgtggccatctacagcacttagaataaaaacagatgttaaaatattcagtgaaagttttattggaaaaaggaattgagatatataattgagatttggtgaaattgaaggagaaaatttaagtgagtctttaaaatatattctgaatgaaaactgtattgaggattcatttttgttccttttttttctttttctcttttctcctttttcttctttttaatagtctagttttagtcagtcagtgaggaagaattgggccatgctaacgttatcacaagagaacaatggcagaaatggtattagttatataatatttaaggacaaactatatgttttgctgttttaacgtagtgactcactgaactaaatacataattgaccaacattaagtgtatttccaatacagaagggttgaaaatattacattataaactcttttgaaaaatgtatctaaaattttttaagttctgttttgattccactttttggttgagtttttatgtttttgttttcaggtagattaataaatctggcagctgatttctgcaagattcttgtgttttgaatttctcattgaattggctactcaaacatagaaatcatttgttaatgatgtaatgtcttctctcagcttttatcttcactgctgtttgctgtctcttgatgatgacatgttaatacccaatagattaattgcaacaaacacttatactcaaataactaagtaaaaataatttttcttgttatgtccatgaaaagtgcttcagaataaaaatccacaagactgacagtgcagaacatttttctcaaatcatgggcggatcttggaggtctagtttcccgtagatgctgtaaccaattaccacaacttcagtaatttacacaaatttatcttatagttctggaggcagaagttcaaaagaagccttaagagactaaaaccaagatgtccttaggtctggttccttctggaggctccaggggagattcttccagctttcacttctagagtctgctgacattccttggctcctggctacatcacttcaatctctgcttccatggtcacatactcttctactatagtcaaatttccttcctgcctcttataaggatgcttgtgattacatttaggggatgctcagataatccaggacaatctctccatctcaagatccttaacttaatgacgtgtgccaagtccctttggctagataattattcataggtcccagggattaggacatggatgtaaggggtgagggcagggctgttattcagaacaccgcacggaggaggaagactgtgtagcaaagactctaattgatttactcaggaacagtggagttctgctgagggatctaggatttgaaagtactagagtttgcttttatttaccactgagatattttccccttattctgcataaataattttgaaaactttctatattaaatttcaactattccactaaaatgtctggtaatcacatcaagcctttagattattcaaatccttccccagcccccaggaaaacactaagtcatgaaacagaaaaacagaaggtatgataataatagtaataacagttaaatcagtggtctaatccagattttattttttaatacatttcttttggtgttaatatgggttactatgtgatcttatcatttgctagtgattattacttattaggtaagaacaatgtgtaaaatatgtctattactcaaaagaacaattgcaaaatgagtcaacttatctttatataaccaggaaagaaatatattgccagaagctacagaattttgccagatgatagggatttctaaaatgagccactttgtctatcatgcagccttttcagagcttgtaatgagaaaacattacagaggagaaggtcatttggatgtttgttacttggaatcctagaaaacaaaaactaaaatttaaaaataagaagtgagtaagctattttccatttgcgatttggtatggagaagagaggaaatagaattattaaaaaaatacaaattgggtaaaagtgatggtggaaaaaatataaagaaggcaaatgtacatattaagcaattctactaagaattggaaaaatcaagtttcaaaaagatggtaatagttgggcatgatactagaaaatttcacccagtttattcagagctcaactagtacttttaggacttctttttttatatacatgagactcactttgacatacttaaaaaaaaaacagtttatggaaagtacagtttaagaggagaatttgattagactaagtggatatctttatagaaatattaatgatttcagaattttcagttacaagtgtatataccgtggctattgtttatggattcatatgtaaggtagggtcttttttgcatatagactccagtattagttactttcattctaaaattatatttatgcttctatggggaagaaaatttttaattcacttggttgtattaaaattatacttacggtttgagaaaacatgctatgaaaatcatgattatagcaaattaaatatgctcaaaatttaaatctaaaataaaagcccagaaactg

SEQ ID NO: 6863 - DNA, 6096 bp, Homo sapiens
  source 1..6096: mol_type = unassigned DNA
gtcatgcatacattagagcctctgatgagtttgtctttggggactctggggctgtactacccagtgtcatcacaaattaccaggagaaattgcttccagctcacaatcacatctgcttttggcaagaactaatgcaccaagacttcaagttctaagcctctgttcagattttaattgcaattgatcaggtttatattattgtacctccagagacctcctagagccagaacccggctggcttgctgtttcctttagagcagcgcatatcattatttggtgttctggtggaggacttttctgatggcagaaattagtttctctgggttcatcaggacgggatgcttcaagatttaagtgcaagtgtcttctttccaccttgttcacaacacagaacgttagctcaggtacctgacaatgatgagcagtttgtaccagactatcaggctgaaagtttggcttttcatggcctgccactgaaaatcaagaaagaaccccacagtccatgttcagaaatcagctctgcctgcagtcaagaacagccctttaaattcagctatggagaaaagtgcctgtacaatgtcagatttcgccgccagctttctgaaccctgtaactcctttcctcctttgccgacgatgccaagggaaggacgtcctatgtaccaacgccagatgtctgagccaaacatccccttcccaccacaaggctttaagcaggagtaccacgacccagtgtatgaacacaacaccatggttggcagtgcggccagccaaagctttccccctcctctgatgattaaacaggaacccagagattttgcatatgactcagaagtgcctagctgccactccatttatatgaggcaagaaggcttcctggctcatcccagcagaacagaaggctgtatgtttgaaaagggccccaggcagttttatgatgacacctgtgttgtcccagaaaaattcgatggagacatcaaacaagagccaggaatgtatcgggaaggacccacataccaacggcgaggatcacttcagctctggcagtttttggtagctcttctggatgacccttcaaattctcattttattgcctggactggtcgaggcatggaatttaaactgattgagcctgaagaggtggcccgacgttggggcattcagaaaaacaggccagctatgaactatgataaacttagccgttcactccgctattactatgagaaaggaattatgcaaaaggtggctggagagagatatgtctacaagtttgtgtgtgatccagaagcccttttctccatggcctttccagataatcagcgtccactgctgaagacagacatggaacgtcacatcaacgaggaggacacagtgcctctttctcactttgatgagagcatggcctacatgccggaagggggctgctgcaacccccacccctacaacgaaggctacgtgtattaacacaagtgacagtcaagcagggcgtttttgcgcttttccttttttctgcaagatacagagaattgctgaatctttgttttatttctgttgtttgtattttatttttaaataataatacacaaaaaggggcttttcctgttgcattattctatggtctgccatggactgtgcactttatttgagggtgggtgggagtaatctaaacatttattctgtgtaacaggaagctaatgggtgaatgggcagagggatttggggattactttttacttaggcttgggatggggtcctacaagttttgagtatgatgaaactatatcatgtctgtttgatttcataacaacataagataatgtttattttatcggggtatctatggtacagttaatttcacgttgtgtaaatatccacttggagactatttgccttgggcattttcccctgtcatttatgagtctctgcaggtgtacaaaaaaaccccaatctactgtaaatggcagtttaattgttagaaatgactgtttttgcaccacttgtaaaaaggtatttagcgattgcatttgctgtttgttgttttattttgctttatatatgacttgcagaggataaccataaaatgggtaattctctctgaagttgaataatcaccatgactgtaaatgaggggcacaattttggactctggcgccaaactgagtcataggccagtagcattacgtgtatctggtgccaccttgctgtttagatacaaatcataccgtcttttaaatattttgaagcccatttcagttaaataatgacatgtcatggtcctttggaatcttcatttaaatgttaaatctggaatcaaaatgaagcaaaaaatatctgtctccttttcactttcttcagtacataaatacattatttaatcaataagaattaactgtactaaatcatgtattatgctgttctagttacagcaaacactctttaagaaaaatatccaatacactaaataggtactatagtaatttttagacatggtacccattgatatgcatttaaaccttttactgctgtgttatgttgataacatatataaatattagataatgctaatgcttctgctgctgtcttttctgtaatattctctttcatgctgaatttactatgaccatttataagcagtgcagttaactacagatagcatttcaggacaaaatagatgactcaaaccatttattgcttaaaaaatagcttacgccatgctatgctataagcagcttttatgcacattgacaaatgaagagtaagcttcagcttgctaaaggaaactgtggaaccttttgtaacttttggtgatatggaaaattatttacaaaccgtcaaagaatatgaggaagttgctgtatgacatagtgctggcactgatattatccatcatctctttttggacacttctgtaaatgtgattggattgtttgaaagaagatttaaagtttcaaagttttttgttctgtttttgctttgcatttggagaaaatattgaaagcagggtatgttgtttcattcaccttgaaaaaaccatgagtaaatggggatatagaatctctgaatagctcgctaaaagattcaagcaagggacatgaattttgttccatctatcaataatatccagaagaacaacttttttaaagagtctatagcaaaaagcaaaaaaaaaaaaaaattctaaacacaaagtcaaaataaacctattgtaaaagcatttcgtgatgagcatgaaaaagattgtttaaagatgatccccccagctacccattttccaaaactacacagatcacagctcatttctctaagtggagcagttatcaagaaacccaaacaccaaaattgctactcttcacatttaatcctacaaaaagtactccaatttcaaaatatgtatgtaacctgcgatttcaatgattgttgttcatatacatcatgtattattttggcccattttgggcctaaaaaagaaaactatgccttaaaaatcagaaccttttctccccactatgcttatgtggccatctacagcacttagaataaaaacagatgttaaaatattcagtgaaagttttattggaaaaaggaattgagatatataattgagatttggtgaaattgaaggagaaaatttaagtgagtctttaaaatatattctgaatgaaaactgtattgaggattcatttttgttccttttttttctttttctcttttctcctttttcttctttttaatagtctagttttagtcagtcagtgaggaagaattgggccatgctaacgttatcacaagagaacaatggcagaaatggtattagttatataatatttaaggacaaactatatgttttgctgttttaacgtagtgactcactgaactaaatacataattgaccaacattaagtgtatttccaatacagaagggttgaaaatattacattataaactcttttgaaaaatgtatctaaaattttttaagttctgttttgattccactttttggttgagtttttatgtttttgttttcaggtagattaataaatctggcagctgatttctgcaagattcttgtgttttgaatttctcattgaattggctactcaaacatagaaatcatttgttaatgatgtaatgtcttctctcagcttttatcttcactgctgtttgctgtctcttgatgatgacatgttaatacccaatagattaattgcaacaaacacttatactcaaataactaagtaaaaataatttttcttgttatgtccatgaaaagtgcttcagaataaaaatccacaagactgacagtgcagaacatttttctcaaatcatgggcggatcttggaggtctagtttcccgtagatgctgtaaccaattaccacaacttcagtaatttacacaaatttatcttatagttctggaggcagaagttcaaaagaagccttaagagactaaaaccaagatgtccttaggtctggttccttctggaggctccaggggagattcttccagctttcacttctagagtctgctgacattccttggctcctggctacatcacttcaatctctgcttccatggtcacatactcttctactatagtcaaatttccttcctgcctcttataaggatgcttgtgattacatttaggggatgctcagataatccaggacaatctctccatctcaagatccttaacttaatgacgtgtgccaagtccctttggctagataattattcataggtcccagggattaggacatggatgtaaggggtgagggcagggctgttattcagaacaccgcacggaggaggaagactgtgtagcaaagactctaattgatttactcaggaacagtggagttctgctgagggatctaggatttgaaagtactagagtttgcttttatttaccactgagatattttccccttattctgcataaataattttgaaaactttctatattaaatttcaactattccactaaaatgtctggtaatcacatcaagcctttagattattcaaatccttccccagcccccaggaaaacactaagtcatgaaacagaaaaacagaaggtatgataataatagtaataacagttaaatcagtggtctaatccagattttattttttaatacatttcttttggtgttaatatgggttactatgtgatcttatcatttgctagtgattattacttattaggtaagaacaatgtgtaaaatatgtctattactcaaaagaacaattgcaaaatgagtcaacttatctttatataaccaggaaagaaatatattgccagaagctacagaattttgccagatgatagggatttctaaaatgagccactttgtctatcatgcagccttttcagagcttgtaatgagaaaacattacagaggagaaggtcatttggatgtttgttacttggaatcctagaaaacaaaaactaaaatttaaaaataagaagtgagtaagctattttccatttgcgatttggtatggagaagagaggaaatagaattattaaaaaaatacaaattgggtaaaagtgatggtggaaaaaatataaagaaggcaaatgtacatattaagcaattctactaagaattggaaaaatcaagtttcaaaaagatggtaatagttgggcatgatactagaaaatttcacccagtttattcagagctcaactagtacttttaggacttctttttttatatacatgagactcactttgacatacttaaaaaaaaaacagtttatggaaagtacagtttaagaggagaatttgattagactaagtggatatctttatagaaatattaatgatttcagaattttcagttacaagtgtatataccgtggctattgtttatggattcatatgtaaggtagggtcttttttgcatatagactccagtattagttactttcattctaaaattatatttatgcttctatggggaagaaaatttttaattcacttggttgtattaaaattatacttacggtttgagaaaacatgctatgaaaatcatgattatagcaaattaaatatgctcaaaatttaaatctaaaataaaagcccagaaactg

SEQ ID NO: 6864 - DNA, 1539 bp, Homo sapiens
  source 1..1539: mol_type = unassigned DNA
gggaaccggcgggagggcgcctcctcctcccccgccctctctgctgaggatggaagtgacgaaagcagccgaggaggtcacttcctgctggggtggatgaggaggagccggagacgccgcggaggagaccggaccgaagacggaccgtgccgggaagagcaggcgggtgaaaatgaaagccggctgtagcatcgtggaaaagccagaaggaggtggagggtatcagtttcctgactgggcctacaaaacagagtcatccccaggctcccggcagatccagctgtggcacttcatcctggagctgctgcagaaggaagagttccgccatgtcatcgcctggcagcagggagagtacggggaatttgtcatcaaggatccagatgaggtggcccgcctctggggccgcaggaaatgcaaaccacagatgaattatgacaagctgagccgggccctcagatactattacaacaagaggatccttcataaaacaaaagggaaaagatttacctataaatttaacttcaacaagctggtgatgcccaactacccattcatcaacattcggtcaagtggtaagatacaaactcttttggtagggaattaattttgaattgaaaagaatttttaaaaatccaaatctaagacatggcatgtttaggaagattttagaaacactaaaataatgtgatcctttggattgcctcaatgttcttactcaagtcatctcacttataaggagagttataggctattcagtatcaagatagatttctttggtttatttggttggttcccttttctgcatattgtttgtaatctcctagatactattacgctatcttgtttgggaatgatgtttcataggtttgtgatgatctttacgttcaggactcagttttaacacccagcccagtggttctttcatagatgggaacctgtttctacaaacacttccgattttctgtgaaactaccaagctctcccttatcaagtgaatatcatcaaaaccacagcatccttgatcagagaagggggaggttcacatgtttgcagtgaaaagcagtgtctttgatctgcaacagcaaatcctcagagaaaaagattctggggttacttgaccttctctcctgttaagtgcagtagggcttcccctcttgactttcctggttatagctttccatcacagctccccacattctctcttgatgttgaaagcagtctctcaaaagactttgttgttgtgtggttttttgtttgtgatttttttccttatgcaaatcatactcctgcccaagaaaatacagtagttccccttatctgagcagtatatgttctaagacccctagtagattcgcaaaccacagatagtaccaaactccattcatatatatgatgttttttcttcccttaaccccactcatatgtatctgtgataacgtttaatttataaattaggcacagtaagagattaatgacaataataaaatagaaaaattataacaatatgctgtaataaacttaatgtggtctttctcaaaa

SEQ ID NO: 6865 - DNA, 696 bp, Homo sapiens
  source 1..696: mol_type = unassigned DNA
acggaccgtgccgggaagagcaggcgggtgaaaatgaaagccggctgtagcatcgtggaaaagccagaaggaggtggagggtatcagtttcctgactgggcctacaaaacagagtcatccccaggctcccggcagatccagctgtggcacttcatcctggagctgctgcagaaggaagagttccgccatgtcatcgcctggcagcagggagagtacggggaatttgtcatcaaggatccagatgaggtggcccgcctctggggccgcaggaaatgcaaaccacagatgaattatgacaagctgagccgggccctcaggtaaggaaaaggattcccaaatctgtgttaacagattggaaggagactaagctgtttggtgaatgctagataaaaagggtatcaggtaataaaagactacactatcttagtgaataatgtgtcactttaaagtgggagtagaagagctgttgaatgtgagtagcataggcacaggaggagaaaaggcatatctttggttatacgtaggaggggattccaatgtggctggcactggatcctgacagacagctgattctgctctgtagtgggcgagagtatatggtgaaacatggattggagttcatttataatccaaaggattagtttagacttctctattagaatctgttagaatttctttctttgggcttccctgaaa

SEQ ID NO: 6866 - DNA, 5254 bp, Homo sapiens
  source 1..5254: mol_type = unassigned DNA
ccggagacgccgcggaggagaccggaccgaagacggaccgtgccgggaagagcaggcgggtgaaaatgaaagccggctgtagcatcgtggaaaagccagaaggaggtggagggtatcagtttcctgactgggcctacaaaacagagtcatccccaggctcccggcagatccagctgtggcacttcatcctggagctgctgcagaaggaagagttccgccatgtcatcgcctggcagcagggagagtacggggaatttgtcatcaaggatccagatgaggtggcccgcctctggggccgcaggaaatgcaaaccacagatgaattatgacaagctgagccgggccctcagatactattacaacaagaggatccttcataaaacaaaagggaaaagatttacctataaatttaacttcaacaagctggtgatgcccaactacccattcatcaacattcggtcaagtggtgtggttcctcagagtgcaccaccagtgccaacagcctcttcccggttccatttcccacctctggacacccattctccaaccaatgatgtgcagccgggacggttctctgctagctccctaactgcttctggccaggagtccagtaatggtactgatagaaagactgagctttcagagctggaggatggctcagctgctgactggcgccggggtgtggatcccgtgtcctccaggaatgccattggtggaggagggattggccatcagaaacgcaagcctgacataatgcttcctctgtttgctaggccagggatgtaccctgacccccacagtcccttcgctgtctctccaatccctggccgcggaggtgtccttaatgtccccatttcaccagccctctccctgactcccaccatcttctcctatagcccatcaccaggcctgagccctttcaccagcagcagctgcttctccttcaaccctgaggaaatgaaacactaccttcattctcaagcttgttctgtgttcaactaccatctgagtcctcggacttttccccgttacccagggctcatggttccaccactgcagtgccaaatgcatcctgaggagtcaactcagttctccatcaagctgcagcccccaccagttgggcggaagaaccgggagagggttgagagcagcgaggagtcagcaccagtcaccacgcccaccatggcttctattcccccaagaatcaaggtggaacctgcctctgaaaaggatcctgagagcctcaggcagtcggcacgagagaaggaggagcacactcaagaagagggcactgtgccaagcaggaccattgaagaggaaaaaggcaccatctttgcccgtcctgctgcaccacccatctggccctctgtgcccattagcaccccaagtggagaacctctggaggtgactgaagacagtgaggataggcctggcaaagagcccagtgcacctgagaagaaagaagatgcactgatgccccccaagcttcggttgaagcggcgctggaatgatgaccctgaagcccgagagctgagcaagagtggcaagtttctctggaatgggtcaggaccccagggcttggcaacagcagctgctgatgcttagaactggaagtggattaggagctgtttatactataatcaaatacatacatgtatttatgtagcaagatttcagggtgggggggagggagttaaactggtttgatcattctaggggcatagacttgtatttttatgttttggggatgggatggggttatcttctgttgtaaattaggtgggatatgaacacacttattttcctggtgagtaggacacagggagggtattgaactcaaaggagaaggagcctctatttcctgttgaggcttatactttctgacaaggaaactcccaaagggccaagatactttttggtcccatgatagtcaggttccagacttctttcttttctattgtatttgtatgtggaaagccattaatgaatttattttactccaagagatacacataaaagggaaaagggcatggttgggaggttgagcagtaagagaccattaatactaagtattttgcctgaaatgcttctttataattatttcagggaaggaataagataatctcagacttactggggtggggcttggggaatgtttggatgttgctctttttcttcttccttcttttttttttttttttttttttggttggtgttgtttggcatttttttcttttcctttttaaagaaaatgttttcaggaaacatgaacaaacatactgccaattatagtggggctgggaaggcacaggagctggcgacctctcagctgcatagttgggacggcaaaccctgctgtgagcttctcagacttttcacctacttcacctattaagaagccatgaggagttgtaaactcttgttcagggaagaaaagagggcaggaggaagtaacccaatgcctttaaatacaaaacagatgaaaaacaaaatactcatttttccttttctattgtgggtttggggagccaaaccaagtgtgactgtgagcacgttcactgagaggcatgacaacattattgaagaggtctttccattatgtctggttctcttattttcttaagtcaagccttaactatgaacatactttaagatgatacgggtctgtcaccataaacctgtaaaagggcatcgacagcttttcagataatccaggaatgttgagacatggctaagtttctagctgatacttagtcattccctcttgatattgttgggatgggtagccaaaaggcaggcttgtgggagttaagagccaatgatacctggaaacatgggaggtagctgggggtacaagtggatgttgagactgaaggaagaggtggaaagaagacacagaaggcacccagatgccaaaaggcctggcatgaatgagagttggcatctgtcctgttgtggtgttcccattcttgccatacccatttgcccagattgttctgattctcatgttcaattgactatcccacatgagactacagtttataggcagtgaggaattgtttcttcctgggaaatgtccttccagcaacttcagaggaatgggaaagtgttaatcttacgtgaagcaaaggagcctggactaggggcagagagaaagaagcagcagcccaccttctttgtgtttgcacatgtgcctatgtcgtgtacattggtacctgactgtggctcagatctgcgtcgcagcagcgagagaagaaatcactccatatccgatgagaggaagggtggcacagagatggtgtctacaattagagacatttctgactccaccttagcctaagcaaactttatatactgagtaacatttgaaggttgtcttttaatggtggggggtgttttttcctttttaaactacagtgcttgcacaagagagggagggactcagaaaaggttagggcaggtgagggagacagtagatggcctgggatgacttgagtccatcatactattgcttggcaggtgtcctcccccatgtttgattcaaattccatgagtgacctacctttccccaggaatgggactgagagggtagtctccagcaactcagtctgcacagggctccccgttcaggctgcctttggtggttgtgcttttgtaagtttctttctctgcacttcgacttacctctgaatcagaaagcaagcccagcaggtgaatgagggatgtctgcttggcattgcccaatctaaccagggaggctggctggccacccactgtccgctagaggggagagctagcaggtgttggtatgaactcaggaatagaaacacgaggcctttttaaatacgagggagaagaatccatgatgcatacctgtaaccccctagaacccaagtgccagaattcctagatgctgcttctgtttgaacaaaatgtcactgcttttacacttgaaaaaaacacactcgaaaaatgttcaactccatgaaaaatattttttggctttaagaaattgtttggtgtttaactgtttcctttgattgccattccaccagtaaattgttggttgatttgcactgcactctggggttggggttgggaggggagggtccttatacagagccgaacctggggttgctcaggaagtgggccagggaatgtggaagtcgttgacattgcctgggccaaaagagtgggagatagtttttctcccctcagcccactcctggtagcacctgtcgccagcctggtacaaagccaggcctttttcttctgtgagcatctcatcactgtccagcagcaggtggaaaaagggggacaacaaccagacctattttttctcccccattttttccaaattttgctgtgccaaatgtttaaaattttataaatatgaatctattgaaatttccttaatcaagagcttcttcgtgtaaagtttgcttttttagctatagaaaaagaaaacagtaaatatctcttaatggcatccagccttgctgagctcaccttttttcctgaagaatgggtaggagtgaaatatttaatgtaaacatttcaccaagtccctttaccctaattttgaagctgcattaaacccaactcactaacacagggaatgattgcaccctagtcctctgtgggccaagaaactttcagaagcattaaaaaaatagttgaagtatatcacttctcaccaagtgggtagagtcagttggctgtttgtcccttgttttttatttattccataattatgtttgtgctttttgttttgtaaacagtaatggaacgtacatttttattttgtttagaagacaactttgattcaatctttcaagaactgttccattcttggtttcttcttagggggataaaaagttaccagttaatttgttttgagatatttaagcattctttgagttatagaattgtgatgcagggatttgtgaatgagacatttacatgtgaaaggtgacttcactagttacctgcttgagcagagtaaagtgtgtatatgtacataaaatgtaagtaatcttaactccattgtgcagtgccttttagatgttccgctttctataaagtcttcaaatttttgcatatatattatatatatatgatgtaatgttatagaaatatatgtataatatacatattttttccaggggtatctgatagctctgtattttgttatggaagttgaaagaaaaaagtattttacctcagaaattaaataaaaaaatacttttaagtaa

SEQ ID NO: 6867 - DNA, 2429 bp, Homo sapiens
  source 1..2429: mol_type = unassigned DNA
gaaacaaagggaaacggggggcggtgtggcggggcggggggtggagagctgaggccgagcgaaggaaatgcaccaatcagctgctcccccgggctcacaactgtctgctgcgcccgaaaaacaagtcggtgcgctggggacccggggccggggccgccttactccggcctagccccgcggccctcggtgcgggctccagggcatgctcgggaccccccgcggctccagcccagacgccccggcctcaggtctcggcccccgcttggggccccggccgtgcggccggagggagcggccggatggagcggaggatgaaagccggatacttggaccagcaagtgccctacaccttcagcagcaaatcgcccggaaatgggagcttgcgcgaagcgctgatcggcccgctggggaagctcatggacccgggctccctgccgcccctcgactctgaagatctcttccaggatctaagtcacttccaggagacgtggctcgctgaagctcaggtaccagacagtgatgagcagtttgttcctgatttccattcagaaaacctagctttccacagccccaccaccaggatcaagaaggagccccagagtccccgcacagacccggccctgtcctgcagcaggaagccgccactcccctaccaccatggcgagcagtgcctttactccagtgcctatgacccccccagacaaatcgccatcaagtcccctgcccctggtgcccttggacagtcgcccctacagccctttccccgggcagagcaacggaatttcctgagatcctctggcacctcccagccccaccctggccatgggtacctcggggaacatagctccgtcttccagcagcccctggacatttgccactccttcacatctcagggagggggccgggaacccctcccagccccctaccaacaccagctgtcggagccctgcccaccctatccccagcagagctttaagcaagaataccatgatcccctgtatgaacaggcgggccagccagccgtggaccagggtggggtcaatgggcacaggtacccaggggcgggggtggtgatcaaacaggaacagacggacttcgcctacgactcagatgtcaccgggtgcgcatcaatgtacctccacacagagggcttctctgggccctctccaggtgacggggccatgggctatggctatgagaaacctctgcgaccattcccagatgatgtctgcgttgtccctgagaaatttgaaggagacatcaagcaggaaggggtcggtgcatttcgagaggggccgccctaccagcgccggggtgccctgcagctgtggcaatttctggtggccttgctggatgacccaacaaatgcccatttcattgcctggacgggccggggaatggagttcaagctcattgagcctgaggaggtcgccaggctctggggcatccagaagaaccggccagccatgaattacgacaagctgagccgctcgctccgatactattatgagaaaggcatcatgcagaaggtggctggtgagcgttacgtgtacaagtttgtgtgtgagcccgaggccctcttctctttggccttcccggacaatcagcgtccagctctcaaggctgagtttgaccggcctgtcagtgaggaggacacagtccctttgtcccacttggatgagagccccgcctacctcccagagctggctggccccgcccagccatttggccccaagggtggctactcttactagcccccagcggctgttccccctgccgcaggtgggtgctgccctgtgtacatataaatgaatctggtgttggggaaaccttcatctgaaacccacagatgtctctggggcagatccccactgtcctaccagttgccctagcccagactctgagctgctcaccggagtcattgggaaggaaaagtggagaaatggcaagtctagagtctcagaaactcccctgggggtttcacctgggccctggaggaattcagctcagcttcttcctaggtccaagccccccacaccttttccccaaccacagagaacaagagtttgttctgttctgggggacagagaaggcgcttcccaacttcatactggcaggagggtgaggaggttcactgagctccccagatctcccactgcggggagacagaagcctggactctgccccacgctgtggccctggagggtcccggtttgtcagttcttggtgctctgtgttcccagaggcaggcggaggttgaagaaaggaacctgggatgaggggtgctgggtataagcagagagggatgggttcctgctccaagggaccctttgcctttcttctgccctttcctaggcccaggcctgggtttgtacttccacctccaccacatctgccagaccttaataaaggcccccacttctcccatt

SEQ ID NO: 6868 - DNA, 2182 bp, Homo sapiens
  source 1..2182: mol_type = unassigned DNA
caggtctcggcccccgcttggggccccggccgtgcggccggagggagcggccggatggagcggaggatgaaagccggatacttggaccagcaagtgccctacaccttcagcagcaaatcgcccggaaatgggagcttgcgcgaagcgctgatcggcccgctggggaagctcatggacccgggctccctgccgcccctcgactctgaagatctcttccaggatctaagtcacttccaggagacgtggctcgctgaagctcaggtaccagacagtgatgagcagtttgttcctgatttccattcagaaaacctagctttccacagccccaccaccaggatcaagaaggagccccagagtccccgcacagacccggccctgtcctgcagcaggaagccgccactcccctaccaccatggcgagcagtgcctttactccagtgcctatgacccccccagacaaatcgccatcaagtcccctgcccctggtgcccttggacagtcgcccctacagccctttccccgggcagagcaacggaatttcctgagatcctctggcacctcccagccccaccctggccatgggtacctcggggaacatagctccgtcttccagcagcccctggacatttgccactccttcacatctcagggagggggccgggaacccctcccagccccctaccaacaccagctgtcggagccctgcccaccctatccccagcagagctttaagcaagaataccatgatcccctgtatgaacaggcgggccagccagccgtggaccagggtggggtcaatgggcacaggtacccaggggcgggggtggtgatcaaacaggaacagacggacttcgcctacgactcagatgtcaccgggtgcgcatcaatgtacctccacacagagggcttctctgggccctctccaggtgacggggccatgggctatggctatgagaaacctctgcgaccattcccagatgatgtctgcgttgtccctgagaaatttgaaggagacatcaagcaggaaggggtcggtgcatttcgagaggggccgccctaccagcgccggggtgccctgcagctgtggcaatttctggtggccttgctggatgacccaacaaatgcccatttcattgcctggacgggccggggaatggagttcaagctcattgagcctgaggaggtcgccaggctctggggcatccagaagaaccggccagccatgaattacgacaagctgagccgctcgctccgatactattatgagaaaggcatcatgcagaaggtggctggtgagcgttacgtgtacaagtttgtgtgtgagcccgaggccctcttctctttggccttcccggacaatcagcgtccagctctcaaggctgagtttgaccggcctgtcagtgaggaggacacagtccctttgtcccacttggatgagagccccgcctacctcccagagctggctggccccgcccagccatttggccccaagggtggctactcttactagcccccagcggctgttccccctgccgcaggtgggtgctgccctgtgtacatataaatgaatctggtgttggggaaaccttcatctgaaacccacagatgtctctggggcagatccccactgtcctaccagttgccctagcccagactctgagctgctcaccggagtcattgggaaggaaaagtggagaaatggcaagtctagagtctcagaaactcccctgggggtttcacctgggccctggaggaattcagctcagcttcttcctaggtccaagccccccacaccttttccccaaccacagagaacaagagtttgttctgttctgggggacagagaaggcgcttcccaacttcatactggcaggagggtgaggaggttcactgagctccccagatctcccactgcggggagacagaagcctggactctgccccacgctgtggccctggagggtcccggtttgtcagttcttggtgctctgtgttcccagaggcaggcggaggttgaagaaaggaacctgggatgaggggtgctgggtataagcagagagggatgggttcctgctccaagggaccctttgcctttcttctgccctttcctaggcccaggcctgggtttgtacttccacctccaccacatctgccagaccttaataaaggcccccacttctccca

SEQ ID NO: 6869 - DNA, 1775 bp, Homo sapiens
  source 1..1775: mol_type = unassigned DNA
gcgcccgaaaaacaagtcggtgcgctggggacccggggccggggccgccttactccggcctagccccgcggccctcggtgcgggctccagggcatgctcgggaccccccgcggctccagcccagacgccccggcctcagaaatcgcccggaaatgggagcttgcgcgaagcgctgatcggcccgctggggaagctcatggacccgggctccctgccgcccctcgactctgaagatctcttccaggatctaagtcacttccaggagacgtggctcgctgaagctcaggtaccagacagtgatgagcagtttgttcctgatttccattcagaaaacctagctttccacagccccaccaccaggatcaagaaggagccccagagtccccgcacagacccggccctgtcctgcagcaggaagccgccactcccctaccaccatggcgagcagtgcctttactccagtgcctatgacccccccagacaaatcgccatcaagtcccctgcccctggtgcccttggacagtcgcccctacagccctttccccgggcagagcaacggaatttcctgagatcctctggcacctcccagccccaccctggccatgggtacctcggggaacatagctccgtcttccagcagcccctggacatttgccactccttcacatctcagggagggggccgggaacccctcccagccccctaccaacaccagctgtcggagccctgcccaccctatccccagcagagctttaagcaagaataccatgatcccctgtatgaacaggcgggccagccagccgtggaccagggtggggtcaatgggcacaggtacccaggggcgggggtggtgatcaaacaggaacagacggacttcgcctacgactcagatgtcaccgggtgcgcatcaatgtacctccacacagagggcttctctgggccctctccaggtgacggggccatgggctatggctatgagaaacctctgcgaccattcccagatgatgtctgcgttgtccctgagaaatttgaaggagacatcaagcaggaaggggtcggtgcatttcgagaggggccgccctaccagcgccggggtgccctgcagctgtggcaatttctggtggccttgctggatgacccaacaaatgcccatttcattgcctggacgggccggggaatggagttcaagctcattgagcctgaggaggtcgccaggctctggggcatccagaagaaccggccagccatgaattacgacaagctgagccgctcgctccgatactattatgagaaaggcatcatgcagaaggtggctggtgagcgttacgtgtacaagtttgtgtgtgagcccgaggccctcttctctttggccttcccggacaatcagcgtccagctctcaaggctgagtttgaccggcctgtcagtgaggaggacacagtccctttgtcccacttggatgagagccccgcctacctcccagagctggctggccccgcccagccatttggccccaagggtggctactcttactagcccccagcggctgttccccctgccgcaggtgggtgctgccctgtgtacatataaatgaatctggtgttggggaaaccttcatctgaaacccacagatgtctctggggcagatccccactgtcctaccagttgccctagcccagactctgagctgctcaccggagtcattgggaaggaaaagtggagaaatggcaagtctagagtctcagaaactcccctgggggtttcacctgggccctgg

SEQ ID NO: 6870 - DNA, 1628 bp, Homo sapiens
  source 1..1628: mol_type = unassigned DNA
agccctccctggacggtgtgcgaacgcagccccctcccccaccaggtctcggcccccgcttggggccccggccgtgcggccggagggagcggccggatggagcggaggatgaaagccggatacttggaccagcaagtgccctacaccttcagcagcaaatcgcccggaaatgggagcttgcgcgaagcgctgatcggcccgctggggaagctcatggacccgggctccctgccgcccctcgactctgaagatctcttccaggatctaagtcacttccaggagacgtggctcgctgaagctcaggtaccagacagtgatgagcagtttgttcctgatttccattcagaaaacctagctttccacagccccaccaccaggatcaagaaggagccccagagtccccgcacagacccggccctgtcctgcagcaggaagccgccactcccctaccaccatggcgagcagtgcctttactccagctccgtcttccagcagcccctggacatttgccactccttcacatctcagggagggggccgggaacccctcccagccccctaccaacaccagctgtcggagccctgcccaccctatccccagcagagctttaagcaagaataccatgatcccctgtatgaacaggcgggccagccagccgtggaccagggtggggtcaatgggcacaggtacccaggggcgggggtggtgatcaaacaggaacagacggacttcgcctacgactcagatgtcaccgggtgcgcatcaatgtacctccacacagagggcttctctgggccctctccaggtgacggggccatgggctatggctatgagaaacctctgcgaccattcccagatgatgtctgcgttgtccctgagaaatttgaaggagacatcaagcaggaaggggtcggtgcatttcgagaggggccgccctaccagcgccggggtgccctgcagctgtggcaatttctggtggccttgctggatgacccaacaaatgcccatttcattgcctggacgggccggggaatggagttcaagctcattgagcctgaggaggtcgccaggctctggggcatccagaagaaccggccagccatgaattacgacaagctgagccgctcgctccgatactattatgagaaaggcatcatgcagaaggtggctggtgagcgttacgtgtacaagtttgtgtgtgagcccgaggccctcttctctttggccttcccggacaatcagcgtccagctctcaaggctgagtttgaccggcctgtcagtgaggaggacacagtccctttgtcccacttggatgagagccccgcctacctcccagagctggctggccccgcccagccatttggccccaagggtggctactcttactagcccccagcggctgttccccctgccgcaggtgggtgctgccctgtgtacatataaatgaatctggtgttggggaaaccttcatctgaaacccacagatgtctctggggcagatccccactgtcctaccagttgccctagcccagactctgagctgctcaccggagtcattgggaaggaaaagtggagaaatggcaagtctagagtctcagaaactcccctgggggtttcacctgggccct

SEQ ID NO: 6871 - DNA, 1727 bp, Homo sapiens
  source 1..1727: mol_type = unassigned DNA
gcagaaagcagaaacggcgagcccggctcctgggagcaggtctcggcccccgcttggggccccggccgtgcggccggagggagcggccggatggagcggaggatgaaagccggatacttggaccagcaagtgccctacaccttcagcagcaaatcgcccggaaatgggagcttgcgcgaagcgctgatcggcccgctggggaagctcatggacccgggctccctgccgcccctcgactctgaagatctcttccaggatctaagtcacttccaggagacgtggctcgctgaagctcaggtaccagacagtgatgagcagtttgttcctgatttccattcagaaaacctagctttccacagccccaccaccaggatcaagaaggagccccagagtccccgcacagacccggccctgtcctgcagcaggaagccgccactcccctaccaccatggcgagcagtgcctttactccagtgcctatgacccccccagacaaatcgccatcaagtcccctgcccctggtgcccttggacagtcgcccctacagccctttccccgggcagagcaacggaatttcctgagatcctctggcacctcccagccccaccctggccatgggtacctcggggaacatagctccgtcttccagcagcccctggacatttgccactccttcacatctcagggagggggccgggaacccctcccagccccctaccaacaccagctgtcggagccctgcccaccctatccccagcagagctttaagcaagaataccatgatcccctgtatgaacaggcgggccagccagccgtggaccagggtggggtcaatgggcacaggtacccaggggcgggggtggtgatcaaacaggaacagacggacttcgcctacgactcagatgtcaccgggtgcgcatcaatgtacctccacacagagggcttctctgggccctctccaggtgacggggccatgggctatggctatgagaaacctctgcgaccattcccagatgatgtctgcgttgtccctgagaaatttgaaggagacatcaagcaggaaggggtcggtgcatttcgagaggggccgccctaccagcgccggggtgccctgcagctgtggcaatttctggtggccttgctggatgacccaacaaatgcccatttcattgcctggacgggccggggaatggagttcaagctcattgagcctgaggaggtcgccaggctctggggcatccagaagaaccggccagccatgaattacgacaagctgagccgctcgctccgatactattatgagaaaggcatcatgcagaaggtggctggtgagcgttacgtgtacaagtttgtgtgtgagcccgaggccctcttctctttggccttcccggacaatcagcgtccagctctcaaggctgagtttgaccggcctgtcagtgaggaggacacagtccctttgtcccacttggatgagagccccgcctacctcccagagctggctggccccgcccagccatttggccccaagggtggctactcttactagcccccagcggctgttccccctgccgcaggtgggtgctgccctgtgtacatataaatgaatctggtgttggggaaaccttcatctgaaacccacagatgtctctggggcagatccccactgtcctaccagttgccctagcccagactctgagctgctcaccggagtcattgggaaggaaaagt

SEQ ID NO: 6872 - DNA, 917 bp, Homo sapiens
  source 1..917: mol_type = unassigned DNA
cttgcccagcccccgctgctgccttccatggcctcagccgcagccctcaagttgaggaggggttccagcatcacactccctctgggtgaactttccctgggattttgtggttggcaggcaacctgggcaaagaacagtcaccaggaagcaggctggaaggaagaaattcttgaatgtggataggacttcctcctcccctgccctcgagctccaccccaagccacttctcacatcaccccttcttcccccacagatgtcaccgggtgcgcatcaatgtacctccacacagagggcttctctgggccctctccaggtgacggggccatgggctatggctatgagaaacctctgcgaccattcccagatgatgtctgcgttgtccctgagaaatttgaaggagacatcaagcaggaaggggtcggtgcatttcgagaggggccgccctaccagcgccggggtgccctgcagctgtggcaatttctggtggccttgctggatgacccaacaaatgcccatttcattgcctggacgggccggggaatggagttcaagctcattgagcctgaggaggtcgccaggctctggggcatccagaagaaccggccagccatgaattacgacaagctgagccgctcgctccgatactattatgagaaaggcatcatgcagaaggtggctggtgagcgttacgtgtacaagtttgtgtgtgagcccgaggccctcttctctttggccttcccggacaatcagcgtccagctctcaaggctgagtttgaccggcctgtcagtgaggaggacacagtccctttgtcccacttggatgagagccccgcctacctcccagagctggctggccccgcccagccatttggccccaagggtggctactcttactagcccccagcggctgttccccc

SEQ ID NO: 6873 - DNA, 616 bp, Homo sapiens
  source 1..616: mol_type = unassigned DNA
gggtgactcgcgggcattctccccgcttctcgcagaaatcgcccggaaatgggagcttgcgcgaagcgctgatcggcccgctggggaagctcatggacccgggctccctgccgcccctcgactctgaagatctcttccaggatctaagtcacttccaggagacgtggctcgctgaagctcaaatccaactaccctggaactctccatagaagctcggagtaaaaagaaaatgacccctgactagatccttggagtgagactagctcaggtaccagacagtgatgagcagtttgttcctgatttccattcagaaaacctagctttccacagccccaccaccaggatcaagaaggagccccagagtccccgcacagacccggccctgtcctgcagcaggaagccgccactcccctaccaccatggcgagcagtgcctttactccagtgcctatgacccccccagacaaatcgccatcaagtcccctgcccctggtgcccttggacagtcgcccctacagccctttccccgggcagagcaacggaatttcctgagatcctctggcacctcccagccccaccctggccatgggtacctcggggaacatagctccgtcttc

SEQ ID NO: 6874 - DNA, 760 bp, Homo sapiens
  source 1..760: mol_type = unassigned DNA
aaaacaagtcggtgcgctggggacccggggccggggccgccttactccggcctagccccgcggccctcggtgcgggctccagggcatgctcgggaccccccgcggctccagcccagacgccccggcctcaggtctcggcccccgcttggggccccggccgtgcggccggagggagcggccggatggagcggaggatgaaagccggatacttggaccagcaagtgccctacaccttcagcagcgtgagcgccgcgccggcctccacgcccgccccgccccgcacccagcccctactctcaccacagcccccctccccgcagtcccagcggagtcctgggctgccccgcccctgagtcacccgaggaccccaacctcgtcccccagactaagcgcctcagggtgactcgcgggcattctccccgcttctcgcagaaatcgcccggaaatgggagcttgcgcgaagcgctgatcggcccgctggggaagctcatggacccgggctccctgccgcccctcgactctgaagatctcttccaggatctaagtcacttccaggagacgtggctcgctgaagctcaggtaccagacagtgatgagcagtttgttcctgatttccattcagaaaacctagctttccacagccccaccaccaggatcaagaaggagccccagagtccccgcacagacccggccctgtcctgcagcaggaagccgccactcccctaccaccatggcgagcagtgcctttactccagtgcct

SEQ ID NO: 6875 - DNA, 582 bp, Homo sapiens
  source 1..582: mol_type = unassigned DNA
atgcgatggtgtgcgcttcgcctgctcctccgcgcgcgcgcgcgtacacacacacacacacacacacacacacacacacacacacacacacgttcttatgtaaccgagcccgggtaaagcagggctgcagaaagcagaaacggcgagcccggctcctgggagcaggtctcggcccccgcttggggccccggccgtgcggccggagggagcggccggatggagcggaggatgaaagccggatacttggaccagcaagtgccctacaccttcagcagcaaatcgcccggaaatgggagcttgcgcgaagcgctgatcggcccgctggggaagctcatggacccgggctccctgccgcccctcgactctgaagatctcttccaggatctaagtcacttccaggagacgtggctcgctgaagctcaggtaccagacagtgatgagcagtttgttcctgatttccattcagaaaaccgtgagtagaggtccctggggagagggtatagggagtggaggatggcaggaagtgagtcataggatagagaatcacaagagagcagcttgttctctcctaaaacacagtgg

SEQ ID NO: 6876 - DNA, 581 bp, Homo sapiens
  source 1..581: mol_type = unassigned DNA
aaggaagcagtgaggggaacagacgagctccacacacaaagggacgggaggagagggatagacacaaagcctgctagaggtgatcagggaaggcttcacagaggaggcagtatcagtcccagcaactgtagcccagttgctccccgtcacccaaagacagccacacctgatcccctggctcaggcagctggaaagaggagctgagaaaaaggagagtcatgctctcagcaaacatcaagtgctgtaagcatcataaaatcatcatcatcatcatcaccatcagacactgatggcccagtgggaggcctgggaccctgaagagagcccaggtctcggcccccgcttggggccccggccgtgcggccggagggagcggccggatggagcggaggatgaaagccggatacttggaccagcaagtgccctacaccttcagcagcaaatcgcccggaaatgggagcttgcgcgaagcgctgatcggcccgctggggaagctcatggacccgggctccctgccgcccctcgactctgaagatctcttccaggatctaagtcacttccaggagacgtggctcgctgaa

SEQ ID NO: 6877 - DNA, 2147 bp, Homo sapiens
  source 1..2147: mol_type = unassigned DNA
cacgttcttatgtaaccgagcccgggtaaagcagggctgcagaaagcagaaacggcgagcccggctcctgggagcagaaatcgcccggaaatgggagcttgcgcgaagcgctgatcggcccgctggggaagctcatggacccgggctccctgccgcccctcgactctgaagatctcttccaggatctaagtcacttccaggagacgtggctcgctgaagctcaggtaccagacagtgatgagcagtttgttcctgatttccattcagaaaacctagctttccacagccccaccaccaggatcaagaaggagccccagagtccccgcacagacccggccctgtcctgcagcaggaagccgccactcccctaccaccatggcgagcagtgcctttactccagtgcctatgacccccccagacaaatcgccatcaagtcccctgcccctggtgcccttggacagtcgcccctacagccctttccccgggcagagcaacggaatttcctgagatcctctggcacctcccagccccaccctggccatgggtacctcggggaacatagctccgtcttccagcagcccctggacatttgccactccttcacatctcagggagggggccgggaacccctcccagccccctaccaacaccagctgtcggagccctgcccaccctatccccagcagagctttaagcaagaataccatgatcccctgtatgaacaggcgggccagccagccgtggaccagggtggggtcaatgggcacaggtacccaggggcgggggtggtgatcaaacaggaacagacggacttcgcctacgactcagatgtcaccgggtgcgcatcaatgtacctccacacagagggcttctctgggccctctccaggtgacggggccatgggctatggctatgagaaacctctgcgaccattcccagatgatgtctgcgttgtccctgagaaatttgaaggagacatcaagcaggaaggggtcggtgcatttcgagaggggccgccctaccagcgccggggtgccctgcagctgtggcaatttctggtggccttgctggatgacccaacaaatgcccatttcattgcctggacgggccggggaatggagttcaagctcattgagcctgaggaggtcgccaggctctggggcatccagaagaaccggccagccatgaattacgacaagctgagccgctcgctccgatactattatgagaaaggcatcatgcagaaggtggctggtgagcgttacgtgtacaagtttgtgtgtgagcccgaggccctcttctctttggccttcccggacaatcagcgtccagctctcaaggctgagtttgaccggcctgtcagtgaggaggacacagtccctttgtcccacttggatgagagccccgcctacctcccagagctggctggccccgcccagccatttggccccaagggtggctactcttactagcccccagcggctgttccccctgccgcaggtgggtgctgccctgtgtacatataaatgaatctggtgttggggaaaccttcatctgaaacccacagatgtctctggggcagatccccactgtcctaccagttgccctagcccagactctgagctgctcaccggagtcattgggaaggaaaagtggagaaatggcaagtctagagtctcagaaactcccctgggggtttcacctgggccctggaggaattcagctcagcttcttcctaggtccaagccccccacaccttttccccaaccacagagaacaagagtttgttctgttctgggggacagagaaggcgcttcccaacttcatactggcaggagggtgaggaggttcactgagctccccagatctcccactgcggggagacagaagcctggactctgccccacgctgtggccctggagggtcccggtttgtcagttcttggtgctctgtgttcccagaggcaggcggaggttgaagaaaggaacctgggatgaggggtgctgggtataagcagagagggatgggttcctgctccaagggaccctttgcctttcttctgccctttcctaggcccaggcctgggtttgtacttccacctccaccacatctgccagaccttaataaaggcccccacttctcccatt

SEQ ID NO: 6878 - DNA, 4111 bp, Homo sapiens
  source 1..4111: mol_type = unassigned DNA
agcctggttggcagctgcggcgcagagtccagccgctggtgcgcggagcggttcaccgtcttcggagcggttcggcccagcctttcgcccaggcgcccaggcccgctgcgcgcgtgcgtgagcgcgcctgcgccgccggggccgctgcaaggggaggagagaggccgcctcaggaggatcccttttcccccagaaattactcaatgctgaaacctctcaaagtggtattagagacgctgaaagcaccatggacgggttttatgatcagcaagtcccttttatggtcccagggaaatctcgatctgaggaatgcagagggcggcctgtgattgacagaaagaggaagtttttggacacagatctggctcacgattctgaagagctatttcaggatctcagtcaacttcaagaggcttggttagctgaagcacaagttcctgatgatgaacagtttgtcccagattttcagtctgataacctggtgcttcatgccccacctccaaccaagatcaaacgggagctgcacagcccctcctctgagctgtcgtcttgtagccatgagcaggctcttggtgctaactatggagaaaagtgcctctacaactattgtgcctatgataggaagcctccctctgggttcaagccattaacccctcctacaacccccctctcacccacccatcagaatcccctatttcccccacctcaggcaactctgcccacctcagggcatgcccctgcagctggcccagttcaaggtgtgggccccgcccccgccccccattcgcttccagagcctggaccacagcagcaaacatttgcggtcccccgaccaccacatcagcccctgcagatgccaaagatgatgcctgaaaaccagtatccatcagaacagagatttcagagacaactgtctgaaccctgccaccccttccctcctcagccaggagttcctggagataatcgccccagttaccatcggcaaatgtcagaacctattgtccctgcagctcccccgccccctcagggattcaaacaagaataccatgacccactctatgaacatggggtcccgggcatgccagggcccccagcacacgggttccagtcaccaatgggaatcaagcaggagcctcgggattactgcgtcgattcagaagtgcctaactgccagtcatcctacatgagagggggttatttctccagcagccatgaaggtttttcatatgaaaaagatccccgattatactttgacgacacttgtgttgtgcctgagagactggaaggcaaagtcaaacaggagcctaccatgtatcgagaggggcccccttaccagaggcgaggttcccttcagctgtggcagttcctggtcacccttcttgatgacccagccaatgcccacttcattgcctggacaggtcgaggcatggagttcaagctgatagaaccggaagaggttgctcggcgctggggcatccagaagaaccggccagccatgaactatgacaagctgagccgctctctccgctattactatgaaaagggcatcatgcagaaggtggctggagagcgatacgtctacaaatttgtctgtgacccagatgccctcttctccatggctttcccggataaccagcgtccgttcctgaaggcagagtccgagtgccacctcagcgaggaggacaccctgccgctgacccactttgaagacagccccgcttacctcctggacatggaccgctgcagcagcctcccctatgccgaaggctttgcttactaagtttctgagtggcggagtggccaaaccctagagctagcagttcccattcaggcaaacaagggcagtggttttgtttgtgtttttggttgttcctaaagcttgccctttgagtattatctggagaacccaagctgtctctggattggcacccttaaagacagatacattggctggggagtgggaacagggaggggcagaaaaccaccaaaaggccagtgcctcaactcttgattctgatgaggtttctgggaagagatcaaaatggagtctccttaccatggacaatacatgcaaagcaatatcttgttcaggttagtacccgcaaaacgggacatagtatgtgacaatctgcatcgatcatggactactaaatgcctttacatagaagggctctgatttgcacaatttgttgaaaaatcacaaacccatagaaaagtaagtaggctaagttggggaggctcaaaccattaagggttaaaaatacatcttaaacattggaaagctcttctagctgaatctgaaatattaccccttgtctagaaaaaggggggcagtcagaacagctgttccccactccgtggttctcaaaatcataaaccatggctactcttgggaaccacccggccatgtggtcgccaagtagagcaagccccctttctcttcccaatcacgtggctgagtgtggatgacttttattttaggagaagggcgattaacacttttgacagtattttgttttgccctgatttgggggattgttttgttttggtggttgttttggaaaaacagtttataaactgatttttgtagttttggtatttaaagcaaaaaaacgaaaaacaaaaaacaaaaacaaaccttttggtaactgtgcactgtgtcctttagccagggccgtgccaacttatgaagacactgcagcttgagaggggctttgctgaggcttccccttggccatgtgaaagcccgccttgttgcctgctttgtgctttctgcaccagacaacctgatggaacatttgcacctgagttgtacatttttgaagtgtgcagggcagcctggacacaagcttagattctctatgtatagttccccgtgttcactaacatgccctctctggaaagcatatgtatataacatgtgtcatgtcctttggaaacctggtcacctggtgaaaacccttgggattcttccctgggcatgactgatgacaatttccatttcatcagtttgttttgttttcctttttctttaaatcttggactttaaaccctacctgtgtgattcagtagggtttgagacttacgtgtgatactgacaggtaagcaacagtgctagcattctagattcctgcctttttttaaaaagaaattattctcattgctgtattatattggaaaagttttaaacaaccaagctaaagctatgtgaaagttgagctcaaagtagaggaaaagttactggtggtaccttgctgcctgctctgctggtagaattctgtgctccccgtgacacttagtacattaagaatgactacactgttcctcgtatgtgaaggaggcagtgctgactccgtgagtgtgagacacgtgctttgaactgcttttctattcatggagcactccatagtctcaaactgtcccccttatgaccaacagcacatttgtgaagaggttcgcagggataaggggtgcactttatagctatggaaacatgagattctcctctattggaagctaattagcccacaaaggtggtaaacctgtagattgggccttaattagcattgtactctaatcaaaggactctttctaaaccatatttatagctttcttaacctacacatagtctatacatagatgcatattttacccccagctggctagagatttatttgttgtaaatgctgtatagatttggttttcctttctttacttaccctggtttggattttttttttttttcttttgaatggatttatgctgtcttagcaatatgacaataatcctctgtagcttgagctacccctcccctgctgtaacttacgtgacctgtgctgtcactgggcataggacagcggcatcacggttgcattcccattggactcatgcacctcccggatggtttttgtttttttcgggggttctttggggtttgtttgtttgcttcttttccagagtgtggaaagtctacagtgcagaaaggcttgaacctgccagctgatttgaaatactttcccctgcgcagggccgtatgcatcctgccaagctgcgttatattctgtactgtgtacaataaagaagtttgcttttcgtttaccaagcacccgaa

SEQ ID NO: 6879 - DNA, 2213 bp, Homo sapiens
  source 1..2213: mol_type = unassigned DNA
ggagcgcgagtgcgggggctcccgagtggatgggggatcgcggagttgcgaggctttcacagtctctggagattcgagagccccgaggggacttggaggctcgcgagaagagacgcttggcggagctccgcagttgggaggagggggcgggaagcagtttgaggggaatgtctgagaggcgctgccccccagagcaccgggagggggtaaatgacacaggaggatcccttttcccccagaaattactcaatgctgaaacctctcaaagtggtattagagacgctgaaagcaccatggacgggttttatgatcagcaagtcccttttatggtcccagggaaatctcgatctgaggaatgcagagggcggcctgtgattgacagaaagaggaagtttttggacacagatctggctcacgattctgaagagctatttcaggatctcagtcaacttcaagaggcttggttagctgaagcacaagttcctgatgatgaacagtttgtcccagattttcagtctgataacctggtgcttcatgccccacctccaaccaagatcaaacgggagctgcacagcccctcctctgagctgtcgtcttgtagccatgagcaggctcttggtgctaactatggagaaaagtgcctctacaactattgtgcctatgataggaagcctccctctgggttcaagccattaacccctcctacaacccccctctcacccacccatcagaatcccctatttcccccacctcaggcaactctgcccacctcagggcatgcccctgcagctggcccagttcaaggtgtgggccccgcccccgccccccattcgcttccagagcctggaccacagcagcaaacatttgcggtcccccgaccaccacatcagcccctgcagatgccaaagatgatgcctgaaaaccagtatccatcagaacagagatttcagagacaactgtctgaaccctgccaccccttccctcctcagccaggagttcctggagataatcgccccagttaccatcggcaaatgtcagaacctattgtccctgcagctcccccgccccctcagggattcaaacaagaataccatgacccactctatgaacatggggtcccgggcatgccagggcccccagcacacgggttccagtcaccaatgggaatcaagcaggagcctcgggattactgcgtcgattcagaagtgcctaactgccagtcatcctacatgagagggggttatttctccagcagccatgaaggtttttcatatgaaaaagatccccgattatactttgacgacacttgtgttgtgcctgagagactggaaggcaaagtcaaacaggagcctaccatgtatcgagaggggcccccttaccagaggcgaggttcccttcagctgtggcagttcctggtcacccttcttgatgacccagccaatgcccacttcattgcctggacaggtcgaggcatggagttcaagctgatagaaccggaagaggttgctcggcgctggggcatccagaagaaccggccagccatgaactatgacaagctgagccgctctctccgctattactatgaaaagggcatcatgcagaaggtggctggagagcgatacgtctacaaatttgtctgtgacccagatgccctcttctccatggctttcccggataaccagcgtccgttcctgaaggcagagtccgagtgccacctcagcgaggaggacaccctgccgctgacccactttgaagacagccccgcttacctcctggacatggaccgctgcagcagcctcccctatgccgaaggctttgcttactaagtttctgagtggcggagtggccaaaccctagagctagcagttcccattcaggcaaacaagggcagtggttttgtttgtgtttttggttgttcctaaagcttgccctttgagtattatctggagaacccaagctgtctctggattggcacccttaaagacagatacattggctggggagtgggaacagggaggggcagaaaaccaccaaaaggccagtgcctcaactcttgattctgatgaggtttctgggaagagatcaaaatggagtctccttaccatggacaatacatgcaaagcaatatcttgttcaggttagtacccgcaaaacgggacatagtatgtgacaatctgcatcgatcatggactactaaatgcctttacatagaa

SEQ ID NO: 6880 - DNA, 764 bp, Homo sapiens
  source 1..764: mol_type = unassigned DNA
accacagagctgcagttgaccgatgtgctgtttctgctgcagaaactattgacaggattgtgtccacctttgctttcctttcagaagtgcctaactgccagtcatcctacatgagagggggttatttctccagcagccatgaaggtttttcatatgaaaaagatccccgattatactttgacgacacttgtgttgtgcctgagagactggaaggcaaagtcaaacaggagcctaccatgtatcgagaggggcccccttaccagaggcgaggttcccttcagctgtggcagttcctggtcacccttcttgatgacccagccaatgcccacttcattgcctggacaggtcgaggcatggagttcaagctgatagaaccggaagaggttgctcggcgctggggcatccagaagaaccggccagccatgaactatgacaagctgagccgctctctccgctattactatgaaaagggcatcatgcagaaggtggctggagagcgatacgtctacaaatttgtctgtgacccagatgccctcttctccatggctttcccggataaccagcgtccgttcctgaaggcagagtccgagtgccacctcagcgaggaggacaccctgccgctgacccactttgaagacagccccgcttacctcctggacatggaccgctgcagcagcctcccctatgccgaaggctttgcttactaagtttctgagtggcggagtggccaaaccctagagctagcagttcccattcaggcaaac

SEQ ID NO: 6881 - DNA, 366 bp, Homo sapiens
  source 1..366: mol_type = unassigned DNA
tgtccctgcagctcccccgccccctcagggattcaaacaagaataccatgacccactctatgaacatggggtcccgggcatgccagggcccccagcacacgggttccagtcaccaatgggaatcaagcaggagcctcgggattactgcgtcgattcagaagtgcctaactgccagtcatcctacatgagagggggttatttctccagcagccatgaaggttgctcggcgctggggcatccagaagaaccggccagccatgaactatgacaagctgagccgctctctccgctattactatgaaaagggcatcatgcagaaggtggctggagagcgatacgtctacaaatttgtctgtgacccagatg

SEQ ID NO: 6882 - DNA, 614 bp, Homo sapiens
  source 1..614: mol_type = unassigned DNA
gcagcaaacatttgcggtcccccgaccaccacatcagcccctgcagatgccaaagatgatgcctgaaaaccagtatccatcagaacagagatttcagagacaactgtctgaaccctgccaccccttccctcctcagccaggagttcctggagataatcgccccagttaccatcggcaaatgtcagaacctattgtccctgcagctcccccgccccctcagggattcaaacaagaataccatgacccactctatgaacatggggtcccgggcatgccagggcccccagcacacgggttccagtcaccaatgggaatcaagcaggagcctcgggattactgcgtcgattcagaagtgcctaactgccagtcatcctacatgagagggggttatttctccagcagccatgaaggtaaggaacctgcttttctttcctcttctctcctctctcctctcctttcttcctttctttctctcggcttttctttctcctaccttccttccttcctctttctttgcttgactaatacccaagcttaaaattgctcagtttccaggctaagatttgagatcatagtttaaaccttgcttagctcatgaatatgagagctgattg

SEQ ID NO: 6883 - DNA, 590 bp, Homo sapiens
  source 1..590: mol_type = unassigned DNA
tttatttcaagtttctctgggataggggggtagttgtcaacaatattaccaaaggatgcaagatggtggccatggggcttatgtaacatactgtattaacagttaactgagttgggagacaaatatcctagttctcctggagaattgggagatgggtagccccagtctcagctgtgaaataagcctgtctccagtccacccagccccctgagaaggaaggagttttggattcctgggattgatgagttatttgcccgtgggtgttgaaaggaagagaggagggaaccagaatgcagatttcagagacaactgtctgaaccctgccaccccttccctcctcagccaggagttcctggagataatcgccccagttaccatcggcaaatgtcagaacctattgtccctgcagctcccccgccccctcagggattcaaacaagaataccatgacccactctatgaacatggggtcccgggcatgccagggcccccagcacacgggttccagtcaccaatgggaatcaagcaggagcctcgggattactgcgtcgattcagaagtgcctaactgccagtcatcctacatgagagg

SEQ ID NO: 6884 - DNA, 238 bp, Homo sapiens
  source 1..238: mol_type = unassigned DNA
gaggatcccttttcccccagaaattactcaatgctgaaacctctcaaagtggtattagagacgctgaaagcaccatggacgggttttatgatcagcaagtcccttttatggtcccagggcacaagttcctgatgatgaacagtttgtcccagattttcagtctgataaccatttcagagacaactgtctgaaccctgccaccccttccctcctcagccaggagttcctggagataatc

SEQ ID NO: 6885 - DNA, 574 bp, Homo sapiens
  source 1..574: mol_type = unassigned DNA
agcatccccggagagaagatagagccgccccacggccttcacaggagggggaggatcccttttcccccagaaattactcaatgctgaaacctctcaaagtggtattagagacgctgaaagcaccatggacgggttttatgatcagcaagtcccttttatggtcccagggaaatctcgatctgaggaatgcagagggcggcctgtgattgacagaaagaggaagtttttggacacagatctggctcacgattctgaagagctatttcaggatctcagtcaacttcaagaggcttggttagctgaagcacaagttcctgatgatgaacagtttgtcccagattttcagtctgataacctggtgcttcatgccccacctccaaccaagatcaaacgggagctgcacagcccctcctctgagctgtcgtcttgtagccatgagcaggctcttggtgctaactatggagaaaagtgcctctacaactattgtgcctatgataggaagcctccctctgggttcaagccattaacccctcctacaacccccctctcacccacccatcagaatcccctattt

SEQ ID NO: 6886 - DNA, 554 bp, Homo sapiens
  source 1..554: mol_type = unassigned DNA
gtgcgtgagcgcgcctgcgccgccggggccgctgcaaggggaggagagaggccgcctcaggaggatcccttttcccccagaaattactcaatgctgaaacctctcaaagtggtattagagacgctgaaagcaccatggacgggttttatgatcagcaagtcccttttatggtcccagggaaatctcgatctgaggaatgcagagggcggcctgtgattgacagaaagaggaagtttttggacacagatctggctcacgattctgaagagctatttcaggatctcagtcaacttcaagaggcttggttagctgaagcacaagttcctgatgatgaacagtttgtcccagattttcagtctgataacctggtgcttcatgccccacctccaaccaagatcaaacgggagctgcacagcccctcctctgagctgtcgtcttgtagccatgagcaggctcttggtgctaactatggagaaaagtgcctctacaactattgtgcctatgataggaagcctccctctgggttcaagccattaacccctcctacaaccccc

SEQ ID NO: 6887 - DNA, 573 bp, Homo sapiens
  source 1..573: mol_type = unassigned DNA
tttgcgggggcaggggggagatcggaaggggcgtccggccactggtccgacaggcccagccggctagagttcacgggctgattcagaatcttcaaagtcggggaggatcccttttcccccagaaattactcaatgctgaaacctctcaaagtggtattagagacgctgaaagcaccatggacgggttttatgatcagcaagtcccttttatggtcccagggaaatctcgatctgaggaatgcagagggcggcctgtgattgacagaaagaggaagtttttggacacagatctggctcacgattctgaagagctatttcaggatctcagtcaacttcaagaggcttggttagctgaagcacaagttcctgatgatgaacagtttgtcccagattttcagtctgataacctggtgcttcatgccccacctccaaccaagatcaaacgggagctgcacagcccctcctctgagctgtcgtcttgtagccatgagcaggctcttggtgctaactatggagaaaagtgcctctacaactattgtgcctatgataggaagcctccctctgggttcaagc

SEQ ID NO: 6888 - DNA, 564 bp, Homo sapiens
  source 1..564: mol_type = unassigned DNA
ctccgcagttgggaggagggggcgggaagcagtttgaggggaatgtctgagaggcgctgccccccagagcaccgggagggggtaaatgacacaggaggatcccttttcccccagaaattactcaatgctgaaacctctcaaagtggtattagagacgctgaaagcaccatggacgggttttatgatcagcaagtcccttttatggtcccagggaaatctcgatctgaggaatgcagagggcggcctgtgattgacagaaagaggaagtttttggacacagatctggctcacgattctgaagagctatttcaggatctcagtcaacttcaagaggcttggttagctgaagcacaagttcctgatgatgaacagtttgtcccagattttcagtctgataacccatttcttttcaaacttcctcaagagttcatgatcccttttcaattccaatttgttgccatcctttatagtcctgggtctctgtcatcatttagcaagtcagctgtgcaaagtggtgcttcatgccccacctccaaccaagatcaaacgggagctgcacagccc

SEQ ID NO: 6889 - DNA, 642 bp, Homo sapiens
  source 1..642: mol_type = unassigned DNA
gccgctggtgcgcggagcggttcaccgtcttcggagcggttcggcccagcctttcgcccaggcgcccaggcccgctgcgcgcgtgcgtgagcgcgcctgcgccgccggggccgctgcaaggggaggagagaggccgcctcaggaggatcccttttcccccagaaattactcaatgctgaaacctctcaaagtggtattagagacgctgaaagcaccatggacgggttttatgatcagcaagtcccttttatggtcccagggaaatctcgatctgaggaatgcagagggcggcctgtgattgacagaaagaggaagtttttggacacagatctggctcacgattctgaagagctatttcaggatctcagtcaacttcaagaggcttggttagctgaagcacaagttcctgatgatgaacagtttgtcccagattttcagtctgataaccgaaaaatgtcctgtttccccttatcctgattgcgtgatccagtgtgagcagcccttcatgataaaatccactgtggttgatgtaaggtcacagtagaggaagccgccctgtcatctctaatgagttgggagaacaagggtttccttagacctctttctcaatcttgaaaataaaaccaatagttgtctatcata

SEQ ID NO: 6890 - DNA, 472 bp, Homo sapiens
  source 1..472: mol_type = unassigned DNA
ttcaggatctcagtcaacttcaagaggcttggttagctgaagcacaagttcctgatgatgaacagtttgtcccagattttcagtctgataaccgtaagtacctttctggtgatggcacatttgttctgaaattgtttggtcttagatcatccatgtctagaatatgcttttttcagctatggccagatttagacagtagtatgcatttagtttcttctaataattcagaattaaccctgaaaacttttatttcataataaaattatttctaaagtatttctactgtattgcaggtaagatttactgaacataattttatcctaaatttctttttaccttaagaatattgtaaagctgactgggcacagtggctcacacctataatcccagggctttgggaggctgaggcaggtggatcacttgaggtcaggcattcaagaccagcctggccaatatggtgaaaccccgtctc

SEQ ID NO: 6891 - DNA, 187 bp, Homo sapiens
  source 1..187: mol_type = unassigned DNA
ggcctctttcagaaatctcgatctgaggaatgcagagggcggcctgtgattgacagaaagaggaagtttttggacacagatctggctcacgattctgaagagctatttcaggatctcagtcaacttcaagaggcttggttagctgaaggcaagtttcatggatgtcctattttccatataaaacatt

SEQ ID NO: 6892 - DNA, 589 bp, Homo sapiens
  source 1..589: mol_type = unassigned DNA
gcagcttctgcggggcttggcgccgccgtccgtgagcacccaggccgggaccccacatccccaggccagccctgaccccggcggcccctccgccgggattcctttccgaggtactggtgccggcccaagacccgggcagcgctttgtcgtgtccgcccctcagtgatcagctccgggtccccctgctcggccccgcgcgccccaagcgcagtccccggaagtgcgcgccggggccccagcaaagagtctgagaagccaactggggccaaacaagttttagaacctctactggctgatgccaacatcatcagagatgaactgttcttaccagaaacttctctgctcctgacaccccacctctccccagaagagaagaaggagagtggccacgttgattcagccaagcacctccaggaggtcccctctggatgtcccatgaggctgcccctcagccacagcccagagcacgtggagatggctttgctcagcaacatcctagcggcctattcctttgtctcaggtgtgtctttgagaagatgagaagatcgcagacctgtattctaaactggaatggttctaaagaaaaggt

SEQ ID NO: 6893 - DNA, 479 bp, Homo sapiens
  source 1..479: mol_type = unassigned DNA
gactcgggctcctgcagcttctgcggggcttggcgccgccgtccgtgagcacccaggccgggaccccacatccccaggccagccctgaccccggcggcccctccgccgggattcctttccgaggtactggtgccggcccaagacccgggcagcgctttgtcgtgtccgcccctcagtgatcagctccgggtccccctgctcggccccgcgcgccccaagcgcagtccccggaagtgcgcgccggggccccagcaaagaagagaagaaggagagtggccacgttgattcagccaagcacctccaggaggtcccctctggatgtcccatgaggctgcccctcagccacagcccagagcacgtggagatggctttgctcagcaacatcctagcggcctattcctttgtctcaggtgtgtctttgagaagatgagaagatcgcagacctgtattctaaactggaatggttctaaagaaaaggt

SEQ ID NO: 6894 - DNA, 1802 bp, Homo sapiens
  source 1..1802: mol_type = unassigned DNA
cggggcttggcgccgccgtccgtgagcacccaggccgggaccccacatccccaggccagccctgaccccggcggcccctccgccgggattcctttccgaggtactggtgccggcccaagacccgggcagcgctttgtcgtgtccgcccctcagtgatcagctccgggtccccctgctcggccccgcgcgccccaagcgcagtccccggaagtgcgcgccggggccccagcaaagagtctgagaagccaactggggccaaacaagttttagaacctctactggctgatgccaacatcatcagagatgaactgttcttaccagaaacttctctgctcctgacaccccacctctccccagaagagaagaaggagagtggccacgttgattcagccaagcacctccaggaggtcccctctggatgtcccatgaggctgcccctcagccacagcccagagcacgtggagatggctttgctcagcaacatcctagcggcctattcctttgtctcagaaaatcctgagcgagcagctctgtactttgtttctggcgtgtgcatcgggctggtgctgaccctggctgctctggtgataaggatctcttgccacacagactgcaggcggcgtcccgggaagaagttcctgcaggacagagagagcagcagcgacagcagcgacagcgaggatggcagtgaggacaccgtgtccgatctctccgtgcggagacaccgccgcttcgagaggactttgaacaagaatgtgttcacctctgcggaggagctggagcgcgcccagcggctggaggagcgcgagcgcatcatcagggagatctggatgaatggccagcctgaggtgcccgggaccaggagcctgaatcgctactattagggagcagcaggaccccggaaaccactggaggccgcctggaaaggagagcgtctgcagggacagtgggcacaaggaactgaacccagctctgctaatattgtgatttcagagaaaaagcaggacatgccccttttctagccaggaggattgctcctttttggccaaatgtatggagaagtagaaaaatcaaagcagttcatcaccctttccaggtctcggaatggtgctgaaaaatcctctccaacactgtggatggagatcggagaaacgcgactgtggtttctcttgatttctgaggatctcagaagtttcagcagacttccttgctctgtgttattcctttgcaaaaggaaagatcattatagcatgagggctgggaatagcagggtgaacttaacccaataaatgcaatttcctaaatgacttcatgctatggaggtgattctgattcaaatagcatgatccatgcttattatttaaggctgatttttaaaatcttgtgttgcaagggcaacctcgtccattttaactggcacctcagggattaaaatcctactttttagtgtagttcccacctcattcatgaaaatgaatagaactattgtattatgggagatgtgtcagtgaactagaaaatgtcaataacctcaaaggatgaagggtttttattttaaatagtttataaaatatatattgacatgcatatttgaaaatgctgcataaaaataaaagtggtgtgttttccccctctttggagacaagaaaattttattatgactctagataattgtgattttaaacactttgtttttttttttttttttaattggatttcaaagaaaagaatggaaatgagaggtaaggattaaagccaaagttaggatgggaattaaaaaaataaacattacataaaatctt

SEQ ID NO: 6895 - DNA, 1747 bp, Homo sapiens
  source 1..1747: mol_type = unassigned DNA
ctgactcgggctcctgcagcttctgcggggcttggcgccgccgtccgtgagcacccaggccgggaccccacatccccaggccagccctgaccccggcggcccctccgccgggattcctttccgaggtactggtgccggcccaagacccgggcagcgctttgtcgtgtccgcccctcagtgatcagctccgggtccccctgctcggccccgcgcgccccaagcgcagtccccggaagtgcgcgccggggccccagcaaagtgcaggtaggtagatcgctgaccacatttgctcatttctggattattcattcaaaggaagcactatgagtcaatcattgggcacagagagtctgagaagccaactggggccaaacaagttttagaacctctactggctgatgccaacatcatcagagatgaactgttcttaccagaaacttctctgctcctgacaccccacctctccccagaagagaagaaggagagtggccacgttgattcagccaagcacctccaggaggtcccctctggatgtcccatgaggctgcccctcagccacagcccagagcacgtggagatggctttgctcagcaacatcctagcggcctattcctttgtctcagaaaatcctgagcgagcagctctgtactttgtttctggcgtgtgcatcgggctggtgctgaccctggctgctctggtgataaggatctcttgccacacagactgcaggcggcgtcccgggaagaagttcctgcaggacagagagagcagcagcgacagcagcgacagcgaggatggcagtgaggacaccgtgtccgatctctccgtgcggagacaccgccgcttcgagaggactttgaacaagaatgtgttcacctctgcggaggagctggagcgcgcccagcggctggaggagcgcgagcgcatcatcagggagatctggatgaatggccagcctgaggtgcccgggaccaggagcctgaatcgctactattagggagcagcaggaccccggaaaccactggaggccgcctggaaaggagagcgtctgcagggacagtgggcacaaggaactgaacccagctctgctaatattgtgatttcagagaaaaagcaggacatgccccttttctagccaggaggattgctcctttttggccaaatgtatggagaagtagaaaaatcaaagcagttcatcaccctttccaggtctcggaatggtgctgaaaaatcctctccaacactgtggatggagatcggagaaacgcgactgtggtttctcttgatttctgaggatctcagaagtttcagcagacttccttgctctgtgttattcctttgcaaaaggaaagatcattatagcatgagggctgggaatagcagggtgaacttaacccaataaatgcaatttcctaaatgacttcatgctatggaggtgattctgattcaaatagcatgatccatgcttattatttaaggctgatttttaaaatcttgtgttgcaagggcaacctcgtccattttaactggcacctcagggattaaaatcctactttttagtgtagttcccacctcattcatgaaaatgaatagaactattgtattatgggagatgtgtcagtgaactagaaaatgtcaataacctcaaaggatgaagggtttttattttaaatagtttataaaatatatattgacatgcatatttgaaaatgctgcataaaaataaaagtggtgtgttttccccctc

SEQ ID NO: 6896 - DNA, 696 bp, Homo sapiens
  source 1..696: mol_type = unassigned DNA
attctcagtaaagacacactacgtaatcaaagctactgctctgctttgctgagctttgagatgaaaggtctccaggttgggagttaagcttgtcattctctaatttgaaaaatgaagggttctaagagctttgtcttgcagaaaatgtttagctgctcaaaaaatcctgagcgagcagctctgtactttgtttctggcgtgtgcatcgggctggtgctgaccctggctgctctggtgataaggatctcttgccacacagactgcaggcggcgtcccgggaagaagttcctgcaggacagagagagcagcagcgacagcagcgacagcgaggatggcagtgaggacaccgtgtccgatctctccgtgcggagacaccgccgcttcgagaggactttgaacaagaatgtgttcacctctgcggaggagctggagcgcgcccagcggctggaggagcgcgagcgcatcatcagggagatctggatgaatggccagcctgaggtgcccgggaccaggagcctgaatcgctactattagggagcagcaggaccccggaaaccactggaggccgcctggaaaggagagcgtctgcagggacagtgggcacaaggaactgaacccagctctgctaatattgtgatttcagagaaaaagcaggacatgccccttttctagccaggaggattgctcctttttggc

SEQ ID NO: 6897 - DNA, 777 bp, Homo sapiens
  source 1..777: mol_type = unassigned DNA
cgggacaggaatgagaggatggatgctggcaggggcttggagagtctgagaagccaactggggccaaacaagttttagaacctctactggctgatgccaacatcatcagagatgaactgttcttaccagaaacttctctgctcctgacaccccacctctccccagaagagaagaaggagagtggccacgttgattcagccaagcacctccaggaggtcccctctggatgtcccatgaggctgcccctcagccacagcccagagcacgtggagatggctttgctcagcaacatcctagcggcctattcctttgtctcagaaaatcctgagcgagcagctctgtactttgtttctggcgtgtgcatcgggctggtgctgaccctggctgctctggtgataaggatctcttgccacacagactgcaggcggcgtcccgggaagaagttcctgcaggacagagagagcagcagcgacagcagcgacagcgaggatggcagtgaggacaccgtgtccgatctctccgtgcggagacaccgccgcttcgagaggactttgaacaagaatgtgttcacctctgcggaggagctggagcgcgcccagcggctggaggagcgcgagcgcatcatcagggagatctggatgaatggccagcctgaggtgcccgggaccaggagcctgaatcgctactattagggagcagcaggaccccggaaaccactggaggccgcctggaaaggagagcgtctgcagggacagtgggcacaaggaactgaaccca

SEQ ID NO: 6898 - DNA, 569 bp, Homo sapiens
  source 1..569: mol_type = unassigned DNA
gagtagctgaatacaggctcaaagcaggcgacgggacaggaatgagaggatggatgctggcaggggcttggagaagagaagaaggagagtggccacgttgattcagccaagcacctccaggaggtcccctctggatgtcccatgaggctgcccctcagccacagcccagagcacgtggagatggctttgctcagcaacatcctagcggcctattcctttgtctcagaaaatcctgagcgagcagctctgtactttgtttctggcgtgtgcatcgggctggtgctgaccctggctgctctggtgataaggatctcttgccacacagactgcaggcggcgtcccgggaagaagttcctgcaggacagagagagcagcagcgacagcagcgacagcgaggatggcagtgaggacaccgtgtccgatctctccgtgcggagacaccgccgcttcgagaggactttgaacaagaatgtgttcacctctgcggaggagctggagcgcgcccagcggctggaggagcgcgagcgcatcatcagggagatctggatgaatggccagcctgaggtgcc

SEQ ID NO: 6899 - DNA, 434 bp, Homo sapiens
  source 1..434: mol_type = unassigned DNA
gaacccgatgggctgtgcctcaaaggtgaaccagggagaatcaaataaagagttccagaagtgaagagaagaaggagagtggccacgttgattcagccaagcacctccaggaggtcccctctggatgtcccatgaggctgcccctcagccacagcccagagcacgtggagatggctttgctcagcaacatcctagcggcctattcctttgtctcagaaaatcctgagcgagcagctctgtactttgtttctggcgtgtgcatcgggctggtgctgaccctggctgctctggtgataaggatctcttgccacacagactgcaggcggcgtcccgggaagaagttcctgcaggacagagagagcagcagcgacagcagcgacagcgaggatggcagtgaggacaccgtgtccgatctctccgtgcggagacaccgc

SEQ ID NO: 6900 - DNA, 585 bp, Homo sapiens
  source 1..585: mol_type = unassigned DNA
aaaaaggttgacatggctgaagcagaagatgggttggtactgaatggttgggagagatatgtagcggctgaccctgaaggacgttgcagcccatgctatggagacctgattttattttgtaagaggtgggcaacccctgaagcattttagtgatgcgaacagatgtgtctgttaccaagcaaagccagttaaagaaggtcacagaggaggaatgatcacaaagtgcaggtaggtagatcgctgaccacatttgctcatttctggattattcattcaaaggaagcactatgagtcaatcattgggcacagagagtctgagaagccaactggggccaaacaagttttagaacctctactggctgatgccaacatcatcagagatgaactgttcttaccagaaacttctctgctcctgacaccccacctctccccagaagagaagaaggagagtggccacgttgattcagccaagcacctccaggaggtcccctctggatgtcccatgaggctgcccctcagccacagcccagagcacgtggagatggctttgctcagcaacatcctagcggcctattcctttgtctc

SEQ ID NO: 6901 - DNA, 524 bp, Homo sapiens
  source 1..524: mol_type = unassigned DNA
ctgaatacaggctcaaagcaggcgacgggacaggaatgagaggatggatgctggcaggggcttggagcttctgcggggcttggcgccgccgtccgtgagcacccaggccgggaccccacatccccaggccagccctgaccccggcggcccctccgccgggattcctttccgaggtactggtgccggcccaagacccgggcagcgctttgtcgtgtccgcccctcagtgatcagctccgggtccccctgctcggccccgcgcgccccaagcgcagtccccggaagtgcgcgccggggccccagcaaaggtcctgactttttggaatgcccttcttcctccttggctggcaatcaatctttgagactagaagttaagtctccttttgggtgaagcatcattcttcagttcctacagaccattttgttgctccctgccctgccccaggttgggggaaagcctcagcctcagcctcagcctcccctctcccctccttttttttaaaaaataaatatgtatctcttgca

SEQ ID NO: 6902 - DNA, 1815 bp, Homo sapiens
  source 1..1815: mol_type = unassigned DNA
agcataacctgtttgtgaaactgcaaaaaggttgacatggctgaagcagaagatgggttggtactgaatggttgggagagatatgtagcggctgaccctgaaggacgttgcagcccatgctatggagacctgattttattttgtaagaggtgggcaacccctgaagcattttagtgatgcgaacagatgtgtctgttaccaagcaaagccagttaaagaaggtcacagaggaggaatgatcacaaagagtctgagaagccaactggggccaaacaagttttagaacctctactggctgatgccaacatcatcagagatgaactgttcttaccagaaacttctctgctcctgacaccccacctctccccagaagagaagaaggagagtggccacgttgattcagccaagcacctccaggaggtcccctctggatgtcccatgaggctgcccctcagccacagcccagagcacgtggagatggctttgctcagcaacatcctagcggcctattcctttgtctcagaaaatcctgagcgagcagctctgtactttgtttctggcgtgtgcatcgggctggtgctgaccctggctgctctggtgataaggatctcttgccacacagactgcaggcggcgtcccgggaagaagttcctgcaggacagagagagcagcagcgacagcagcgacagcgaggatggcagtgaggacaccgtgtccgatctctccgtgcggagacaccgccgcttcgagaggactttgaacaagaatgtgttcacctctgcggaggagctggagcgcgcccagcggctggaggagcgcgagcgcatcatcagggagatctggatgaatggccagcctgaggtgcccgggaccaggagcctgaatcgctactattagggagcagcaggaccccggaaaccactggaggccgcctggaaaggagagcgtctgcagggacagtgggcacaaggaactgaacccagctctgctaatattgtgatttcagagaaaaagcaggacatgccccttttctagccaggaggattgctcctttttggccaaatgtatggagaagtagaaaaatcaaagcagttcatcaccctttccaggtctcggaatggtgctgaaaaatcctctccaacactgtggatggagatcggagaaacgcgactgtggtttctcttgatttctgaggatctcagaagtttcagcagacttccttgctctgtgttattcctttgcaaaaggaaagatcattatagcatgagggctgggaatagcagggtgaacttaacccaataaatgcaatttcctaaatgacttcatgctatggaggtgattctgattcaaatagcatgatccatgcttattatttaaggctgatttttaaaatcttgtgttgcaagggcaacctcgtccattttaactggcacctcagggattaaaatcctactttttagtgtagttcccacctcattcatgaaaatgaatagaactattgtattatgggagatgtgtcagtgaactagaaaatgtcaataacctcaaaggatgaagggtttttattttaaatagtttataaaatatatattgacatgcatatttgaaaatgctgcataaaaataaaagtggtgtgttttccccctctttggagacaagaaaattttattatgactctagataattgtgattttaaacactttgtttttttttttttttttaattggatttcaaagaaaagaatggaaatgagaggtaaggattaaagccaaagttaggatgggaattaaaaaaataaacattacataaaatctt

SEQ ID NO: 6903 - DNA, 887 bp, Homo sapiens
  source 1..887: mol_type = unassigned DNA
acctccggaaaccgtagattccgggcggtcggagccgccgggagctgtagttctcccgcggctcagagaagtaggcagagagcggacctggcggccgggcagcatggcggggctggagctcttgtcggaccagggctaccgggtggacgggcggcgcgccggggagctgcgcaagatccaggcgcggatgggcgtgttcgcgcaggctgacggctcggcctacattgagcagggcaacaccaaggcactggctgtggtctacggcccgcacgagatccggggctcccgggctcgagccctgccggacagggccctagtgaactgtcaatatagttcagcgaccttcagcacaggtgagcgcaagcgacggccacatggggaccgtaagtcctgtgagatgggcctgcagctccgccagactttcgaagcagccatcctcacacagctgcacccacgctcccagattgatatctatgtgcaggtgctacaggcagatggtgggacctatgcagcttgtgtgaatgcagccacgctggcagtgctggatgccgggatacccatgagagactttgtgtgtgcgtgctcagctggcttcgtggacggcacagccctggcggacctcagccatgtggaggaagcagctggtggcccccagctggccctggccctgctgccagcctcaggacagattgcgctgcttgagatggatgcccggctgcacgaggaccacctggagcgggtgttggaggctgctgcccaggctgcccgagatgtgcacaccctcttagatcgagtggtccggcagcatgtgcgtgaggcctctatcttgctgggggactgaccacccagccacccatgtccagaataaaaccctcctctgcccacac

SEQ ID NO: 6904 - DNA, 606 bp, Homo sapiens
  source 1..606: mol_type = unassigned DNA
gggcggtcggagccgccgggagctgtagttctcccgcggctcagagaagtaggcagagagcggacctggcggccgggcagcatggcggggctggagctcttgtcggaccagggctaccgggtggacgggcggcgcgccggggagctgcgcaagatccaggcgcggatgggcgtgttcgcgcaggctgacggctcggcctacattgagcagggcaacaccaaggcactggctgtggtctacggcccgcacgagatccggggctcccgggctcgagccctgccggacagggccctagtgaactgtcaatatagttcagcgaccttcagcacaggtgctacaggcagatggtgggacctatgcagcttgtgtgaatgcagccacgctggcagtgctggatgccgggatacccatgagagactttgtgtgtgcgtgctcagctggcttcgtggacggcacagccctggcggacctcagccatgtggaggaagcagctggtggcccccagctggccctggccctgctgccagcctcaggacagattgcgctgcttgagatggatgcccggctgcacgaggaccacctggagcgggtgttggaggctgctgc

SEQ ID NO: 6905 - DNA, 1065 bp, Homo sapiens
  source 1..1065: mol_type = unassigned DNA
tgcttagcgcatgagtgtgggagctctgctttccaggcggagggaaccagaagggcgaagaccacggtggtgaaaacaagcaaggcacttatgcagagcagaaagactgctggtggggaaagaggggataactccaaatcaggttgagggttcccggggaggtgaggacttagggttttgtagagtagggaaatgatttgggatcttatttcatatgtaatgtgaaacctttgtaaggtagttaggatttgagtgtgtaggtgagacagaagcagcgttgatgtttgtaaacttgggttggcagggaatggggcaaggatggacacaaggaagccaattaaaaggtgccagagggcgacacatgcaagacagagagcgcaaaacagggggctttgttttggaggtaacgcagttgccccttgctgaggcattgaaagtggagggagaggcagacccacagaggacagtggagtgtgagctggaaggagtgggcctggctcatgtgtctgtcctcttccagatccggggctcccgggctcgagccctgccggacagggccctagtgaactgtcaatatagttcagcgaccttcagcacaggtgagcgcaagcgacggccacatggggaccgtaagtcctgtgagatgggcctgcagctccgccagactttcgaagcagccatcctcacacagctgcacccacgctcccagattgatatctatgtgcaggtgctacaggcagatggtgggacctatgcagcttgtgtgaatgcagccacgctggcagtgctggatgccgggatacccatgagagactttgtgtgtgcgtgctcagctggcttcgtggacggcacagccctggcggacctcagccatgtggaggaagcagctggtggcccccagctggccctggccctgctgccagcctcaggacagattgcgctgcttgagatggatgcccggctgcacgaggaccacctggagcgggtgttggaggctgctgcccaggctgcccgagatgtgcacaccctcttagatcgagtggtccggcagcatgtgcgtgaggc

SEQ ID NO: 6906 - DNA, 10187 bp, Homo sapiens
  source 1..10187: mol_type = unassigned DNA
attattggctgtgggatcaagttcgtgaaactggtcttgtacaggttgaaaaatgccttcctaacaggaggcgccaaggagcttaagtgtaactcacacacagtaaagaaaatgacgaaagttcctccggcgtttgatttcagtttcttaaatgacgaagaggccaggaagatccttcaggtgctggaaaggaatgaggagttacagagggccgagaaggacaggatcagcaaacttcagaagacaaagagggatatcagatggcttcagggagtgactggtgaatggtttgaagaaattcaaagaaaaaagttttgcaatgaaacagatgttagccaaatgttaaaacaaccacttacatacaggctaagtaaggagatggcaaaaaatgatccgatagaattacctacatcaagatctaaaaatgtaactaatcaaaaaaagccgacacctttttcttcccggatgagcttcagatcgtcatttgcttccctgttctcattcaggaaatctggaaaggagacttcaaagcttccatcactgggacagaaaggatgtgatggccatgcaggacctcctatgcctgtgaggggagctgctgtgcaggcaaaaatatacaattcacctctggaaaatcatctagttgacagtacatttgtcccaaagccagcagtcatgagggaggagagtggcatgcctccaccgtgggatgcttcactgctggagaatgagtttttccaagttttagatgacttggatagcaaattggctcaggaacagtctgcaagctcagtgaataccagaacacccctcaactatggatcaagaacacagttcggtcacttttattccagtggtaacagacatggtaatatcacagaaaggcacaaaaaacactataatgaaacttccaatatgtctatctatgacatcctaagaccaggaactcctagggaaggttttaaaaccttttctcctaggacaagcacaatttatgatatgtataggacaagggagcccagagtctttaaagaagattatgtgcaaaagaatacttttggcagtacttcgctgtgttttgacagcaggcaacggtcggccttaccagccacagggcatttcacagcaagaagcttacattttccagccacaactcagagcaagagtgggtttataccaccaaggcaccagcagagtccaaagagaactcctttatcatccatcatatggaacagatcagattcctctagagacagggagaaccaggaagagttcctgagggcaccatcaccaatggaaattgatcccgctgacaagtatgtgtatcccaggggttttcaggagaataagagatatgaatcgtaccattcacagaatgtttaccaacgtgttagtttaaatgctcccatggagaatgcaatgagtcccgacacttttgagaactcagagaacatgccattctaccatcaaagcaacacatttaccagatctttcttcagcaatacctttggacgaagcggagaacagaggagatttggacaaggtcctttttggggccaagagaaaggacattctttctggtctgactttcatcgaagcaggaaatcattcagttcttctgacagagactttgaaatgatttccatggaagcaaatagtgtatcagccattcatggccataatgtttcttctgaacactgggaatcattttcttctggttatggaacagatgtttccagaggccaagaagagccacatccttggcagtttgattttcagagatccacactggatagcatggtggtatcacatggtaatgagacccagttgactcctcattttggcacaccaaatgtttgctccatgactggttcaagctatcacgtcaaatctagtgagttggtaagtcaacaggacagttctcctgtagaagtacatataaacaaagaagcttcctcatttggaattgctcagactctagcatcctcattcaaaacttccttttcccagatttctgatgacagaaggaatcctcagagtcccaacttgcagaatcccacagtcactttgcagaaaatttttccaaataagcctgcctctcatccaatgagaagccatacagaagtcactgtgaccagcagcaattcagttgactctctgcctcttgccaaaagccagcccaatatcttggtcacagaagtaaataatgagaaagacttaaatgaatctatttcagaagaagacaaacagctaagcaagatggaccagacaaacaaggcaggtgaaataccccaacctgtttcacagacagggatctcaaactctttacctgattttcaaaatcccttatcccaggactcagccaagagcaacgggtttggttttaatgcatctaccataataagttcaaaaaagtcacccagagtcttttccaggaaagatacctccaaaatgtatataccgcacacagataaatccaatgacattaaacaagataagaggtttactgaaaacagaaaacttggctcaacagcttcccttcctttcattcaggaacacagaacaccaccatctttccccaggacagaccaaggttgtcaccaggaattaactgtaaataatgaagatatttcaagaattattacaaataaccactggagctctgcactgactgatactcaaaatgcacaatactcaaaatgcaagttaactcctggccacaagacctcgtgtgattctttagatctgtcatcagctgcactaccagattcctcaccatcaaagaattcttcccttgatgctcctgtggttccatctactacagtgttctccaggagaagtccttcagacaaagatccatcgctaggagaaagagaagaaaaagacaatgctgggaagaaccaaaagaatcagtttattgtaagccactcagaaaaccaagagagaaatgatagtcctgtgcctacacatgatgaagtggttgatgtcaaatgccattcacactctccttttaggaatgaaagaggaaaaggaaaaataaggcatcatatatcctgtattgaaaagttaagcaaaacagaaagtatatcagtacccaccagtgatcacaggagcctcattgaagcaaatcaaagcaattccaaagtttctgaacttgacacaatttattgtaccttgccaagaaaatcaagcagttttctcatacatggcaggcagtcaggaagtaaaataatggctgcttcattgaggaatgggccacctcccttccaaatcaaaaataatgtggaagatgcaatggggaactatatgttaaacaaatttagtcccagttctcctgagtcagcgaatgaatgttccaaagtcctttcagactcagccctggaagcacctgaagccacagagagaatgacaaatgtaaaaagcagtggatctacttccgttagaaaaggaccacttccattcctcatcaacagggctatgtcatgtccctcaggggagccacatgcctcaactggaagagaaggaagaaaaaagccattgacctcaggcatggatgcttctgagctaacaccaagggcttgggagagaatcattagccctgtggaaagtgactcatctgttagagattgttctttaaccaaaagacaacaccaaaaggaaaacttccaagaatacactgagaaagagggtaaaatggctgcctccaggagaagtgtatttgctctttcaaatgaagaccctttacctttttgctcagacttgtcaggaaaagaacgtgggaaaacattacataaagttaagacgactagtacgttttctgtttctggtgatgaagataatgtaaaatgtctggaggtggtctcaatatattacactctaccgaggaaacccagcaaaaaattctgtaacctccttcaacagtatacacaaaatactaatttacttatagaatcacctcaagtggagactgaaacatttcctaacgctttagaaaaagacaaacagaattattctacacgagagcagtcaggaacaccttcatgtgaaaatctaaagatgtccgtcaactctgatcagacgctcaccactgaaaatatgactgccttccgattatcaaatagggggcccctagctcctacattacaggaaatggcttctgttgaggcagctgtttctcttcctgaagaggaatctaaagctagagagattttttcagataatttagctaaaacacctctaggtgattcagaaaacaagaaggaaagaggcaaaaagttgcaaagtgaaaccctgcatacttcattgatgcttcagagaaaaaatgtatccgaagaaaaatctgaaaattgtcaacaatccattaattcaagtaacagtggtccctctagtcttccagctctttcagaagttaatattggaaattcccaaactagaagaagttcttgggagtgtacagggagtggtagagccattccatttactggaagtggcaagtgtccccagaaagatcacacatccacagctgtaggtgatggctccagtggatcacagcctagggaaggcagaggggacattggaaccaactgccaaaaaatgactaataaaacactttctcactcagagagtcaagtctttgcccttactccagcattgcataaactacagcttggtgaggagactcagtcagatgaaccaaacttagagagtctgcagtctgaaccaagagaattacctcaaagaagtcaggaggcaaatatgacagagagcaggaaggctgaagatgaaatgcagaagtcagcttgggatcaaccttcacttcctgaaggaaacaaaaataaaaccaacttggatgacctagtaaagggggaaaatagatcttcagttaaacacagattggcagccatgtctaaagccagcagaaaattcccagctaaagatgtaagccccagaagacatgtagctactatcttcccccaaagtggaagcagatctggctttgaccatttatctcttggcacagtggagtgcaacccactgttccctgagcctactccaaaatctgcagagtccattggcgaaagcaggttgagtgagaacggaaagcatgtgaagaaatccgagaaccttctccccattactgtactacccaacagagaaccttctacacacgtcagcaaccagaagtctaacagcatttcacaacgacatcagaatgagtttaaaaacgtctcagaatcaccatcaaagcatgagaattctaaagacgtcacagcagctcagaatttagtaagagaatcaggagccccatcacccatcacattcaccagcctcagggaagcagaattctctgacaatcagaggaggctgagccctccttttccactggagcctgcacagaaatctagagtaagcagtccactggccagttttctgcagcaacaaaggagtgcttcatctctggagtgggaacctgagccacacctctatcgttcaaagagtttaaaaagcattaatgttcatggcgatctactacgaaaaagccatcctccaaaagtcagggagcgccatttttctgaaagcacttctattgacaatgccctgagtcgactgacccttgggaatgaattctctgtcaacaatgggtacagtcgaagattcagatctttttctgaactcccctcctgtgatggaaatgaaagttgggcttatcgcagcgggacaaaaacaggtcccaggtctgcaatatctatatacagacctatcgactatgggatctttgggaaagaacaacagttagctttcttagaaaatgtaaagaggtcacttacacaaggaagattatggaaaccaagttttcttaagaaccctggcttcctaaaagatgatttgaggaaccctcccaacccctcagagtcattaagctcaaattctcccagtagtcaggtgccagaagatggcttatctccaagtgaaccgcttaatatctatgaggatgacccagtggactcagattgtgacacagacacaaccacagatgatgaatactacctggatgaaaatgacaaagagtcagaactgtgaggctttttcaataaaatgctttacttttttcaccaaaagcttataatggaactaaggtgtacatgtgcatgtgcatggaaggataaaagatctagtctgggcagtgtctgctctgaaatgtcccacatctccttttttttcctccacaccctatatagacacttcctgaatgctagaacaatgaattcttgttttgagagagtctctgctattttctatctctgtaaatgttcttagcctgcctttccaccactcccacttaatccctgattcactgtctgatttgggctttctgctttacttccctcctaacatttttcatctttaattgtgatttacaaccctaatatcccaggcacatacaaaacttatgaattacccagcacaactgtgaaactctgtattgcttcttccggtccacaccctatactcatgacattaaataaaaggtagggatgataacagtggggtaaatattatcatcctgtttgactcatgaacatttaggaagtttaaggtggtgatcttctctttcaaacaaagataaaggaatttattttttaacctgagaaactgattgcaaaaaggaaaaaaaaaagataaaggaattttgtaagtacttcctgttatatccgtagtggagcctgggaggcacatggtcaaagcacatgttgaggttatagattaggacctgaatccctagtaagccaatagaaggttagcagtcctagaaattcctctgaaaccgtgggggactggctggattattaagggcttttagtcaagccaaggacttaggccaggcaacctgaccatacagaaagttgcctggtcacagaatttctgcttatgaagagaacatagctgaggagcagaggtaggaagtaggtatcccttcatgggaccgacttacctttactgcagttctctcagcaactggcttttcccatttcctcagaactatccattttcacattttcttttttttgtttttgttttttgtttggttttgttttgtttttgttttttggagacggagttttgctctgtcacccaggctggagtgcagtggcatgatctgggctcactgcaacctccgcctcccgggttcaagcgattctcctgcctcagcctccagagtagctgggatcacaggcgcacccaggcgcacgctgccacgcccagctaatatttttgtattttagtagagacggggtttcaccgtgttgcccaggctggtctcgaactcctgagctcaggcaatccgcccacttcagcctcccagagtgctaggattacaggcatgagctaccatgcccagtctttttttgttttgttttgtttttgtttttgttttgaggtggagtcttgttcttgttgctcaggctagagtgcaatggcatgatctcagcttactgcaacctcctcctcccaagttcaggcaattctcctgcctcagcctcccaagtagctgggactacaggcacccaccaccacacctggctaatttttttttttttttttttttttttggtatttttagtagagttggagtttcaccaggttggccaggctggtctcaaacttctgacctcaggtgatctgcccacctcggcctcccaaactgctgggattacaggcatgagccaccgtgcctggcccacattttctttaattgcaaggtagaacgcttcttttcaggtggggcattttagtcccaaatatcaagtgggaaccttggccaagtccctaaaatgccatcaagtcagatctgacaccctggaattcattctttgctgcaggatcatctacgaaacccttgggaaattctaaggcagagctcctaagggcttgtcactatgattcagtgatttatctagagtaaatcacttatgatacccactgatattttggctttcctaactctttatttgccatgcagaacctcgggggatttctctcctaattcaggataaagaccaatagatggcagtgaagataatctgctttaactacagacagcatggattcctggatctcaatactatgatagtcaacatgagtggattttatcttgcttggtttatatttgcttcgcgacctaatctaattttccattttttatacctagtctgtttcatcattataaactaagaataatgatagatgttggtgaagtgtatagagatctggaactgatagagagttaagaaagaactatgttgttgttatccttctaatcattcccttacatagacgcaaaatgcgtgggttactttacatggttcccatgcaactcaaagctaatgaacatgcggtaactaacatgaaagctattccctaaatctgtcaactattttaaacttcaagctctgaccaatcctgagctcagaaagctcaaaaatcaaatattgtgaacttttcaatgcaaatttgtatggtaaagaataaataacactatttcttggttaatatatgtttgtaaattctgcctttcctctttttctatttatctgattattattattattattattattttctttgagacagagtctcactctgttgcccaggctggagtgcaatggcgcaatctcggctcactgcaacctccgcctcccaggttcaagcgattctcctgcctcagcttcccgagtagctgggattacaggtgcccaccaccacgcccagctaatttttgtatttttagcagagacggggtttcgccatgttggccaggctggtttcgaactcctgacctcaggtgatccgcctgcctcagcctcccaaactgctgggattataggcatgagccacctcgccagccctatttatctgattatttaagtaaaactttaataaaccatgacctacattttctatgcaattttaagatactcagagttaatattttaatattgaggttcttgatttttttaatgatcagctttcaaattatatttcagtatatactctgagtctacgtgtatgctacaaaaggtgaaatgaagttagcttatttttcagtgagtttaggctatattaagagttaggtaagttaggtaagggtgaaactgctttggggcccagactgcgctggaatgtactgtttaaattcaaaggtaattgatggccagtgttcagttgctctatttgtaacgtttgcatgttggtctggctgaagtatcaggaaaacacaaaattcatgaaaatagcaccttttataattttatacttttataaagcacttgttaaagaagtatagcaaatttctatgtattttaacatacaagtcgctgcattttaatgttcatttttggtatagctatggtaacttataatagtcatttttatattcataacttgttttctgaaagatatagtcattattaaaataaacattcatgtaaatggagtaaatcataggggaatcaatcgtaataaataccttataaattataaacttgtttagatactagatttctataaccataaattttatactgtaaagtctgtttaaaatagggtttaatgaagttattttaatttttagagactcccctctaaataatttactcctacattgtaaatacattgatgccaacaaaattccaactgctactaacaaaggtttggttggtgataagctaataacagctactttgtgtaggaggtaaatatgtgtactggagggggtaaaaatccatttaggttatggcaaagatgggaatcaaactgtaaaactcatagccccataaaattaatattctttgttaagtgccagagggtttaagagaacttcttgcttagagtttattgataataataatgcttcagaatatcccatttaaatgtacagtgtaaatatgtaaaatattttacttcccaggcaagtttgtggctgtattgccacttagtggctctttgtgactggcagttctgtatatctgaaacaaataagctgtaagcacttttgttaaaactttgtcaaataatccttttatgtacttgttctcagacctgttctctggttatgaaatgtgttaaagacaaggtgcaaatttaaaacaatgcctgtattgaaataaatgacttaaacagatgca

SEQ ID NO: 6907 - DNA, 6542 bp, Homo sapiens
  source 1..6542: mol_type = unassigned DNA
gaaacatgtcattaagtttcttaaatgacgaagaggccaggaagatccttcaggtgctggaaaggaatgaggagttacagagggccgagaaggacaggatcagcaaacttcagaagacaaagagggatatcagatggcttcagggagtgactggtgaatggtttgaagaaattcaaagaaaaaagttttgcaatgaaacagatgttagccaaatgttaaaacaaccacttacatacaggctaagtaaggagatggcaaaaaatgatccgatagaattacctacatcaagatctaaaaatgtaactaatcaaaaaaagccgacacctttttcttcccggatgagcttcagatcgtcatttgcttccctgttctcattcaggaaatctggaaaggagacttcaaagcttccatcactgggacagaaaggatgtgatggccatgcaggacctcctatgcctgtgaggggagctgctgtgcaggcaaaaatatacaattcacctctggaaaatcatctagttgacagtacatttgtcccaaagccagcagtcatgagggaggagagtggcatgcctccaccgtgggatgcttcactgctggagaatgagtttttccaagttttagatgacttggatagcaaattggctcaggaacagtctgcaagctcagtgaataccagaacacccctcaactatggatcaagaacacagttcggtcacttttattccagtggtaacagacatggtaatatcacagaaaggcacaaaaaacactataatgaaacttccaatatgtctatctatgacatcctaagaccaggaactcctagggaaggttttaaaaccttttctcctaggacaagcacaatttatgatatgtataggacaagggagcccagagtctttaaagaagattatgtgcaaaagaatacttttggcagtacttcgctgtgttttgacagcaggcaacggtcggccttaccagccacagggcatttcacagcaagaagcttacattttccagccacaactcagagcaagagtgggtttataccaccaaggcaccagcagagtccaaagagaactcctttatcatccatcatatggaacagatcagattcctctagagacagggagaaccaggaagagttcctgagggcaccatcaccaatggaaattgatcccgctgacaagtatgtgtatcccaggggttttcaggagaataagagatatgaatcgtaccattcacagaatgtttaccaacgtgttagtttaaatgctcccatggagaatgcaatgagtcccgacacttttgagaactcagagaacatgccattctaccatcaaagcaacacatttaccagatctttcttcagcaatacctttggacgaagcggagaacagaggagatttggacaaggtcctttttggggccaagagaaaggacattctttctggtctgactttcatcgaagcaggaaatcattcagttcttctgacagagactttgaaatgatttccatggaagcaaatagtgtatcagccattcatggccataatgtttcttctgaacactgggaatcattttcttctggttatggaacagatgtttccagaggccaagaagagccacatccttggcagtttgattttcagagatccacactggatagcatggtggtatcacatggtaatgagacccagttgactcctcattttggcacaccaaatgtttgctccatgactggttcaagctatcacgtcaaatctagtgagttggtaagtcaacaggacagttctcctgtagaagtacatataaacaaagaagcttcctcatttggaattgctcagactctagcatcctcattcaaaacttccttttcccagatttctgatgacagaaggaatcctcagagtcccaacttgcagaatcccacagtcactttgcagaaaatttttccaaataagcctgcctctcatccaatgagaagccatacagaagtcactgtgaccagcagcaattcagttgactctctgcctcttgccaaaagccagcccaatatcttggtcacagaagtaaataatgagaaagacttaaatgaatctatttcagaagaagacaaacagctaagcaagatggaccagacaaacaaggcaggtgaaataccccaacctgtttcacagacagggatctcaaactctttacctgattttcaaaatcccttatcccaggactcagccaagagcaacgggtttggttttaatgcatctaccataataagttcaaaaaagtcacccagagtcttttccaggaaagatacctccaaaatgtatataccgcacacagataaatccaatgacattaaacaagataagaggtttactgaaaacagaaaacttggctcaacagcttcccttcctttcattcaggaacacagaacaccaccatctttccccaggacagaccaaggttgtcaccaggaattaactgtaaataatgaagatatttcaagaattattacaaataaccactggagctctgcactgactgatactcaaaatgcacaatactcaaaatgcaagttaactcctggccacaagacctcgtgtgattctttagatctgtcatcagctgcactaccagattcctcaccatcaaagaattcttcccttgatgctcctgtggttccatctactacagtgttctccaggagaagtccttcagacaaagatccatcgctaggagaaagagaagaaaaagacaatgctgggaagaaccaaaagaatcagtttattgtaagccactcagaaaaccaagagagaaatgatagtcctgtgcctacacatgatgaagtggttgatgtcaaatgccattcacactctccttttaggaatgaaagaggaaaaggaaaaataaggcatcatatatcctgtattgaaaagttaagcaaaacagaaagtatatcagtacccaccagtgatcacaggagcctcattgaagcaaatcaaagcaattccaaagtttctgaacttgacacaatttattgtaccttgccaagaaaatcaagcagttttctcatacatggcaggcagtcaggaagtaaaataatggctgcttcattgaggaatgggccacctcccttccaaatcaaaaataatgtggaagatgcaatggggaactatatgttaaacaaatttagtcccagttctcctgagtcagcgaatgaatgttccaaagtcctttcagactcagccctggaagcacctgaagccacagagagaatgacaaatgtaaaaagcagtggatctacttccgttagaaaaggaccacttccattcctcatcaacagggctatgtcatgtccctcaggggagccacatgcctcaactggaagagaaggaagaaaaaagccattgacctcaggcatggatgcttctgagctaacaccaagggcttgggagagaatcattagccctgtggaaagtgactcatctgttagagattgttctttaaccaaaagacaacaccaaaaggaaaacttccaagaatacactgagaaagagggtaaaatggctgcctccaggagaagtgtatttgctctttcaaatgaagaccctttacctttttgctcagacttgtcaggaaaagaacgtgggaaaacattacataaagttaagacgactagtacgttttctgtttctggtgatgaagataatgtaaaatgtctggaggtggtctcaatatattacactctaccgaggaaacccagcaaaaaattctgtaacctccttcaacagtatacacaaaatactaatttacttatagaatcacctcaagtggagactgaaacatttcctaacgctttagaaaaagacaaacagaattattctacacgagagcagtcaggaacaccttcatgtgaaaatctaaagatgtccgtcaactctgatcagacgctcaccactgaaaatatgactgccttccgattatcaaatagggggcccctagctcctacattacaggaaatggcttctgttgaggcagctgtttctcttcctgaagaggaatctaaagctagagagattttttcagataatttagctaaaacacctctaggtgattcagaaaacaagaaggaaagaggcaaaaagttgcaaagtgaaaccctgcatacttcattgatgcttcagagaaaaaatgtatccgaagaaaaatctgaaaattgtcaacaatccattaattcaagtaacagtggtccctctagtcttccagctctttcagaagttaatattggaaattcccaaactagaagaagttcttgggagtgtacagggagtggtagagccattccatttactggaagtggcaagtgtccccagaaagatcacacatccacagctgtaggtgatggctccagtggatcacagcctagggaaggcagaggggacattggaaccaactgccaaaaaatgactaataaaacactttctcactcagagagtcaagtctttgcccttactccagcattgcataaactacagcttggtgaggagactcagtcagatgaaccaaacttagagagtctgcagtctgaaccaagagaattacctcaaagaagtcaggaggcaaatatgacagagagcaggaaggctgaagatgaaatgcagaagtcagcttgggatcaaccttcacttcctgaaggaaacaaaaataaaaccaacttggatgacctagtaaagggggaaaatagatcttcagttaaacacagattggcagccatgtctaaagccagcagaaaattcccagctaaagatgtaagccccagaagacatgtagctactatcttcccccaaagtggaagcagatctggctttgaccatttatctcttggcacagtggagtgcaacccactgttccctgagcctactccaaaatctgcagagtccattggcgaaagcaggttgagtgagaacggaaagcatgtgaagaaatccgagaaccttctccccattactgtactacccaacagagaaccttctacacacgtcagcaaccagaagtctaacagcatttcacaacgacatcagaatgagtttaaaaacgtctcagaatcaccatcaaagcatgagaattctaaagacgtcacagcagctcagaatttagtaagagaatcaggagccccatcacccatcacattcaccagcctcagggaagcagaattctctgacaatcagaggaggctgagccctccttttccactggagcctgcacagaaatctagagtaagcagtccactggccagttttctgcagcaacaaaggagtgcttcatctctggagtgggaacctgagccacacctctatcgttcaaagagtttaaaaagcattaatgttcatggcgatctactacgaaaaagccatcctccaaaagtcagggagcgccatttttctgaaagcacttctattgacaatgccctgagtcgactgacccttgggaatgaattctctgtcaacaatgggtacagtcgaagattcagatctttttctgaactcccctcctgtgatggaaatgaaagttgggcttatcgcagcgggacaaaaacaggtcccaggtctgcaatatctatatacagacctatcgactatgggatctttgggaaagaacaacagttagctttcttagaaaatgtaaagaggtcacttacacaaggaagattatggaaaccaagttttcttaagaaccctggcttcctaaaagatgatttgaggaaccctcccaacccctcagagtcattaagctcaaattctcccagtagtcaggtgccagaagatggcttatctccaagtgaaccgcttaatatctatgaggatgacccagtggactcagattgtgacacagacacaaccacagatgatgaatactacctggatgaaaatgacaaagagtcagaactgtgaggctttttcaataaaatgctttacttttttcaccaaaagcttataatggaactaaggtgtacatgtgcatgtgcatggaaggataaaagatctagtctgggcagtgtctgctctgaaatgtcccacatctccttttttttcctccacaccctatatagacacttcctgaatgctagaacaatgaattcttgttttgagagagtctctgctattttctatctctgtaaatgttcttagcctgcctttccaccactcccacttaatccctgattcactgtctgatttgggctttctgctttacttccctcctaacatttttcatctttaattgtgatttacaaccctaatatcccaggcacatacaaaacttatgaattacccagcacaactgtgaaactctgtattgcttcttccggtccacaccctatactcatgacattaaataaaaggtagggatgataacagtggggtaaatattatcatcctgtttgactcatgaacatttaggaagtttaaggtggtgatcttctctttcaaacaaagataaaggaatttattttttaacctgagaaactgattgcaaaaagg

SEQ ID NO: 6908 - DNA, 5495 bp, Homo sapiens
  source 1..5495: mol_type = unassigned DNA
gataaagctactggtgcagccactgaaccacagggctttctcttccttcactctgcctctttctgattgggaacacacaacagttgttttaaagctttccctggagggtgagtgataagaaacctattacctggaagtatcgcctttctaaagtaggagaacaaaaggccacactttccccagatgcaaacttcagaagacaaagagggatatcagatggcttcagggagtgactggtgaatggtttgaagaaattcaaagaaaaaagttttgcaatgaaacagatgttagccaaatgttaaaacaaccacttacatacaggctaagtaaggagatggcaaaaaatgatccgatagaattacctacatcaagatctaaaaatgtaactaatcaaaaaaagccgacacctttttcttcccggatgagcttcagatcgtcatttgcttccctgttctcattcaggaaatctggaaaggagacttcaaagcttccatcactgggacagaaaggatgtgatggccatgcaggacctcctatgcctgtgaggggagctgctgtgcaggcaaaaatatacaattcacctctggaaaatcatctagttgacagtacatttgtcccaaagccagcagtcatgagggaggagagtggcatgcctccaccgtgggatgcttcactgctggagaatgagtttttccaagttttagatgacttggatagcaaattggctcaggaacagtctgcaagctcagtgaataccagaacacccctcaactatggatcaagaacacagttcggtcacttttattccagtggtaacagacatggtaatatcacagaaaggcacaaaaaacactataatgaaacttccaatatgtctatctatgacatcctaagaccaggaactcctagggaaggttttaaaaccttttctcctaggacaagcacaatttatgatatgtataggacaagggagcccagagtctttaaagaagattatgtgcaaaagaatacttttggcagtacttcgctgtgttttgacagcaggcaacggtcggccttaccagccacagggcatttcacagcaagaagcttacattttccagccacaactcagagcaagagtgggtttataccaccaaggcaccagcagagtccaaagagaactcctttatcatccatcatatggaacagatcagattcctctagagacagggagaaccaggaagagttcctgagggcaccatcaccaatggaaattgatcccgctgacaagtatgtgtatcccaggggttttcaggagaataagagatatgaatcgtaccattcacagaatgtttaccaacgtgttagtttaaatgctcccatggagaatgcaatgagtcccgacacttttgagaactcagagaacatgccattctaccatcaaagcaacacatttaccagatctttcttcagcaatacctttggacgaagcggagaacagaggagatttggacaaggtcctttttggggccaagagaaaggacattctttctggtctgactttcatcgaagcaggaaatcattcagttcttctgacagagactttgaaatgatttccatggaagcaaatagtgtatcagccattcatggccataatgtttcttctgaacactgggaatcattttcttctggttatggaacagatgtttccagaggccaagaagagccacatccttggcagtttgattttcagagatccacactggatagcatggtggtatcacatggtaatgagacccagttgactcctcattttggcacaccaaatgtttgctccatgactggttcaagctatcacgtcaaatctagtgagttggtaagtcaacaggacagttctcctgtagaagtacatataaacaaagaagcttcctcatttggaattgctcagactctagcatcctcattcaaaacttccttttcccagatttctgatgacagaaggaatcctcagagtcccaacttgcagaatcccacagtcactttgcagaaaatttttccaaataagcctgcctctcatccaatgagaagccatacagaagtcactgtgaccagcagcaattcagttgactctctgcctcttgccaaaagccagcccaatatcttggtcacagaagtaaataatgagaaagacttaaatgaatctatttcagaagaagacaaacagctaagcaagatggaccagacaaacaaggcaggtgaaataccccaacctgtttcacagacagggatctcaaactctttacctgattttcaaaatcccttatcccaggactcagccaagagcaacgggtttggttttaatgcatctaccataataagttcaaaaaagtcacccagagtcttttccaggaaagatacctccaaaatgtatataccgcacacagataaatccaatgacattaaacaagataagaggtttactgaaaacagaaaacttggctcaacagcttcccttcctttcattcaggaacacagaacaccaccatctttccccaggacagaccaaggttgtcaccaggaattaactgtaaataatgaagatatttcaagaattattacaaataaccactggagctctgcactgactgatactcaaaatgcacaatactcaaaatgcaagttaactcctggccacaagacctcgtgtgattctttagatctgtcatcagctgcactaccagattcctcaccatcaaagaattcttcccttgatgctcctgtggttccatctactacagtgttctccaggagaagtccttcagacaaagatccatcgctaggagaaagagaagaaaaagacaatgctgggaagaaccaaaagaatcagtttattgtaagccactcagaaaaccaagagagaaatgatagtcctgtgcctacacatgatgaagtggttgatgtcaaatgccattcacactctccttttaggaatgaaagaggaaaaggaaaaataaggcatcatatatcctgtattgaaaagttaagcaaaacagaaagtatatcagtacccaccagtgatcacaggagcctcattgaagcaaatcaaagcaattccaaagtttctgaacttgacacaatttattgtaccttgccaagaaaatcaagcagttttctcatacatggcaggcagtcaggaagtaaaataatggctgcttcattgaggaatgggccacctcccttccaaatcaaaaataatgtggaagatgcaatggggaactatatgttaaacaaatttagtcccagttctcctgagtcagcgaatgaatgttccaaagtcctttcagactcagccctggaagcacctgaagccacagagagaatgacaaatgtaaaaagcagtggatctacttccgttagaaaaggaccacttccattcctcatcaacagggctatgtcatgtccctcaggggagccacatgcctcaactggaagagaaggaagaaaaaagccattgacctcaggcatggatgcttctgagctaacaccaagggcttgggagagaatcattagccctgtggaaagtgactcatctgttagagattgttctttaaccaaaagacaacaccaaaaggaaaacttccaagaatacactgagaaagagggtaaaatggctgcctccaggagaagtgtatttgctctttcaaatgaagaccctttacctttttgctcagacttgtcaggaaaagaacgtgggaaaacattacataaagttaagacgactagtacgttttctgtttctggtgatgaagataatgtaaaatgtctggaggtggtctcaatatattacactctaccgaggaaacccagcaaaaaattctgtaacctccttcaacagtatacacaaaatactaatttacttatagaatcacctcaagtggagactgaaacatttcctaacgctttagaaaaagacaaacagaattattctacacgagagcagtcaggaacaccttcatgtgaaaatctaaagatgtccgtcaactctgatcagacgctcaccactgaaaatatgactgccttccgattatcaaatagggggcccctagctcctacattacaggaaatggcttctgttgaggcagctgtttctcttcctgaagaggaatctaaagctagagagattttttcagataatttagctaaaacacctctaggtgattcagaaaacaagaaggaaagaggcaaaaagttgcaaagtgaaaccctgcatacttcattgatgcttcagagaaaaaatgtatccgaagaaaaatctgaaaattgtcaacaatccattaattcaagtaacagtggtccctctagtcttccagctctttcagaagttaatattggaaattcccaaactagaagaagttcttgggagtgtacagggagtggtagagccattccatttactggaagtggcaagtgtccccagaaagatcacacatccacagctgtaggtgatggctccagtggatcacagcctagggaaggcagaggggacattggaaccaactgccaaaaaatgactaataaaacactttctcactcagagagtcaagtctttgcccttactccagcattgcataaactacagcttggtgaggagactcagtcagatgaaccaaacttagagagtctgcagtctgaaccaagagaattacctcaaagaagtcaggaggcaaatatgacagagagcaggaaggctgaagatgaaatgcagaagtcagcttgggatcaaccttcacttcctgaaggaaacaaaaataaaaccaacttggatgacctagtaaagggggaaaatagatcttcagttaaacacagattggcagccatgtctaaagccagcagaaaattcccagctaaagatgtaagccccagaagacatgtagctactatcttcccccaaagtggaagcagatctggctttgaccatttatctcttggcacagtggagtgcaacccactgttccctgagcctactccaaaatctgcagagtccattggcgaaagcaggttgagtgagaacggaaagcatgtgaagaaatccgagaaccttctccccattactgtactacccaacagagaaccttctacacacgtcagcaaccagaagtctaacagcatttcacaacgacatcagaatgagtttaaaaacgtctcagaatcaccatcaaagcatgagaattctaaagacgtcacagcagctcagaatttagtaagagaatcaggagccccatcacccatcacattcaccagcctcagggaagcagaattctctgacaatcagaggaggctgagccctccttttccactggagcctgcacagaaatctagagtaagcagtccactggccagttttctgcagcaacaaaggagtgcttcatctctggagtgggaacctgagccacacctctatcgttcaaagagtttaaaaagcattaatgttcatggcgatctactacgaaaaa

SEQ ID NO: 6909 - DNA, 3893 bp, Homo sapiens
  source 1..3893: mol_type = unassigned DNA
aaataaaaggtgttggaggtcactgtcgctgagaaacaagaggcagcaagcagctggtgggttgtgtgatgaggctgctggatttaacagaccactgtcctcccctcttgggtgaatggagggtttttcacttccagctttcacccgaggctgtttttgtctgatgaaagaaagagcagaccacaatgtagatttatgtgactgtagctaccagagtcactagcaaggaaatactcttcaaatagcaggcaaaaatatacaattcacctctggaaaatcatctagttgacagtacatttgtcccaaagccagcagtcatgagggaggagagtggcatgcctccaccgtgggatgcttcactgctggagaatgagtttttccaagttttagatgacttggatagcaaattggctcaggaacagtctgcaagctcagtgaataccagaacacccctcaactatggatcaagaacacagttcggtcacttttattccagtggtaacagacatggtaatatcacagaaaggcacaaaaaacactataatgaaacttccaatatgtctatctatgacatcctaagaccaggaactcctagggaaggttttaaaaccttttctcctaggacaagcacaatttatgatatgtataggacaagggagcccagagtctttaaagaagattatgtgcaaaagaatacttttggcagtacttcgctgtgttttgacagcaggcaacggtcggccttaccagccacagggcatttcacagcaagaagcttacattttccagccacaactcagagcaagagtgggtttataccaccaaggcaccagcagagtccaaagagaactcctttatcatccatcatatggaacagatcagattcctctagagacagggagaaccaggaagagttcctgagggcaccatcaccaatggaaattgatcccgctgacaagtatgtgtatcccaggggttttcaggagaataagagatatgaatcgtaccattcacagaatgtttaccaacgtgttagtttaaatgctcccatggagaatgcaatgagtcccgacacttttgagaactcagagaacatgccattctaccatcaaagcaacacatttaccagatctttcttcagcaatacctttggacgaagcggagaacagaggagatttggacaaggtcctttttggggccaagagaaaggacattctttctggtctgactttcatcgaagcaggaaatcattcagttcttctgacagagactttgaaatgatttccatggaagcaaatagtgtatcagccattcatggccataatgtttcttctgaacactgggaatcattttcttctggttatggaacagatgtttccagaggccaagaagagccacatccttggcagtttgattttcagagatccacactggatagcatggtggtatcacatggtaatgagacccagttgactcctcattttggcacaccaaatgtttgctccatgactggttcaagctatcacgtcaaatctagtgagttggtaagtcaacaggacagttctcctgtagaagtacatataaacaaagaagcttcctcatttggaattgctcagactctagcatcctcattcaaaacttccttttcccagatttctgatgacagaaggaatcctcagagtcccaacttgcagaatcccacagtcactttgcagaaaatttttccaaataagcctgcctctcatccaatgagaagccatacagaagtcactgtgaccagcagcaattcagttgactctctgcctcttgccaaaagccagcccaatatcttggtcacagaagtaaataatgagaaagacttaaatgaatctatttcagaagaagacaaacagctaagcaagatggaccagacaaacaaggcaggtgaaataccccaacctgtttcacagacagggatctcaaactctttacctgattttcaaaatcccttatcccaggactcagccaagagcaacgggtttggttttaatgcatctaccataataagttcaaaaaagtcacccagagtcttttccaggaaagatacctccaaaatgtatataccgcacacagataaatccaatgacattaaacaagataagaggtttactgaaaacagaaaacttggctcaacagcttcccttcctttcattcaggaacacagaacaccaccatctttccccaggacagaccaaggttgtcaccaggaattaactgtaaataatgaagatatttcaagaattattacaaataaccactggagctctgcactgactgatactcaaaatgcacaatactcaaaatgcaagttaactcctggccacaagacctcgtgtgattctttagatctgtcatcagctgcactaccagattcctcaccatcaaagaattcttcccttgatgctcctgtggttccatctactacagtgttctccaggagaagtccttcagacaaagatccatcgctaggagaaagagaagaaaaagacaatgctgggaagaaccaaaagaatcagtttattgtaagccactcagaaaaccaagagagaaatgatagtcctgtgcctacacatgatgaagtggttgatgtcaaatgccattcacactctccttttaggaatgaaagaggaaaaggaaaaataaggcatcatatatcctgtattgaaaagttaagcaaaacagaaagtatatcagtacccaccagtgatcacaggagcctcattgaagcaaatcaaagcaattccaaagtttctgaacttgacacaatttattgtaccttgccaagaaaatcaagcagttttctcatacatggcaggcagtcaggaagtaaaataatggctgcttcattgaggaatgggccacctcccttccaaatcaaaaataatgtggaagatgcaatggggaactatatgttaaacaaatttagtcccagttctcctgagtcagcgaatgaatgttccaaagtcctttcagactcagccctggaagcacctgaagccacagagagaatgacaaatgtaaaaagcagtggatctacttccgttagaaaaggaccacttccattcctcatcaacagggctatgtcatgtccctcaggggagccacatgcctcaactggaagagaaggaagaaaaaagccattgacctcaggcatggatgcttctgagctaacaccaagggcttgggagagaatcattagccctgtggaaagtgactcatctgttagagattgttctttaaccaaaagacaacaccaaaaggaaaacttccaagaatacactgagaaagagggtaaaatggctgcctccaggagaagtgtatttgctctttcaaatgaagaccctttacctttttgctcagacttgtcaggaaaagaacgtgggaaaacattacataaagttaagacgactagtacgttttctgtttctggtgatgaagataatgtaaaatgtctggaggtggtctcaatatattacactctaccgaggaaacccagcaaaaaattctgtaacctccttcaacagtatacacaaaatactaatttacttatagaatcacctcaagtggagactgaaacatttcctaacgctttagaaaaagacaaacagaattattctacacgagagcagtcaggaacaccttcatgtgaaaatctaaagatgtccgtcaactctgatcagacgctcaccactgaaaatatgactgccttccgattatcaaatagggggcccctagctcctacattacaggaaatggcttctgttgaggcagctgtttctcttcctgaagaggaatctaaagctagagagattttttcagataatttagctaaaacacctctaggtgattcagaa

SEQ ID NO: 6910 - DNA, 1882 bp, Homo sapiens
  source 1..1882: mol_type = unassigned DNA
cactgtcgctgagaaacaagaggcagcaagcagctggtgggttgtgtgatgaggctgctggatttaacagaccactgtcctcccctcttgggtgaatggagggtttttcacttccagctttcacccgaggctgtttttgtctgatgaaagaaagagcagaccacaatgtagatttatgtgactgtagctaccagagtcactagcaaggaaatactcttcaaatagatgtgatggccatgcaggacctcctatgcctgtgaggggagctgctgtgcaggcaaaaatatacaattcacctctggaaaatcatctagttgacagtacatttgtcccaaagccagcagtcatgagggaggagagtggcatgcctccaccgtgggatgcttcactgctggagaatgagtttttccaagttttagatgacttggatagcaaattggctcaggaacagtctgcaagctcagtgaataccagaacacccctcaactatggatcaagaacacagttcggtcacttttattccagtggtaacagacatggtaatatcacagaaaggcacaaaaaacactataatgaaacttccaatatgtctatctatgacatcctaagaccaggaactcctagggaaggttttaaaaccttttctcctaggacaagcacaatttatgatatgtataggacaagggagcccagagtctttaaagaagattatgtgcaaaagaatacttttggcagtacttcgctgtgttttgacagcaggcaacggtcggccttaccagccacagggcatttcacagcaagaagcttacattttccagccacaactcagagcaagagtgggtttataccaccaaggcaccagcagagtccaaagagaactcctttatcatccatcatatggaacagatcagattcctctagagacagggagaaccaggaagagttcctgagggcaccatcaccaatggaaattgatcccgctgacaagtatgtgtatcccaggggttttcaggagaataagagatatgaatcgtaccattcacagaatgtttaccaacgtgttagtttaaatgctcccatggagaatgcaatgagtcccgacacttttgagaactcagagaacatgccattctaccatcaaagcaacacatttaccagatctttcttcagcaatacctttggacgaagcggagaacagaggagatttggacaaggtcctttttggggccaagagaaaggacattctttctggtctgactttcatcgaagcaggaaatcattcagttcttctgacagagactttgaaatgatttccatggaagcaaatagtgtatcagccattcatggccataatgtttcttctgaacactgggaatcattttcttctggttatggaacagatgtttccagaggccaagaagagccacatccttggcagtttgattttcagagatccacactggatagcatggtggtatcacatggtaatgagacccagttgactcctcattttggcacaccaaatgtttgctccatgactggttcaagctatcacgtcaaatctagtgagttggtaagtcaacaggacagttctcctgtagaagtacatataaacaaagaagcttcctcatttggaattgctcagactctagcatcctcattcaaaacttccttttcccagatttctgatgacagaaggaatcctcagagtcccaacttgcagaatcccacagtcactttgcagaaaatttttccaaataagcctgcctctcatccaatgagaagccatacagaagtcactgtgaccagcagcaattcagttgactctctgcctcttgccaaaagccagcccaatatcttggtcacagaagtaaataatgag

SEQ ID NO: 6911 - DNA, 555 bp, Homo sapiens
  source 1..555: mol_type = unassigned DNA
agtaacaagctggctttcaccggcaccctcccctttggtacggggtcagcagaagggtgttttgtcttcagcgagtcggaaaccccctgtcttcagtgtattctgcccaccaggatagggcactgtggattttggttttgaagcttgtccagagtcactcaagagagacaaagcggccattctactgtgtgctacccaacacccaccagcaaacttcagaagacaaagagggatatcagatggcttcagggagtgactggtgaatggtttgaagaaattcaaagaaaaaagttttgcaatgaaacagatgttagccaaatgttaaaacaaccacttacatacaggctaagtaaggagatggcaaaaaatgatccgatagaattacctacatcaagatctaaaaatgtaactaatcaaaaaaagccgacacctttttcttcccggatgagcttcagatcgtcatttgcttccctgttctcattcaggaaatctggaaaggagacttcaaagcttccatcactgggacagaaaggatgtgatggccatgcaggacct

SEQ ID NO: 6912 - DNA, 2835 bp, Homo sapiens
  source 1..2835: mol_type = unassigned DNA
cactttgcgggcggcactttttccaggttgttaatccagctaatggagaaggatagatgcacgctacttggtttagaaaaaaaaacaaaaatgagcaaacgagacgccccttccgttttatgataactaagctgcagggaaataaatcggctggccctactgcaatctactgcactcgagaaacatcacagaaaattctttgatttatcttaatagtgacaagtgagcctgcttctgtcaattactgaagctataaggagattttttaaaaattaaacttcaacacaatgaggtgttgccacatctgcaaacttcctgggagagtaatggggattcgagtgcttcgattatctttggtggtcatcctcgtattattactggtagctggtgctttgactgccttacttcccagtgttaaagaagacaagatgctcatgttgcgtagggaaataaaatcccagggcaagtccaccatggactcctttactctcataatgcagacgtacaacagaacagatctcttattgaaacttttaaatcattatcaggctgtaccaaatctgcacaaagtgattgtggtatggaacaatattggagagaaggcaccagatgaattatggaattctctagggccccaccctatccctgtgatcttcaaacaacagacagcaaacaggatgagaaatcgactccaggtctttcctgaactggaaaccaatgcagtgttgatggtagatgatgacacactcatcagcaccccagaccttgtttttgctttctcagtttggcagcaatttcctgatcaaattgtaggatttgttcctagaaagcacgtctctacttcatcaggtatctacagttatggaagttttgaaatgcaagcaccagggtctggaaatggtgaccagtactctatggtgctgattggagcctcattcttcaatagcaaatatcttgaattatttcagaggcaacctgcagctgtccatgctttgatagatgatactcaaaactgtgatgatattgccatgaattttatcattgccaagcatattggcaagacttcagggatatttgtgaagcctgtaaacatggacaatttggaaaaagaaaccaacagtggctattctggaatgtggcatcgagctgagcacgctctgcagaggtcttattgtataaataagcttgttaatatctatgatagcatgcccttaagatactccaacattatgatttcccagtttggttttccatatgccaactacaaaagaaaaatataaaagtaaaacaaacaaaaacaaacctgaaaactgcttggcatttgagtagcttctccatgctatgtatttttttaagcaacatcatgaattttatctactccagaagtctctacaatagaaaaaaaagtgcagtgcttctaggatataaaattcacattacttttgaaagccaagaagttggtcttatccagttaggtcttcttatgaagagttttcatccagggatataactccttggtcagtgattttattgtttacatcctgagactgttctacagtttctttgactcctggcatttgccttaaggacctatagcaagctgtttctaggatcagaaactcaagagaggcatttctctgctttttcactaaaggtcagttgttttaatttgaaacctgaaatgcctctttagcaaaagcctgtggtatggggtaaagccatgtaagaagagaatagtctcagtcacatatgaagaggaaaatttgcagctgccagtgctttccttgtggccctgccaaccagctcttccaggacgaactcagtccagcatggttttgatgtaaccatccatgcttttatttttgttaagtcttttgtgactgggacagttaattttagtagctgaagaacgtctagttgtttgcttgatatttgtgaacatttactgcatggatcacaaaacaatataccctgtatttcttacacgccacttatatgcagcaaggagtaaatgtgttactagattcgggtagtgcattttgtcactgaatctgaccttgagaatgtacattaattcttatattttacataatgtatgtgttgtttaagaaatgtataaaaaacctgaaaaaaatgagtaagaactggcagaagttaaaaccctttgtatcaaaagatctttattggtagagcactggttatcttctggatactaaaaagttgtattacaaagccaaacacttgcattcacaactttaaaaaaagatccaaggaactattcataatgatgaaatttcaactacatacaaggaggagaaaataagaacccagtcataacagaggaattctataggagtctgcatcaattcattcttaaggttgcctactctctgttatgtgaattagcgtctgtgtttcacccattgtctgtgtttagtccttgttcaccactaaggcaaggaattcttaactaggcctctgtttaccaacttctctttctcctcctttccctcttattcctccttctcctcttccttcttatataatgctagtatattctcaaaattgcaaagctgtgagaatattaaaataatcatggctaatgttccaataatgaggtctttgtgcatttagttccgcatatgatggttttttttttacattaaagagtatatgtgtcttaatgcagtcagattgtaaaaaacaaaaacaaagaaactaagaatcttactaaaaatcgataatgtcagttatctgttttgtccaatattggtagtacttttttgcctcttatgattcctctagcagataaataaaagaaacttttgccatcca

SEQ ID NO: 6913 - DNA, 3985 bp, Homo sapiens
  source 1..3985: mol_type = unassigned DNA
gggcgggatgagaaaggtgctggagctgttggagggacgccaggaggtggcaactaccagggggtgtgaggggctgacctgggatggaatcctgccacccggactcaggaagaaaatcctgaggtggcgacctgcagactgggctgggagatggagagcccgctcacgcccacccgaccgcctaccaccagtgttcccggatgcatgggctccagcgcctgccctttcgccatttcctcccaactggcattaaatcctggtgtggtagatatcagtgattaagagtctaggcagccacgtgttctattgccgccagtccgcaggaaacgcaagtgatcgttttgctgcgttaactctatgggcgcccaaatcttaggaatccattccacgccaccccgaaaacagcgcttgacccttctggactgccacgcaggaggcgatcaatgtttttctttctttatttttttaagagacaaggtctcgccctgtcacctaggctggagcacaatgaggctcactacagcctggaactcccggacgcaagtgatcctcctcagcctccggagtagctgagacctcaggcgtgcgccaccatgcctggcatcaatcaatgtctttcaaaataaaggctgttaaacgtagtataggaaagaagctttttaatggtaggttctaccagacgtgtttgtttgatttttaggtttggttaatgcattgtttcccgtacaatctcaacccgcggaaaccccgaaactctagaattcgtgccggtctctttcgcttccaggtcatccccggggcaacggccgccgctctaattcttgtcagaacctccaggccagtttcagcaacgtgcaggcagaagctggcccctcggtgggatgcgagggcgtgtggagcgcggggaggagagccccacaggcctttcctgggcacccgcggtggatgggaaggctccttcgggcgcctttcagggaagttgtttggctgagggaaggtggtccgtcacgtgaatgtttaaaagttgttaccttggagaagaaatggaggaaaggattggctttcggaggtgggctggaaactacaaaaccgagcttcctgggaatgccttttaggccgacaggaagtggagcgtcaccgaaagggaggggcggccactcggggactgtcccttgctccaggcgctcactttgcgggcggcactttttccaggttgttaatccagctaatggagaaggatagatgcacgctacttggtttagaaaaaaaaacaaaaatgagcaaacgagacgccccttccgttttatgataactaagctgcagggaaataaatcggctggccctactgcaatctactgcactcgagtgacaagtgagcctgcttctgtcaattactgaagctataaggagattttttaaaaattaaacttcaacacaatgaggtgttgccacatctgcaaacttcctgggagagtaatggggattcgagtgcttcgattatctttggtggtcatcctcgtattattactggtagctggtgctttgactgccttacttcccagtgttaaagaagacaagatgctcatgttgcgtagggaaataaaatcccagggcaagtccaccatggactcctttactctcataatgcagacgtacaacagaacagatctcttattgaaacttttaaatcattatcaggctgtaccaaatctgcacaaagtgattgtggtatggaacaatattggagagaaggcaccagatgaattatggaattctctagggccccaccctatccctgtgatcttcaaacaacagacagcaaacaggatgagaaatcgactccaggtctttcctgaactggaaaccaatgcagtgttgatggtagatgatgacacactcatcagcaccccagaccttgtttttgctttctcagtttggcagcaatttcctgatcaaattgtaggatttgttcctagaaagcacgtctctacttcatcaggtatctacagttatggaagttttgaaatgcaagcaccagggtctggaaatggtgaccagtactctatggtgctgattggagcctcattcttcaatagcaaatatcttgaattatttcagaggcaacctgcagctgtccatgctttgatagatgatactcaaaactgtgatgatattgccatgaattttatcattgccaagcatattggcaagacttcagggatatttgtgaagcctgtaaacatggacaatttggaaaaagaaaccaacagtggctattctggaatgtggcatcgagctgagcacgctctgcagaggtcttattgtataaataagcttgttaatatctatgatagcatgcccttaagatactccaacattatgatttcccagtttggttttccatatgccaactacaaaagaaaaatataaaagtaaaacaaacaaaaacaaacctgaaaactgcttggcatttgagtagcttctccatgctatgtatttttttaagcaacatcatgaattttatctactccagaagtctctacaatagaaaaaaaagtgcagtgcttctaggatataaaattcacattacttttgaaagccaagaagttggtcttatccagttaggtcttcttatgaagagttttcatccagggatataactccttggtcagtgattttattgtttacatcctgagactgttctacagtttctttgactcctggcatttgccttaaggacctatagcaagctgtttctaggatcagaaactcaagagaggcatttctctgctttttcactaaaggtcagttgttttaatttgaaacctgaaatgcctctttagcaaaagcctgtggtatggggtaaagccatgtaagaagagaatagtctcagtcacatatgaagaggaaaatttgcagctgccagtgctttccttgtggccctgccaaccagctcttccaggacgaactcagtccagcatggttttgatgtaaccatccatgcttttatttttgttaagtcttttgtgactgggacagttaattttagtagctgaagaacgtctagttgtttgcttgatatttgtgaacatttactgcatggatcacaaaacaatataccctgtatttcttacacgccacttatatgcagcaaggagtaaatgtgttactagattcgggtagtgcattttgtcactgaatctgaccttgagaatgtacattaattcttatattttacataatgtatgtgttgtttaagaaatgtataaaaaacctgaaaaaaatgagtaagaactggcagaagttaaaaccctttgtatcaaaagatctttattggtagagcactggttatcttctggatactaaaaagttgtattacaaagccaaacacttgcattcacaactttaaaaaaagatccaaggaactattcataatgatgaaatttcaactacatacaaggaggagaaaataagaacccagtcataacagaggaattctataggagtctgcatcaattcattcttaaggttgcctactctctgttatgtgaattagcgtctgtgtttcacccattgtctgtgtttagtccttgttcaccactaaggcaaggaattcttaactaggcctctgtttaccaacttctctttctcctcctttccctcttattcctccttctcctcttccttcttatataatgctagtatattctcaaaattgcaaagctgtgagaatattaaaataatcatggctaatgttccaataatgaggtctttgtgcatttagttccgcatatgatggttttttttttacattaaagagtatatgtgtcttaatgcagtcagattgtaaaaaacaaaaacaaagaaactaagaatcttactaaaaatcgataatgtcagttatctgttttgtccaatattggtagtacttttttgcctcttatgattcctctagcagataaataaaagaaacttttgccatcca

SEQ ID NO: 6914 - DNA, 902 bp, Homo sapiens
  source 1..902: mol_type = unassigned DNA
ggctggccctactgcaatctactgcactcgagtgacaagtgagcctgcttctgtcaattactgaagctataaggagattttttaaaaattaaacttcaacacaatgagaacctggaacagtggtggcacaaagtgttgccacatctgcaaacttcctgggagagtaatggggattcgagtgcttcgattatctttggtggtcatcctcgtattattactggtagctggtgctttgactgccttacttcccagtgttaaagaagacaagatgctcatgttgcgtagggaaataaaatcccagggcaagtccaccatggactcctttactctcataatgcagacgtacaacagaacagatctcttattgaaacttttaaatcattatcaggctgtaccaaatctgcacaaagtgattgtggtatggaacaatattggagagaaggcaccagatgaattatggaattctctagggccccaccctatccctgtgatcttcaaacaacagacagcaaacaggatgagaaatcgactccaggtctttcctgaactggaaaccaatgcagtgttgatggtagatgatgacacactcatcagcaccccagaccttgtttttgctttctcagtttggcagcaatttcctgatcaaattgtaggatttgttcctagaaagcacgtctctacttcatcaggtatctacagttatggaagttttgaaatgcaagcaccagggtctggaaatggtgaccagtactctatggtgctgattggagcctcattcttcaatagcaaatatcttgaattatttcagaggcaacctgcagctgtccatgctttgatagatgatactcaaaactgtgatgatattgccatgaattttatcattgccaagcatattggcaaga

SEQ ID NO: 6915 - DNA, 730 bp, Homo sapiens
  source 1..730: mol_type = unassigned DNA
actttgcgggcggcactttttccaggttgttaatccagctaatggagaaggatagatgcacgctacttggtttagaaaaaaaaacaaaaatgagcaaacgagacgccccttccgttttatgataactaagctgcagggaaataaatcggctggccctactgcaatctactgcactcgagaaacatcacagaaaattctttgatttatcttaatagtgacaagtgagcctgcttctgtcaattactgaagctataaggagattttttaaaaattaaacttcaacacaatgagaacctggaacagtggtggcacaaagtaagtgctcaggaactatctgttgaatgagtgttgccacatctgcaaacttcctgggagagtaatggggattcgagtgcttcgattatctttggtggtcatcctcgtattattactggtagctggtgctttgactgccttacttcccagtgttaaagaagacaagatgctcatgttgcgtagggaaataaaatcccagggcaagtccaccatggactcctttactctcataatgcagacgtacaacagaacagatctcttattgaaacttttaaatcattatcaggctgtaccaaatctgcacaaagtgattgtggtatggaacaatattggagagaaggcaccagatgaattatggaattctctagggccccaccctatccctgtgatcttcaaacaacagacagcaaacagg

SEQ ID NO: 6916 - DNA, 440 bp, Homo sapiens
  source 1..440: mol_type = unassigned DNA
ctgcagggaaataaatcggctggccctactgcaatctactgcactcgagtgacaagtgagcctgcttctgtcaattactgaagctataaggagattttttaaaaattaaacttcaacacaatgagatttgtgaaaaaagtaacaggaattaagaagaacctcgtaagaatagaagagctacttaggaaaaagggaggggaaatcattttggaaggagagcatagaattggtagaaaatgagaaaagctgtatggcatttctaaaacaacaatgaaaagaatgactttcctgaatgtgggtaaaaaccttacatcaaaaactcttccccgaatcttgtatagcacctggaaaagacttgtgaagaaaaatgacctttcatgtaccatttctggcattttgtattttgcaatgcaataaattctagtttatgctgcttataa

SEQ ID NO: 6917 - DNA, 678 bp, Homo sapiens
  source 1..678: mol_type = unassigned DNA
cgggcggcactttttccaggttgttaatccagctaatggagaaggatagatgcacgctacttggtttagaaaaaaaaacaaaaatgagcaaacgagacgccccttccgttttatgataactaagctgcagggaaataaatcggctggccctactgcaatctactgcactcgagtgacaagtgagcctgcttctgtcaattactgaagctataaggagattttttaaaaattaaacttcaacacaatgaggtaagtaccaatattttttggcttttgtttaactgttgtaaaatacgtataacacaaaatttatcaccttaacgggttttaagtatatagttcagtagtgttaactgttttcacattgttgtgcggccgatctctggaactttttcatcttgcaaaactgaaactttatacccactgaacaacaactgtccatttcttcctactcccagcccctggcaactgccattctttctgtttctataaatttgactttcctaggtacctcataataaatggaatcatacagtatttgtctttttgtgactgcttatttcaattaacataatgtcttcaagattcatctatgttgtggcatgtatcagaattccctaatttgtaaaaacagaataataatactcttttgtacctgtgtatcatattttctaaatg

SEQ ID NO: 6918 - DNA, 3146 bp, Homo sapiens
  source 1..3146: mol_type = unassigned DNA
tcttgtcagaacctccaggccagtttcagcaacgtgcaggcagaagctggcccctcggtgggatgcgagggcgtgtggagcgcggggaggagagccccacaggcctttcctgggcacccgcggtggatgggaaggctccttcgggcgcctttcagggaagttgtttggctgagggaaggtggtccgtcacgtgaatgtttaaaagttgttaccttggagaagaaatggaggaaaggattggctttcggaggtgggctggaaactacaaaaccgagcttcctgggaatgccttttaggccgacaggaagtggagcgtcaccgaaagggaggggcggccactcggggactgtcccttgctccaggcgctcactttgcgggcggcactttttccaggttgttaatccagctaatggagaaggatagatgcacgctacttggtttagaaaaaaaaacaaaaatgagcaaacgagacgccccttccgttttatgataactaagctgcagggaaataaatcggctggccctactgcaatctactgcactcgagaaacatcacagaaaattctttgatttatcttaatagtgacaagtgagcctgcttctgtcaattactgaagctataaggagattttttaaaaattaaacttcaacacaatgaggtgttgccacatctgcaaacttcctgggagagtaatggggattcgagtgcttcgattatctttggtggtcatcctcgtattattactggtagctggtgctttgactgccttacttcccagtgttaaagaagacaagatgctcatgttgcgtagggaaataaaatcccagggcaagtccaccatggactcctttactctcataatgcagacgtacaacagaacagatctcttattgaaacttttaaatcattatcaggctgtaccaaatctgcacaaagtgattgtggtatggaacaatattggagagaaggcaccagatgaattatggaattctctagggccccaccctatccctgtgatcttcaaacaacagacagcaaacaggatgagaaatcgactccaggtctttcctgaactggaaaccaatgcaatttcctgatcaaattgtaggatttgttcctagaaagcacgtctctacttcatcaggtatctacagttatggaagttttgaaatgcaagcaccagggtctggaaatggtgaccagtactctatggtgctgattggagcctcattcttcaatagcaaatatcttgaattatttcagaggcaacctgcagctgtccatgctttgatagatgatactcaaaactgtgatgatattgccatgaattttatcattgccaagcatattggcaagacttcagggatatttgtgaagcctgtaaacatggacaatttggaaaaagaaaccaacagtggctattctggaatgtggcatcgagctgagcacgctctgcagaggtcttattgtataaataagcttgttaatatctatgatagcatgcccttaagatactccaacattatgatttcccagtttggttttccatatgccaactacaaaagaaaaatataaaagtaaaacaaacaaaaacaaacctgaaaactgcttggcatttgagtagcttctccatgctatgtatttttttaagcaacatcatgaattttatctactccagaagtctctacaatagaaaaaaaagtgcagtgcttctaggatataaaattcacattacttttgaaagccaagaagttggtcttatccagttaggtcttcttatgaagagttttcatccagggatataactccttggtcagtgattttattgtttacatcctgagactgttctacagtttctttgactcctggcatttgccttaaggacctatagcaagctgtttctaggatcagaaactcaagagaggcatttctctgctttttcactaaaggtcagttgttttaatttgaaacctgaaatgcctctttagcaaaagcctgtggtatggggtaaagccatgtaagaagagaatagtctcagtcacatatgaagaggaaaatttgcagctgccagtgctttccttgtggccctgccaaccagctcttccaggacgaactcagtccagcatggttttgatgtaaccatccatgcttttatttttgttaagtcttttgtgactgggacagttaattttagtagctgaagaacgtctagttgtttgcttgatatttgtgaacatttactgcatggatcacaaaacaatataccctgtatttcttacacgccacttatatgcagcaaggagtaaatgtgttactagattcgggtagtgcattttgtcactgaatctgaccttgagaatgtacattaattcttatattttacataatgtatgtgttgtttaagaaatgtataaaaaacctgaaaaaaatgagtaagaactggcagaagttaaaaccctttgtatcaaaagatctttattggtagagcactggttatcttctggatactaaaaagttgtattacaaagccaaacacttgcattcacaactttaaaaaaagatccaaggaactattcataatgatgaaatttcaactacatacaaggaggagaaaataagaacccagtcataacagaggaattctataggagtctgcatcaattcattcttaaggttgcctactctctgttatgtgaattagcgtctgtgtttcacccattgtctgtgtttagtccttgttcaccactaaggcaaggaattcttaactaggcctctgtttaccaacttctctttctcctcctttccctcttattcctccttctcctcttccttcttatataatgctagtatattctcaaaattgcaaagctgtgagaatattaaaataatcatggctaatgttccaataatgaggtctttgtgcatttagttccgcatatgatggttttttttttacattaaagagtatatgtgtcttaatgcagtcagattgtaaaaaacaaaaacaaagaaactaagaatcttactaaaaatcgataatgtcagttatctgttttgtccaatattggtagtacttttttgcctcttatgattcctctagcagataaataaaagaaacttttgccatccatgtgttctgtgttaa

SEQ ID NO: 6919 - DNA, 3907 bp, Homo sapiens
  source 1..3907: mol_type = unassigned DNA
gagacctcaacttaaagacaatatgcctttcactgctgcagtatcctcctttttctcttttggttaaaagagagcattgtcgttctcagccatgtgctctgtataattaagagctgacactgaagcagagtaacaacatcttctaatttttttacccctgatcacaggtgcaaacatctcaagccagttcagatgttgctgtttcctcaagttgcaggtctatggaaatgcaggatctaaccagcccgcatagccgtctgagtggtagtagtgaatcccccagtggccccaaactcggtaactctcatataaatagtaattccatgactcccaatggcaccgaagttaaaacagagccaatgagcagcagtgaaacagcttcaacgacagccgacgggtctttaaacaatttctcaggttcagcaattgggagcagtagtttcagcccacgaccaactcaccagttctctccaccacagatttacccttccaacagaccatacccacatattctccctaccccttcctcacaaactatggctgcatatgggcaaacacagtttaccacaggaatgcaacaagctacagcctatgccacgtacccacagccaggacagccgtacggcatttcctcatatggtgcattgtgggcaggcatcaagactgaaggtggattgtcacagtctcagtcacctggacagacaggatttctcagctatggcacaagcttcagtacccctcaacctggacaggcaccatacagctaccagatgcaaggtagcagttttacaacatcatcaggaatatatacaggaaataattcactcacaaattcctctggatttaatagttcacagcaggactatccgtcttatcccagttttggccagggtcagtacgcacagtattataacagctcaccgtatccagcacattatatgaccagcagcaacaccagcccaacgacaccatccaccaatgccacttaccagcttcaagaaccgccatctggcatcaccagccaagcagttacagatcccacagcagagtacagcacaatccacagcccatcaacacccattaaagattcagattctgatcgattgcgtcgaggttcagatgggaaatcacgtggacggggccgaagaaacaataatccttcacctcccccagattctgatcttgagagagtgttcatctgggacttggatgagacaatcattgttttccactccttgcttactgggtcctacgccaacagatatgggagggatccacccacttcagtttcccttggactgcgaatggaagaaatgattttcaacttggcagacacacatttattttttaatgacttagaagaatgtgaccaagtccatatagatgatgtttcttcagatgataacggacaggacctaagcacatataactttggaacagatggctttcctgctgcagcaaccagtgctaacttatgtttggcaactggtgtacggggcggtgtggactggatgagaaagttggccttccgctacagacgggtaaaagagatctacaacacctacaaaaataatgttggaggtctgcttggtccagctaagagggaagcctggctgcagttgagggccgaaattgaagccctgaccgactcctggttgacactggccctgaaagcactctcgctcattcactcccggacaaactgtgtgaatattttagtaacaactactcagctcatcccagcattggcgaaagtcctgctgtatgggttaggaattgtatttccaatagaaaatatttacagtgcaactaaaataggaaaagaaagctgttttgagagaataattcaaaggtttggaagaaaagtggtgtatgttgttataggagatggtgtagaagaagaacaaggagcaaaaaagcacgcgatgcccttctggaggatctccagccactcggacctcatggccctgcaccatgccttggaactggagtacctgtaacagcgctcggcactttgacagcgcacagctgctctgtgaccagggacagatccagcaggccccagtctcgcatcagcgccggcctccagaacttagcaatttccgcctggtgatgcgcagttgctgtcagtcttgacctctgcctttgtggtgaatggaggaccacgtctatttcatcagaacagctgttgactctagtactgtgaatccagtgaaaataagccatgagaatgttttagcacagcgttatgtgtctgccacattaactacacggttcaaacctgtgaagaaaggacctgcaaacgcttcagttgttagcattttcaatgtgatataaacagcttctccaatacagcaaacctaattgcacaacagagactgaaatgtgtttcctgaataccagtggaggaattttcttgtaaagaaggtttactttttggtgtctcatacccagggtaatctgtacatctctacttatttatgaacagactttttttaaaaagataaaaaaacagctttattgaggtataattcacccaccagacttttttaaacatcaaataattgaagagacaatagcattagaaataagtgattaaaggcctctgcctcacaacatggcaagtacagtactttgaattttagcacattgcatagtagttttaagtatgtctaatttaaacgtataatatgtacatcactgagacaatcatgtacagaaagaatttttggtgtaaatttgtaataatggataattcttttacatattgtttagggaaatgatattgaaaggtagcaatgcctggatagtgaagcatgaggcagcacgtgcacaaattcatgtgccgtgccttatctgagttttcggtataaatatgtagataatggattttttttttttagataatgttgtcaagaccaaaagcatggatgtcaagtgtcagtaaggattttgttttctaaaattttttcctgcatcagttcttctgagggccttgatgaaataacacagcagtttcttaaacaatttgaaacaaaatgagctctcctaccacctcactttttcatttccacactaatgtattatatgtaactacttggaaaaaataattattcaaatgcttcttcccacaaagaatatagatgatagtagatatattttattaataaaatggttcatgaatcggagactaacaaagttttcatgtgctcagaattattaattatcgtgtctgcattttctttcgataaaggaagacacacgatgctaatccggaaatcagcaaactttgcattactccctatgtgcgtattttctctttcttcctgtcaccctgaggaaggttcattgccattgtcatcaccatggaaacaacgttcctctccacctgcattatgtactacatgacaggcatcaatctggggaaataataaaattatcacctttgtcagaccataagagtttctccaaaagtggtcagtttggctgggcaatattttctctcatctaacaaacacaatccattgtcatgaaattacccttaggatgagtcttctttaatcaatcatatattgggcgggaaaaacaccagctttgacccgaagtagttgaagagctacttcattcttttctgaagttgtgtgttgctgctagaaatagtcatttgtgaattatccaaattgtttaaattcacaattgaattagttttttcttcctttttgcttgaagcaaacagttgacaatttttaaccttttcattttatgtttttgtactctgcagactgaaaagacaaagtttatcttggccttactgtataaaggtgtgctgtgtccaccgttgtgtacagaatttttcttcattaattttgtgtttaagttaataaaatttatttgtgatgtactgtaa

SEQ ID NO: 6920 - DNA, 3743 bp, Homo sapiens
  source 1..3743: mol_type = unassigned DNA
aaaactatgtcaggaatggaggtttgctaacccagaaaattcgaaggaacacattaaactggtggatgcagcagatgtaagcgctgtgcaaacatctcaagccagttcagatgttgctgtttcctcaagttgcaggtctatggaaatgcaggatctaaccagcccgcatagccgtctgagtggtagtagtgaatcccccagtggccccaaactcggtaactctcatataaatagtaattccatgactcccaatggcaccgaagttaaaacagagccaatgagcagcagtgaaacagcttcaacgacagccgacgggtctttaaacaatttctcaggttcagcaattgggagcagtagtttcagcccacgaccaactcaccagttctctccaccacagatttacccttccaatttaccacaggaatgcaacaagctacagcctatgccacgtacccacagccaggacagccgtacggcatttcctcatatggcatcaagactgaaggtggattgtcacagtctcagtcacctggacagacaggatttctcagctatggcacaagcttcagtacccctcaacctggacaggcaccatacagctaccagatgcaaggtagcagttttacaacatcatcaggaatatatacaggaaataattcactcacaaattcctctggatttaatagttcacagcaggactatccgtcttatcccagttttggccagggtcagtacgcacagtattataacagctcaccgtatccagcacattatatgaccagcagcaacaccagcccaacgacaccatccaccaatgccacttaccagcttcaagaaccgccatctggcatcaccagccaagcagttacagatcccacagcagagtacagcacaatccacagcccatcaacacccattaaagattcagattctgatcgattgcgtcgaggttcagatgggaaatcacgtggacggggccgaagaaacaataatccttcacctcccccagattctgatcttgagagagtgttcatctgggacttggatgagacaatcattgttttccactccttgcttactgggtcctacgccaacagatatgggagggatccacccacttcagtttcccttggactgcgaatggaagaaatgattttcaacttggcagacacacatttattttttaatgacttagaagaatgtgaccaagtccatatagatgatgtttcttcagatgataacggacaggacctaagcacatataactttggaacagatggctttcctgctgcagcaaccagtgctaacttatgtttggcaactggtgtacggggcggtgtggactggatgagaaagttggccttccgctacagacgggtaaaagagatctacaacacctacaaaaataatgttggaggtctgcttggtccagctaagagggaagcctggctgcagttgagggccgaaattgaagccctgaccgactcctggttgacactggccctgaaagcactctcgctcattcactcccggacaaactgtgtgaatattttagtaacaactactcagctcatcccagcattggcgaaagtcctgctgtatgggttaggaattgtatttccaatagaaaatatttacagtgcaactaaaataggaaaagaaagctgttttgagagaataattcaaaggtttggaagaaaagtggtgtatgttgttataggagatggtgtagaagaagaacaaggagcaaaaaagcacgcgatgcccttctggaggatctccagccactcggacctcatggccctgcaccatgccttggaactggagtacctgtaacagcgctcggcactttgacagcgcacagctgctctgtgaccagggacagatccagcaggccccagtctcgcatcagcgccggcctccagaacttagcaatttccgcctggtgatgcgcagttgctgtcagtcttgacctctgcctttgtggtgaatggaggaccacgtctatttcatcagaacagctgttgactctagtactgtgaatccagtgaaaataagccatgagaatgttttagcacagcgttatgtgtctgccacattaactacacggttcaaacctgtgaagaaaggacctgcaaacgcttcagttgttagcattttcaatgtgatataaacagcttctccaatacagcaaacctaattgcacaacagagactgaaatgtgtttcctgaataccagtggaggaattttcttgtaaagaaggtttactttttggtgtctcatacccagggtaatctgtacatctctacttatttatgaacagactttttttaaaaagataaaaaaacagctttattgaggtataattcacccaccagacttttttaaacatcaaataattgaagagacaatagcattagaaataagtgattaaaggcctctgcctcacaacatggcaagtacagtactttgaattttagcacattgcatagtagttttaagtatgtctaatttaaacgtataatatgtacatcactgagacaatcatgtacagaaagaatttttggtgtaaatttgtaataatggataattcttttacatattgtttagggaaatgatattgaaaggtagcaatgcctggatagtgaagcatgaggcagcacgtgcacaaattcatgtgccgtgccttatctgagttttcggtataaatatgtagataatggattttttttttttagataatgttgtcaagaccaaaagcatggatgtcaagtgtcagtaaggattttgttttctaaaattttttcctgcatcagttcttctgagggccttgatgaaataacacagcagtttcttaaacaatttgaaacaaaatgagctctcctaccacctcactttttcatttccacactaatgtattatatgtaactacttggaaaaaataattattcaaatgcttcttcccacaaagaatatagatgatagtagatatattttattaataaaatggttcatgaatcggagactaacaaagttttcatgtgctcagaattattaattatcgtgtctgcattttctttcgataaaggaagacacacgatgctaatccggaaatcagcaaactttgcattactccctatgtgcgtattttctctttcttcctgtcaccctgaggaaggttcattgccattgtcatcaccatggaaacaacgttcctctccacctgcattatgtactacatgacaggcatcaatctggggaaataataaaattatcacctttgtcagaccataagagtttctccaaaagtggtcagtttggctgggcaatattttctctcatctaacaaacacaatccattgtcatgaaattacccttaggatgagtcttctttaatcaatcatatattgggcgggaaaaacaccagctttgacccgaagtagttgaagagctacttcattcttttctgaagttgtgtgttgctgctagaaatagtcatttgtgaattatccaaattgtttaaattcacaattgaattagttttttcttcctttttgcttgaagcaaacagttgacaatttttaaccttttcattttatgtttttgtactctgcagactgaaaagacaaagtttatcttggccttactgtataaaggtgtgctgtgtccaccgttgtgtacagaatttttcttcattaattttgtgtttaagttaataaaatttatttgtgatgtactgtaa

SEQ ID NO: 6921 - DNA, 4326 bp, Homo sapiens
  source 1..4326: mol_type = unassigned DNA
aaaccaataaggttaggacaagagaatagctgtggtttgcgttgcaaaaaccaaaaaaaaaaaaaaaaaaaaaaaaagaaagccccgaggctccatgggcagacctacaaggctgcgcaaacaaatcgagggatgagattctgctgtttctttgtctagggttctcagatgctatctgccgctgctgtttggtggggaaggagcgctgggcgcaaagctgttaccaaacagaacggtgggagctgatggctccgagtttggggcgaggtagaaactctccagtgccacttccgactttaagccttcctgttgccgtccactgtggcgggtttcttcctggggaacacgttttcgctcagtcgctcggcagcccgagcctgcggcagcggccaggcgcctgccccctgcgccgagctttcccctgcagaggcgctccactcccagaagcgccgcggctgcaccagagcgcctgagagcccccgcgcgtacccatccaggagcaaaactatgtcaggaatggaggtttgctaacccagaaaattcgaaggaacacattaaactggtggatgcagcagatgtaagcgctgtgcaaacatctcaagccagttcagatgttgctgtttcctcaagttgcaggtctatggaaatgcaggatctaaccagcccgcatagccgtctgagtggtagtagtgaatcccccagtggccccaaactcggtaactctcatataaatagtaattccatgactcccaatggcaccgaagttaaaacagagccaatgagcagcagtgaaacagcttcaacgacagccgacgggtctttaaacaatttctcaggttcagcaattgggagcagtagtttcagcccacgaccaactcaccagttctctccaccacagatttacccttccaacagaccatacccacatattctccctaccccttcctcacaaactatggctgcatatgggcaaacacagtttaccacaggaatgcaacaagctacagcctatgccacgtacccacagccaggacagccgtacggcatttcctcatatggtgcattgtgggcaggcatcaagactgaaggtggattgtcacagtctcagtcacctggacagacaggatttctcagctatggcacaagcttcagtacccctcaacctggacaggcaccatacagctaccagatgcaaggtagcagttttacaacatcatcaggaatatatacaggaaataattcactcacaaattcctctggatttaatagttcacagcaggactatccgtcttatcccagttttggccagggtcagtacgcacagtattataacagctcaccgtatccagcacattatatgaccagcagcaacaccagcccaacgacaccatccaccaatgccacttaccagcttcaagaaccgccatctggcatcaccagccaagcagttacagatcccacagcagagtacagcacaatccacagcccatcaacacccattaaagattcagattctgatcgattgcgtcgaggttcagatgggaaatcacgtggacggggccgaagaaacaataatccttcacctcccccagattctgatcttgagagagtgttcatctgggacttggatgagacaatcattgttttccactccttgcttactgggtcctacgccaacagatatgggagggatccacccacttcagtttcccttggactgcgaatggaagaaatgattttcaacttggcagacacacatttattttttaatgacttagaagaatgtgaccaagtccatatagatgatgtttcttcagatgataacggacaggacctaagcacatataactttggaacagatggctttcctgctgcagcaaccagtgctaacttatgtttggcaactggtgtacggggcggtgtggactggatgagaaagttggccttccgctacagacgggtaaaagagatctacaacacctacaaaaataatgttggaggtctgcttggtccagctaagagggaagcctggctgcagttgagggccgaaattgaagccctgaccgactcctggttgacactggccctgaaagcactctcgctcattcactcccggacaaactgtgtgaatattttagtaacaactactcagctcatcccagcattggcgaaagtcctgctgtatgggttaggaattgtatttccaatagaaaatatttacagtgcaactaaaataggaaaagaaagctgttttgagagaataattcaaaggtttggaagaaaagtggtgtatgttgttataggagatggtgtagaagaagaacaaggagcaaaaaagcacgcgatgcccttctggaggatctccagccactcggacctcatggccctgcaccatgccttggaactggagtacctgtaacagcgctcggcactttgacagcgcacagctgctctgtgaccagggacagatccagcaggccccagtctcgcatcagcgccggcctccagaacttagcaatttccgcctggtgatgcgcagttgctgtcagtcttgacctctgcctttgtggtgaatggaggaccacgtctatttcatcagaacagctgttgactctagtactgtgaatccagtgaaaataagccatgagaatgttttagcacagcgttatgtgtctgccacattaactacacggttcaaacctgtgaagaaaggacctgcaaacgcttcagttgttagcattttcaatgtgatataaacagcttctccaatacagcaaacctaattgcacaacagagactgaaatgtgtttcctgaataccagtggaggaattttcttgtaaagaaggtttactttttggtgtctcatacccagggtaatctgtacatctctacttatttatgaacagactttttttaaaaagataaaaaaacagctttattgaggtataattcacccaccagacttttttaaacatcaaataattgaagagacaatagcattagaaataagtgattaaaggcctctgcctcacaacatggcaagtacagtactttgaattttagcacattgcatagtagttttaagtatgtctaatttaaacgtataatatgtacatcactgagacaatcatgtacagaaagaatttttggtgtaaatttgtaataatggataattcttttacatattgtttagggaaatgatattgaaaggtagcaatgcctggatagtgaagcatgaggcagcacgtgcacaaattcatgtgccgtgccttatctgagttttcggtataaatatgtagataatggattttttttttttagataatgttgtcaagaccaaaagcatggatgtcaagtgtcagtaaggattttgttttctaaaattttttcctgcatcagttcttctgagggccttgatgaaataacacagcagtttcttaaacaatttgaaacaaaatgagctctcctaccacctcactttttcatttccacactaatgtattatatgtaactacttggaaaaaataattattcaaatgcttcttcccacaaagaatatagatgatagtagatatattttattaataaaatggttcatgaatcggagactaacaaagttttcatgtgctcagaattattaattatcgtgtctgcattttctttcgataaaggaagacacacgatgctaatccggaaatcagcaaactttgcattactccctatgtgcgtattttctctttcttcctgtcaccctgaggaaggttcattgccattgtcatcaccatggaaacaacgttcctctccacctgcattatgtactacatgacaggcatcaatctggggaaataataaaattatcacctttgtcagaccataagagtttctccaaaagtggtcagtttggctgggcaatattttctctcatctaacaaacacaatccattgtcatgaaattacccttaggatgagtcttctttaatcaatcatatattgggcgggaaaaacaccagctttgacccgaagtagttgaagagctacttcattcttttctgaagttgtgtgttgctgctagaaatagtcatttgtgaattatccaaattgtttaaattcacaattgaattagttttttcttcctttttgcttgaagcaaacagttgacaatttttaaccttttcattttatgtttttgtactctgcagactgaaaagacaaagtttatcttggccttactgtataaaggtgtgctgtgtccaccgttgtgtacagaatttttcttcattaattttgtgtttaagttaataaaatttatttgtgatgtactgtaa

SEQ ID NO: 6922 - DNA, 3930 bp, Homo sapiens
  source 1..3930: mol_type = unassigned DNA
cgagcctgcggcagcggccaggcgcctgccccctgcgccgagctttcccctgcagaggcgctccactcccagaagcgccgcggctgcaccagagcgcctgagagcccccgcgcgtacccatccaggagcaaaactatgtcaggaatggaggtttgctaacccagaaaattcgaaggaacacattaaactggtggatgcagcagatgtaagcgctgtgcaaacatctcaagccagttcagatgttgctgtttcctcaagttgcaggtctatggaaatgcaggatctaaccagcccgcatagccgtctgagtggtagtagtgaatcccccagtggccccaaactcggtaactctcatataaatagtaattccatgactcccaatggcaccgaagttaaaacagagccaatgagcagcagtgaaacagcttcaacgacagccgacgggtctttaaacaatttctcaggttcagcaattgggagcagtagtttcagcccacgaccaactcaccagttctctccaccacagatttacccttccaaaccatacccacatattctccctaccccttcctcacaaactatggctgcatatgggcaaacacagtttaccacaggaatgcaacaagctacagcctatgccacgtacccacagccaggacagccgtacggcatttcctcatatggcatcaagactgaaggtggattgtcacagtctcagtcacctggacagacaggatttctcagctatggcacaagcttcagtacccctcaacctggacaggcaccatacagctaccagatgcaaggtagcagttttacaacatcatcaggaatatatacaggaaataattcactcacaaattcctctggatttaatagttcacagcaggactatccgtcttatcccagttttggccagggtcagtacgcacagtattataacagctcaccgtatccagcacattatatgaccagcagcaacaccagcccaacgacaccatccaccaatgccacttaccagcttcaagaaccgccatctggcatcaccagccaagcagttacagatcccacagcagagtacagcacaatccacagcccatcaacacccattaaagattcagattctgatcgattgcgtcgaggttcagatgggaaatcacgtggacggggccgaagaaacaataatccttcacctcccccagattctgatcttgagagagtgttcatctgggacttggatgagacaatcattgttttccactccttgcttactgggtcctacgccaacagatatgggagggatccacccacttcagtttcccttggactgcgaatggaagaaatgattttcaacttggcagacacacatttattttttaatgacttagaagaatgtgaccaagtccatatagatgatgtttcttcagatgataacggacaggacctaagcacatataactttggaacagatggctttcctgctgcagcaaccagtgctaacttatgtttggcaactggtgtacggggcggtgtggactggatgagaaagttggccttccgctacagacgggtaaaagagatctacaacacctacaaaaataatgttggaggtctgcttggtccagctaagagggaagcctggctgcagttgagggccgaaattgaagccctgaccgactcctggttgacactggccctgaaagcactctcgctcattcactcccggacaaactgtgtgaatattttagtaacaactactcagctcatcccagcattggcgaaagtcctgctgtatgggttaggaattgtatttccaatagaaaatatttacagtgcaactaaaataggaaaagaaagctgttttgagagaataattcaaaggtttggaagaaaagtggtgtatgttgttataggagatggtgtagaagaagaacaaggagcaaaaaagcacgcgatgcccttctggaggatctccagccactcggacctcatggccctgcaccatgccttggaactggagtacctgtaacagcgctcggcactttgacagcgcacagctgctctgtgaccagggacagatccagcaggccccagtctcgcatcagcgccggcctccagaacttagcaatttccgcctggtgatgcgcagttgctgtcagtcttgacctctgcctttgtggtgaatggaggaccacgtctatttcatcagaacagctgttgactctagtactgtgaatccagtgaaaataagccatgagaatgttttagcacagcgttatgtgtctgccacattaactacacggttcaaacctgtgaagaaaggacctgcaaacgcttcagttgttagcattttcaatgtgatataaacagcttctccaatacagcaaacctaattgcacaacagagactgaaatgtgtttcctgaataccagtggaggaattttcttgtaaagaaggtttactttttggtgtctcatacccagggtaatctgtacatctctacttatttatgaacagactttttttaaaaagataaaaaaacagctttattgaggtataattcacccaccagacttttttaaacatcaaataattgaagagacaatagcattagaaataagtgattaaaggcctctgcctcacaacatggcaagtacagtactttgaattttagcacattgcatagtagttttaagtatgtctaatttaaacgtataatatgtacatcactgagacaatcatgtacagaaagaatttttggtgtaaatttgtaataatggataattcttttacatattgtttagggaaatgatattgaaaggtagcaatgcctggatagtgaagcatgaggcagcacgtgcacaaattcatgtgccgtgccttatctgagttttcggtataaatatgtagataatggattttttttttttagataatgttgtcaagaccaaaagcatggatgtcaagtgtcagtaaggattttgttttctaaaattttttcctgcatcagttcttctgagggccttgatgaaataacacagcagtttcttaaacaatttgaaacaaaatgagctctcctaccacctcactttttcatttccacactaatgtattatatgtaactacttggaaaaaataattattcaaatgcttcttcccacaaagaatatagatgatagtagatatattttattaataaaatggttcatgaatcggagactaacaaagttttcatgtgctcagaattattaattatcgtgtctgcattttctttcgataaaggaagacacacgatgctaatccggaaatcagcaaactttgcattactccctatgtgcgtattttctctttcttcctgtcaccctgaggaaggttcattgccattgtcatcaccatggaaacaacgttcctctccacctgcattatgtactacatgacaggcatcaatctggggaaataataaaattatcacctttgtcagaccataagagtttctccaaaagtggtcagtttggctgggcaatattttctctcatctaacaaacacaatccattgtcatgaaattacccttaggatgagtcttctttaatcaatcatatattgggcgggaaaaacaccagctttgacccgaagtagttgaagagctacttcattcttttctgaagttgtgtgttgctgctagaaatagtcatttgtgaattatccaaattgtttaaattcacaattgaattagttttttcttcctttttgcttgaagcaaacagttgacaatttttaaccttttcattttatgtttttgtactctgcagactgaaaagacaaagtttatcttggccttactgtataaaggtgtgctgtgtccaccgttgtgtacagaatttttcttcattaattttgtgtttaagttaataaaatttatttgtgatgta

SEQ ID NO: 6923 - DNA, 3404 bp, Homo sapiens
  source 1..3404: mol_type = unassigned DNA
gggcagacctacaaggctgcgcaaacaaatcgagggatgagattctgctgtttctttgtctagggttctcagatgctatctgccgctgctgtttggtggggaaggagcgctgggcgcaaagctgttaccaaacagaacggtgggagctgatggctccgagtttggggcgaggtagaaactctccagtgccacttccgactttaagccttcctgttgccgtccactgtggcgggtttcttcctggggaacacgttttcgctcagtcgctcggcagcccgagcctgcggcagcggccaggcgcctgccccctgcgccgagctttcccctgcagaggcgctccactcccagaagcgccgcggctgcaccagagcgcctgagagcccccgcgcgtacccatccaggagcaaaactatgtcaggaatggaggtttgctaacccagaaaattcgaaggaacacattaaactggtggatgcagcagatgtaagcgctgtgcaaacatctcaagccagttcagatgttgctgtttcctcaagttgcagttaaaacagagccaatgagcagcagtgaaacagcttcaacgacagccgacgggtctttaaacaatttctcaggttcagcaattgggagcagtagtttcagcccacgaccaactcaccagttctctccaccacagatttacccttccaaaccatacccacatattctccctaccccttcctcacaaactatggctgcatatgggcaaacacagtttaccacaggaatgcaacaagctacagcctatgccacgtacccacagccaggacagccgtacggcatttcctcatatggtgcattgtgggcaggcatcaagactgaaggtggattgtcacagtctcagtcacctggacagacaggatttctcagctatggcacaagcttcagtacccctcaacctggacaggcaccatacagctaccagatgcaaggtagcagttttacaacatcatcaggaatatatacaggaaataattcactcacaaattcctctggatttaatagttcacagcaggactatccgtcttatcccagttttggccagggtcagtacgcacagtattataacagctcaccgtatccagcacattatatgaccagcagcaacaccagcccaacgacaccatccaccaatgccacttaccagcttcaagaaccgccatctggcatcaccagccaagcagttacagatcccacagcagagtacagcacaatccacagcccatcaacacccattaaagattcagattctgatcgattgcgtcgaggttcagatgggaaatcacgtggacggggccgaagaaacaataatccttcacctcccccagattctgatcttgagagagtgttcatctgggacttggatgagacaatcattgttttccactccttgcttactgggtcctacgccaacagatatgggagggatccacccacttcagtttcccttggactgcgaatggaagaaatgattttcaacttggcagacacacatttattttttaatgacttagaagaatgtgaccaagtccatatagatgatgtttcttcagatgataacggacaggacctaagcacatataactttggaacagatggctttcctgctgcagcaaccagtgctaacttatgtttggcaactggtgtacggggcggtgtggactggatgagaaagttggccttccgctacagacgggtaaaagagatctacaacacctacaaaaataatgttggaggtctgcttggtccagctaagagggaagcctggctgcagttgagggccgaaattgaagccctgaccgactcctggttgacactggccctgaaagcactctcgctcattcactcccggacaaactgtgtgaatattttagtaacaactactcagctcatcccagcattggcgaaagtcctgctgtatgggttaggaattgtatttccaatagaaaatatttacagtgcaactaaaataggaaaagaaagctgttttgagagaataattcaaaggtttggaagaaaagtggtgtatgttgttataggagatggtgtagaagaagaacaaggagcaaaaaagcacgcgatgcccttctggaggatctccagccactcggacctcatggccctgcaccatgccttggaactggagtacctgtaacagcgctcggcactttgacagcgcacagctgctctgtgaccagggacagatccagcaggccccagtctcgcatcagcgccggcctccagaacttagcaatttccgcctggtgatgcgcagttgctgtcagtcttgacctctgcctttgtggtgaatggaggaccacgtctatttcatcagaacagctgttgactctagtactgtgaatccagtgaaaataagccatgagaatgttttagcacagcgttatgtgtctgccacattaactacacggttcaaacctgtgaagaaaggacctgcaaacgcttcagttgttagcattttcaatgtgatataaacagcttctccaatacagcaaacctaattgcacaacagagactgaaatgtgtttcctgaataccagtggaggaattttcttgtaaagaaggtttactttttggtgtctcatacccagggtaatctgtacatctctacttatttatgaacagactttttttaaaaagataaaaaaacagctttattgaggtataattcacccaccagacttttttaaacatcaaataattgaagagacaatagcattagaaataagtgattaaaggcctctgcctcacaacatggcaagtacagtactttgaattttagcacattgcatagtagttttaagtatgtctaatttaaacgtataatatgtacatcactgagacaatcatgtacagaaagaatttttggtgtaaatttgtaataatggataattcttttacatattgtttagggaaatgatattgaaaggtagcaatgcctggatagtgaagcatgaggcagcacgtgcacaaattcatgtgccgtgccttatctgagttttcggtataaatatgtagataatggattttttttttttagataatgttgtcaagaccaaaagcatggatgtcaagtgtcagtaaggattttgttttctaaaattttttcctgcatcagttcttctgagggccttgatgaaataacacagcagtttcttaaacaatttgaaacaaaatgagctctcctaccacctcactttttcatttccacactaatgtattatatgtaactacttggaaaaaataattattcaaatgcttcttcccacaaagaatatagatgatagtagatatattttattaataaaatggttcatgaatcggagactaacaaagttttcatgtgctc

SEQ ID NO: 6924 - DNA, 2199 bp, Homo sapiens
  source 1..2199: mol_type = unassigned DNA
gagagcattgtcgttctcagccatgtgctctgtataattaagagctgacactgaagcagagtaacaacatcttctaatttttttacccctgatcacaggtgcaaacatctcaagccagttcagatgttgctgtttcctcaagttgcaggtctatggaaatgcaggatctaaccagcccgcatagccgtctgagtggtagtagtgaatcccccagtggccccaaactcggtaactctcatataaatagtaattccatgactcccaatggcaccgaagttaaaacagagccaatgagcagcagtgaaacagcttcaacgacagccgacgggtctttaaacaatttctcaggttcagcaattgggagcagtagtttcagcccacgaccaactcaccagttctctccaccacagatttacccttccaaaccatacccacatattctccctaccccttcctcacaaactatggctgcatatgggcaaacacagtttaccacaggaatgcaacaagctacagcctatgccacgtacccacagccaggacagccgtacggcatttcctcatatggtgcattgtgggcaggcatcaagactgaaggtggattgtcacagtctcagtcacctggacagacaggatttctcagctatggcacaagcttcagtacccctcaacctggacaggcaccatacagctaccagatgcaaggtagcagttttacaacatcatcaggaatatatacaggaaataattcactcacaaattcctctggatttaatagttcacagcaggactatccgtcttatcccagttttggccagggtcagtacgcacagtattataacagctcaccgtatccagcacattatatgaccagcagcaacaccagcccaacgacaccatccaccaatgccacttaccagcttcaagaaccgccatctggcatcaccagccaagcagttacagatcccacagcagagtacagcacaatccacagcccatcaacacccattaaagattcagattctgatcgattgcgtcgaggttcagatgggaaatcacgtggacggggccgaagaaacaataatccttcacctcccccagattctgatcttgagagagtgttcatctgggacttggatgagacaatcattgttttccactccttgcttactgggtcctacgccaacagatatgggagggatccacccacttcagtttcccttggactgcgaatggaagaaatgattttcaacttggcagacacacatttattttttaatgacttagaagaatgtgaccaagtccatatagatgatgtttcttcagatgataacggacaggacctaagcacatataactttggaacagatggctttcctgctgcagcaaccagtgctaacttatgtttggcaactggtgtacggggcggtgtggactggatgagaaagttggccttccgctacagacgggtaaaagagatctacaacacctacaaaaataatgttggaggtctgcttggtccagctaagagggaagcctggctgcagttgagggccgaaattgaagccctgaccgactcctggttgacactggccctgaaagcactctcgctcattcactcccggacaaactgtgtgaatattttagtaacaactactcagctcatcccagcattggcgaaagtcctgctgtatgggttaggaattgtatttccaatagaaaatatttacagtgcaactaaaataggaaaagaaagctgttttgagagaataattcaaaggtttggaagaaaagtggtgtatgttgttataggagatggtgtagaagaagaacaaggagcaaaaaagcacgcgatgcccttctggaggatctccagccactcggacctcatggccctgcaccatgccttggaactggagtacctgtaacagcgctcggcactttgacagcgcacagctgctctgtgaccagggacagatccagcaggccccagtctcgcatcagcgccggcctccagaacttagcaatttccgcctggtgatgcgcagttgctgtcagtcttgacctctgcctttgtggtgaatggaggaccacgtctatttcatcagaacagctgttgactctagtactgtgaatccagtgaaaataagccatgagaatgttttagcacagcgttatgtgtctgccacattaactaca

SEQ ID NO: 6925 - DNA, 2373 bp, Homo sapiens
  source 1..2373: mol_type = unassigned DNA
ctcctttttctcttttggttaaaagagagcattgtcgttctcagccatgtgctctgtataattaagagctgacactgaagcagagtaacaacatcttctaatttttttacccctgatcacaggtgcaaacatctcaagccagttcagatgttgctgtttcctcaagttgcaggtctatggaaatgcaggatctaaccagcccgcatagccgtctgagtggtagtagtgaatcccccagtggccccaaactcggtaactctcatataaatagtaattccatgactcccaatggcaccgaagttaaaacagagccaatgagcagcagtgaaacagcttcaacgacagccgacgggtctttaaacaatttctcaggttcagcaattgggagcagtagtttcagcccacgaccaactcaccagttctctccaccacagatttacccttccaagtaagatgtattttctcttaatcaataaataacttctctgagtagacttttatttatttaaagtcatgtctgtgcccacatgttccatcttaatttaaatgaaagtgcatttcatagagatgtaaacatattgatacaaatttattttgagcatcatgtagtggagacactgaagtatttcagtgctttgtcaattctgtgtgaaagttttactttaagatacaatatttagctggaatttgtgatgtggttgttaatcggtttgcatgtttccatctaatgcatgggctttctattttctgtcatttctgacaaatagcagaccatacccacatattctccctaccccttcctcacaaactatggctgcatatgggcaaacacagtttaccacaggaatgcaacaagctacagcctatgccacgtacccacagccaggacagccgtacggcatttcctcatatggtgcattgtgggcaggcatcaagactgaaggtggattgtcacagtctcagtcacctggacagacaggatttctcagctatggcacaagcttcagtacccctcaacctggacaggcaccatacagctaccagatgcaaggtagcagttttacaacatcatcaggaatatatacaggaaataattcactcacaaattcctctggatttaatagttcacagcaggactatccgtcttatcccagttttggccagggtcagtacgcacagtattataacagctcaccgtatccagcacattatatgaccagcagcaacaccagcccaacgacaccatccaccaatgccacttaccagcttcaagaaccgccatctggcatcaccagccaagcagttacagatcccacagcagagtacagcacaatccacagcccatcaacacccattaaagattcagattctgatcgattgcgtcgaggttcagatgggaaatcacgtggacggggccgaagaaacaataatccttcacctcccccagattctgatcttgagagagtgttcatctgggacttggatgagacaatcattgttttccactccttgcttactgggtcctacgccaacagatatgggagggatccacccacttcagtttcccttggactgcgaatggaagaaatgattttcaacttggcagacacacatttattttttaatgacttagaagaatgtgaccaagtccatatagatgatgtttcttcagatgataacggacaggacctaagcacatataactttggaacagatggctttcctgctgcagcaaccagtgctaacttatgtttggcaactggtgtacggggcggtgtggactggatgagaaagttggccttccgctacagacgggtaaaagagatctacaacacctacaaaaataatgttggaggtctgcttggtccagctaagagggaagcctggctgcagttgagggccgaaattgaagccctgaccgactcctggttgacactggccctgaaagcactctcgctcattcactcccggacaaactgtgtgaatattttagtaacaactactcagctcatcccagcattggcgaaagtcctgctgtatgggttaggaattgtatttccaatagaaaatatttacagtgcaactaaaataggaaaagaaagctgttttgagagaataattcaaaggtttggaagaaaagtggtgtatgttgttataggagatggtgtagaagaagaacaaggagcaaaaaagcacgcgatgcccttctggaggatctccagccactcggacctcatggccctgcaccatgccttggaactggagtacctgtaacagcgctcggcactttgacagcgcacagctgctctgtgaccagggacagatccagcaggccccagtctcgcatcagcgccggcctccagaacttagcaa

SEQ ID NO: 6926 - DNA, 1723 bp, Homo sapiens
  source 1..1723: mol_type = unassigned DNA
atgttgctgtttcctcaagttgcaggtctatggaaatgcaggatctaaccagcccgcatagccgtctgagtggtagtagtgaatcccccagtggccccaaactcggtaactctcatataaatagtaattccatgactcccaatggcaccgaagttaaaacagagccaatgagcagcagtgaaacagcttcaacgacagccgacgggtctttaaacaatttctcaggttcagcaattgggagcagtagtttcagcccacgaccaactcaccagttctctccaccacagatttacccttccaacagaccatacccacatattctccctaccccttcctcacaaactatggctgcatatgggcaaacacagtttaccacaggaatgcaacaagctacagcctatgccacgtacccacagccaggacagccgtacggcatttcctcatatggcatcaagactgaaggtggattgtcacagtctcagtcacctggacagacaggatttctcagctatggcacaagcttcagtacccctcaacctggacaggcaccatacagctaccagatgcaaggtagcagttttacaacatcatcaggaatatatacaggaaataattcactcacaaattcctctggatttaatagttcacagcaggactatccgtcttatcccagttttggccagggtcagtacgcacagtattataacagctcaccgtatccagcacattatatgaccagcagcaacaccagcccaacgacaccatccaccaatgccacttaccagcttcaagaaccgccatctggcatcaccagccaagcagttacagatcccacagcagagtacagcacaatccacagcccatcaacacccattaaagattcagattctgatcgattgcgtcgaggttcagatgggaaatcacgtggacggggccgaagaaacaataatccttcacctcccccagattctgatcttgagagagtgttcatctgggacttggatgagacaatcattgttttccactccttgcttactgggtcctacgccaacagatatgggagggaatgtgaccaagtccatatagatgatgtttcttcagatgataacggacaggacctaagcacatataactttggaacagatggctttcctgctgcagcaaccagtgctaacttatgtttggcaactggtgtacggggcggtgtggactggatgagaaagttggccttccgctacagacgggtaaaagagatctacaacacctacaaaaataatgttggaggtctgcttggtccagctaagagggaagcctggctgcagttgagggccgaaattgaagccctgaccgactcctggttgacactggccctgaaagcactctcgctcattcactcccggacaaactgtgtgaatattttagtaacaactactcagctcatcccagcattggcgaaagtcctgctgtatgggttaggaattgtatttccaatagaaaatatttacagtgcaactaaaataggaaaagaaagctgttttgagagaataattcaaaggtttggaagaaaagtggtgtatgttgttataggagatggtgtagaagaagaacaaggagcaaaaaagcacgcgatgcccttctggaggatctccagccactcggacctcatggccctgcaccatgccttggaactggagtacctgtaacagcgctcggcactttgaca

SEQ ID NO: 6927 - DNA, 879 bp, Homo sapiens
  source 1..879: mol_type = unassigned DNA
ttaccagcttcaagaaccgccatctggcatcaccagccaagcagttacagatcccacagcagagtacagcacaatccacagcccatcaacacccattaaagattcagattctgatcgattgcgtcgaggttcagatgggaaatcacgtggacggggccgaagaaacaataatccttcacctcccccagattctgatcttgagagagtgttcatctgggacttggatgagacaatcattgttttccactccttgcttactgggtcctacgccaacagatatgggagggatccacccacttcagtttcccttggactgcgaatggaagaaatgattttcaacttggcagacacacatttattttttaatgacttagaagagtcaagggcttccagagagtccatgatgctggtgaagctgggcagaagaaagcctagcagcgcttgagctcttcatgaggtctatttgaaagcacagtgagggcttggacgtgcccttagaaagcacaatggaatcatgctgttctgcatcagaatgtgaccaagtccatatagatgatgtttcttcagatgataacggacaggacctaagcacatataactttggaacagatggctttcctgctgcagcaaccagtgctaacttatgtttggcaactggtgtacggggcggtgtggactggatgagaaagttggccttccgctacagacgggtaaaagagatctacaacacctacaaaaataatgttggaggtctgcttggtccagctaagagggaagcctggctgcagttgagggccgaaattgaagccctgaccgactcctggttgacactggccctgaaagcactctcgctcattcactcccggacaaactgtgtga

SEQ ID NO: 6928 - DNA, 440 bp, Homo sapiens
  source 1..440: mol_type = unassigned DNA
attcattcctctttatagtttaactttctgttaggtggaaccatatgaaatttccatctccgcaggtcacaaagaccaaatatctgaaatttcatatggccaacctatagttgaaaatatgtcagtgctttctatatattttgtgttttgcttggattattgtgcattattttgttttgtttttgttttccagcaattgggagcagtagtttcagcccacgaccaactcaccagttctctccaccacagatttacccttccaacagaccatacccacatattctccctaccccttcctcacaaactatggctgcatatgggcaaacacagtttaccacaggaatgcaacaagctacagcctatgccacgtacccacagccaggacagccgtacggcatttcctcatatggtgcattgtgggcaggcatcaagactgaagg

SEQ ID NO: 6929 - DNA, 3788 bp, Homo sapiens
  source 1..3788: mol_type = unassigned DNA
aaacaacagttgagacctcaacttaaagacaatatgcctttcactgctgcagtatcctcctttttctcttttggttaaaagagagcattgtcgttctcagccatgtgctctgtataattaagagctgacactgaagcagagtaacaacatcttctaatttttttacccctgatcacaggtgcaaacatctcaagccagttcagatgttgctgtttcctcaagttgcagttaaaacagagccaatgagcagcagtgaaacagcttcaacgacagccgacgggtctttaaacaatttctcaggttcagcaattgggagcagtagtttcagcccacgaccaactcaccagttctctccaccacagatttacccttccaacagaccatacccacatattctccctaccccttcctcacaaactatggctgcatatgggcaaacacagtttaccacaggaatgcaacaagctacagcctatgccacgtacccacagccaggacagccgtacggcatttcctcatatggtgcattgtgggcaggcatcaagactgaaggtggattgtcacagtctcagtcacctggacagacaggatttctcagctatggcacaagcttcagtacccctcaacctggacaggcaccatacagctaccagatgcaaggtagcagttttacaacatcatcaggaatatatacaggaaataattcactcacaaattcctctggatttaatagttcacagcaggactatccgtcttatcccagttttggccagggtcagtacgcacagtattataacagctcaccgtatccagcacattatatgaccagcagcaacaccagcccaacgacaccatccaccaatgccacttaccagcttcaagaaccgccatctggcatcaccagccaagcagttacagatcccacagcagagtacagcacaatccacagcccatcaacacccattaaagattcagattctgatcgattgcgtcgaggttcagatgggaaatcacgtggacggggccgaagaaacaataatccttcacctcccccagattctgatcttgagagagtgttcatctgggacttggatgagacaatcattgttttccactccttgcttactgggtcctacgccaacagatatgggagggatccacccacttcagtttcccttggactgcgaatggaagaaatgattttcaacttggcagacacacatttattttttaatgacttagaagaatgtgaccaagtccatatagatgatgtttcttcagatgataacggacaggacctaagcacatataactttggaacagatggctttcctgctgcagcaaccagtgctaacttatgtttggcaactggtgtacggggcggtgtggactggatgagaaagttggccttccgctacagacgggtaaaagagatctacaacacctacaaaaataatgttggaggtctgcttggtccagctaagagggaagcctggctgcagttgagggccgaaattgaagccctgaccgactcctggttgacactggccctgaaagcactctcgctcattcactcccggacaaactgtgtgaatattttagtaacaactactcagctcatcccagcattggcgaaagtcctgctgtatgggttaggaattgtatttccaatagaaaatatttacagtgcaactaaaataggaaaagaaagctgttttgagagaataattcaaaggtttggaagaaaagtggtgtatgttgttataggagatggtgtagaagaagaacaaggagcaaaaaagcacgcgatgcccttctggaggatctccagccactcggacctcatggccctgcaccatgccttggaactggagtacctgtaacagcgctcggcactttgacagcgcacagctgctctgtgaccagggacagatccagcaggccccagtctcgcatcagcgccggcctccagaacttagcaatttccgcctggtgatgcgcagttgctgtcagtcttgacctctgcctttgtggtgaatggaggaccacgtctatttcatcagaacagctgttgactctagtactgtgaatccagtgaaaataagccatgagaatgttttagcacagcgttatgtgtctgccacattaactacacggttcaaacctgtgaagaaaggacctgcaaacgcttcagttgttagcattttcaatgtgatataaacagcttctccaatacagcaaacctaattgcacaacagagactgaaatgtgtttcctgaataccagtggaggaattttcttgtaaagaaggtttactttttggtgtctcatacccagggtaatctgtacatctctacttatttatgaacagactttttttaaaaagataaaaaaacagctttattgaggtataattcacccaccagacttttttaaacatcaaataattgaagagacaatagcattagaaataagtgattaaaggcctctgcctcacaacatggcaagtacagtactttgaattttagcacattgcatagtagttttaagtatgtctaatttaaacgtataatatgtacatcactgagacaatcatgtacagaaagaatttttggtgtaaatttgtaataatggataattcttttacatattgtttagggaaatgatattgaaaggtagcaatgcctggatagtgaagcatgaggcagcacgtgcacaaattcatgtgccgtgccttatctgagttttcggtataaatatgtagataatggattttttttttttagataatgttgtcaagaccaaaagcatggatgtcaagtgtcagtaaggattttgttttctaaaattttttcctgcatcagttcttctgagggccttgatgaaataacacagcagtttcttaaacaatttgaaacaaaatgagctctcctaccacctcactttttcatttccacactaatgtattatatgtaactacttggaaaaaataattattcaaatgcttcttcccacaaagaatatagatgatagtagatatattttattaataaaatggttcatgaatcggagactaacaaagttttcatgtgctcagaattattaattatcgtgtctgcattttctttcgataaaggaagacacacgatgctaatccggaaatcagcaaactttgcattactccctatgtgcgtattttctctttcttcctgtcaccctgaggaaggttcattgccattgtcatcaccatggaaacaacgttcctctccacctgcattatgtactacatgacaggcatcaatctggggaaataataaaattatcacctttgtcagaccataagagtttctccaaaagtggtcagtttggctgggcaatattttctctcatctaacaaacacaatccattgtcatgaaattacccttaggatgagtcttctttaatcaatcatatattgggcgggaaaaacaccagctttgacccgaagtagttgaagagctacttcattcttttctgaagttgtgtgttgctgctagaaatagtcatttgtgaattatccaaattgtttaaattcacaattgaattagttttttcttcctttttgcttgaagcaaacagttgacaatttttaaccttttcattttatgtttttgtactctgcagactgaaaagacaaagtttatcttggccttactgtataaaggtgtgctgtgtccaccgttgtgtacagaatttttcttcattaattttgtgtttaagttaataaaatttatttgtgatgtactgt

SEQ ID NO: 6930 - DNA, 10589 bp, Homo sapiens
  source 1..10589: mol_type = unassigned DNA
agaaacaaagtgatacacgctaggcatgtccagacattaaccgtaatcagaagcctcctagggttgcaagcctccttggctaatggttgggctttgtgcctcactcttctcttacacctggggagtcaagtctggatcctctgctccatatttatttagcaaataaaacactgatctcaaacagcaacggaacctgtgtacttgaggtgttttttgaaaactaatcagaagaggaatgcttatctcccaagaaaattgaaaccatctgtaaaagaatcttggctgtgctgtgttttgattagattgaagcttggtgtaaagagaaaacacaaaagaccgcagaatatttacaacatttgaattcctgtttctccatcaaagcacattgtcatcaaagctactttgggtatagaaaaaaggtcaattccaattcccaggaatccttaaccacaactttacttggaaatttccggtaatacttaaaacaccattttgcagcaattctttatgataaactgtaaaatacagctacccgaaaatgactgacaaatcaatcgtcattctgagcctgatggtttttcacagctctttcataaatggaaaaacatgtagacggcaattggtggaagaatggcatccacaaccctcatcatatgtggtaaattggacactaacagaaaacatctgcttggacttctacagagattgctggtttttgggtgtaaacactaaaatagatacttcaggcaatcaagctgttccccagatttgccctttgcaaattcaattaggagatatccttgtaatttcttctgaaccatctcttcaatttccagaaataaatttgatgaatgtttctgaaacatctttcgttggctgtgtgcaaaataccacaacggaagatcagttactttttggctgcagactaaaaggaatgcacactgttaattctaagtggctgagtgttgggacacattattttatcacagttatggcaagtggtccatcaccttgtccactgggacttcgactaaatgtgacagtgaaacagcagttctgccaggaatctctgagttcagaattttgctctggtcatggtaaatgtcttagtgaagcttggagcaagacatatagctgccattgccagcctccattttctggaaaatactgccaggaacttgatgcatgttcttttaaaccatgtaaaaataatggcagttgcattaataaaagagaaaattgggatgagcaagcatatgaatgtgtctgtcacccaccatttacaggaaagaattgctcagaaataattggccagtgtcaaccacatgtctgtttccatggaaactgcagcaatattacttcaaatagtttcatttgtgaatgtgatgagcaattttcaggtccattctgtgaggtgtcagcaaaaccttgtgtttctctgcttttttggaaaagaggaatttgcccaaatagcagttctgcttatacttatgaatgcccaaaaggatcttccagccaaaatggtgaaactgatgtcagtgagttttcattagtaccatgtcagaatggtactgactgcatcaaaatatcaaatgatgttatgtgcatctgttcaccaatatttacagatttgctttgtaagagcattcaaacatcatgtgagtcatttcctttgaggaataatgctacatgtaagaaatgtgagaaagattatccttgcagctgtatatcaggatttactgaaaaaaactgtgagaaagcaattgaccactgtaaactgctcagcatcaactgtctgaatgaagaatggtgtttcaatataattggaagattcaaatatgtatgcattccagggtgcacaaaaaatccatgttggtttttgaagaatgtttacctaattcatcaacacctctgctactgtggagtcaccttccatggtatttgccaagataaaggtcctgctcaatttgaatatgtgtggcaattgggatttgcaggatctgaaggcgaaaagtgccaaggggttattgatgcctatttctttctggctgcaaactgcactgaagatgcaacctatgtgaacgatcctgaagataataattcttcatgttggttcccacatgaaggcacaaaagagatttgtgcaaatggatgcagttgtttgagtgaagaagacagtcaggaatatcggtatctatgttttctcagatgggctggcaacatgtatctggaaaatacaactgatgatcaagaaaatgagtgtcaacatgaagctgtttgtaaagatgaaattaatagacccagatgcagctgttctcttagttacattggcagattgtgtgttgtcaatgttgactattgcttagggaaccacagtatatcagtgcatggcctctgcctggccctttcgcacaattgtaactgtagcggtctgcaaagatatgaaaggaacatctgtgagatagatactgaagactgcaaatctgcgtcctgcaaaaatggaacaactagtacacatttaaggggatatttcttccgcaagtgtgtcccaggatttaaaggtacgcaatgtgaaattgatatagatgagtgtgcttcacatccctgcaaaaatggagccacctgcattgaccaacctggtaattacttctgccagtgtgtgcctccatttaaagtggttgatggcttttcctgcttatgcaatccaggctatgttgggataagatgtgaacaggacattgatgactgcatcctgaatgcctgtgagcacaattctacctgcaaagacctgcatctcagctaccagtgtgtgtgcctatctgattgggaaggaaatttttgtgaacaagaatccaatgagtgtaaaatgaatccttgcaagaacaattccacctgtactgacctttacaaaagctatcgatgtgagtgtacatctggatggactggacagaactgtagtgaagaaataaatgaatgcgactctgatccatgcatgaatggaggtctttgtcatgaatctaccatccctggacaatttgtatgtctgtgcccacccctttatactggacaattttgccaccaacgctataacctttgtgacctacttcataacccttgcagaaacaactcaacatgcttagctttggtagacgcaaatcagcattgtatttgtagagaagaatttgaaggtaaaaactgtgaaattgatgtgaaagactgcctcttcctttcctgccaggattatggtgactgtgaagatatggtcaacaatttcaggtgtatttgcagacctgggttttctggatctctgtgtgaaattgaaattaatgaatgttcctctgaaccttgcaaaaataatggaacatgtgtggatctgacaaacagatttttttgtaattgtgaacctgagtaccatgggcccttctgtgaacttgatgtaaataaatgtaaaatctcaccttgtctagatgaagaaaattgtgtctacaggactgatggatacaactgcctctgtgcccctggttatacaggcatcaactgtgaaataaatctagatgaatgcctatcagagccctgtctccatgatggagtttgtatcgatggcatcaatcattatacctgtgactgcaagagtgggttttttggaacacactgtgaaacaaacgccaatgattgcctttcaaatccttgtctacatggaaggtgcacagaacttattaatgaatatccatgttcatgtgatgcagatgggactagcacacaatgtaagatcaaaattaatgactgcacatcaatcccttgtatgaatgaaggcttctgtcagaagtcagcacatggatttacttgcatttgcccacgtggatacactggtgcatactgtgaaaaaagcattgataattgtgctgagcctgaacttaattcagtcatctgtcttaatggagggatctgtgttgatgggcctggacatacttttgactgcagatgtcttcctggattttctggtcaattttgtgaaattaatataaatgaatgctcttcatcaccatgtctacatggtgcagactgtgaagatcacatcaatggatatgtttgcaaatgccaaccaggatggtctggacaccactgtgagaatgagcttgagtgcattcccaactcatgtgttcatgaactctgcatggagaatgaacctggctcgacatgtttatgcacacctggatttatgacctgctccattgggcttctttgtggtgatgaaataaggagaattacctgtttaactcccatctttcaaagaacagatcccatttccacacagacatatacaattcccccttctgagactttggtcagcagctttccatctataaaggctactagaataccagccataatggacacttacccagttgatcaaggtccaaaacagacaggcattgtcaagcacgacattctcccaaccactggtttggcaacattaagaattagcacacccttggaaagctacttactccaagaactgattgtcactagagagctttcagcaaaacacagtcttctttcttccgcagatgtttcctcttctcgattcctgaattttggtattcgtgacccagcacaaattgtccaggacaaaacatcggtatcacatatgcctattcgaacttcagcagccacactaggtttcttttttcctgataggagagcaaggaccccatttatcatgtcttccttaatgtcagattttatttttcctacacaatctttattatttgagaactgtcagactgttgctttatctgctaccccaacgacttcagtaattagaagcattccaggggctgatattgagctaaacaggcagtcattactctcccgtggattcctgcttatagctgcctccataagtgcaactccagttgtctctaggggggctcaagaggatattgaagaatattcagctgattctttaatttcaagaagagagcactggagattgctcagcccctcgatgtctcccatttttcctgctaaggtaattatatctaaacaggtaaccatcttaaactcatcagctctgcaccggttcagtacaaaagccttcaatcccagtgaatatcaggctattactgaggcttcaagcaaccagagactcacaaacatcaaatcacaggctgctgattctttaagagaattaagccaaacatgtgcaacatgttctatgactgaaataaaatcctctcgtgaattctcagatcaagttttgcatagcaaacagtcccacttttatgagacattctggatgaactcagcgatattagccagctggtatgcactaatgggagctcaaactatcacttctgggcattcattttcttctgctactgaaataacaccatcagtggcattcacagaagtgccatctttatttccttctaaaaagagtgcaaaaagaacaattttatcctcatccttggaagaatccattaccctatcaagtaatttggatgttaatttatgtttggataagacttgtttatccattgtcccttcacaaactatctcttcagacttgatgaattctgatttgacttcaaaaatgactactgatgaactgtcagtatcagaaaacattttaaaactattgaaaataagacaatatggcataactatgggacccactgaggtactaaatcaagagagcttattggacatggaaaaaagtaaaggatctcatacactgttcaaacttcacccaagtgatagttctctggattttgagttaaacttacaaatttatccggatgttactttaaagacatattcagaaattacacatgcaaatgacttcaaaaataatctgccaccattgacaggctcagtgcctgatttttcagaagtcaccaccaatgttgcattttatacagtttcagcaactccagcactttcaatacagacgtcttcctccatgtctgtaattaggccagattggccatattttacagattatatgacctctcttaaaaaagaggtcaagacttcttcagaatggtccaaatgggaacttcagcctagtgtgcaatatcaggaatttcccactgcaagccggcatcttcccttcactagatctcttactttgtcttcactggaatccattctggcacctcaacggctgatgatttctgatttcagttgtgttcgttattatggagattcttatctagaatttcagaatgtggctttaaatccacaaaataacatctccctagaatttcagaccttcagctcctatggacttctgctgtatgtcaagcaagactcaaatttagtagatggattttttattcaattgtttattgaaaatggtactttaaagtaccacttttactgtcctggtgaagcaaaatttaaaagcattaatactactgttagagtggacaacgggcaaaagtatacactgcttatcaggcaagaattggatccatgtaacgctgagctgactattttagggaggaatacacaaatatgcgaatctatcaatcatgtactcggaaaacccctgccaaaatcaggatctgtcttcattggtggatttccagaccttcatgggaaaatccagatgcctgtaccagtcaagaattttactggctgcatagaagttatagaaataaataactggagatctttcattccatccaaggcagtgaaaaactatcacattaacaattgcagatcccagggatttatgctgtctccaacagcctcctttgttgatgcttctgatgtgacacaaggggttgataccatgtggacttctgtcagcccctctgttgcagcaccctctgtgtgccagcaggatgtatgccacaatggaggcacatgccatgccatcttcctctccagtggcatagtgtcattccaatgtgactgtccactacatttcactggccgcttctgtgaaaaagatgcaggtttattctttccatctttcaatgggaattcctatttagaactgccctttttgaagtttgtcctggagaaggaacataacagaactgttaccatctacttgactataaaaacaaacagtttaaatggaactattctttacagtaatgggaataattgtggaaagcagtttcttcatttatttcttgtggaaggaaggccatcagttaaatatgggtgtggaaattctcaaaatattttgactgtttctgctaattacagcattaacacaaatgcattcacccctatcacaatacgctacacaacgcctgttggcagccctggagttgtttgtatgattgaaatgactgcagatggaaaacctccagtacagaagaaagacacagagatttcccatgcctctcaggcatattttgaatcaatgttccttggccatattcctgcaaatgttcaaattcataagaaagcaggtcctgtttatgggttcaggggctgcattctagaccttcaagtaaacaacaaagaattcttcatcatcgatgaagcacgacatggaaagaatattgagaactgccacgtcccttggtgtgctcatcatctgtgccgcaacaatggcacctgcatcagtgataatgaaaatctgttttgtgagtgtccaaggctgtattcaggcaagctgtgccagtttgcaagttgtgaaaacaacccatgtggaaatggtgccacctgtgttccaaaatccggaacagatattgtctgcctctgcccatatgggaggtctggacccctctgcactgatgctattaatattactcagccaaggttcagtggcacagatgcctttggatacacctcattcctggcttattcacggatctcagacatcagcttccattatgaattccacctgaagtttcagctggcaaacaaccactcagcactgcaaaataacttgatattttttactggacagaaaggccatgggttgaatggcgatgacttcctggctgtgggcctgctcaatggcagtgtggtttatagttataacctggggtctggcatagcaagcatcaggagcgagcccctcaatctgagccttggagtccacactgttcatctgggcaagttcttccaagagggctggctgaaggtagatgatcataaaaataaatccattatcgccccaggaagactggttggtctcaatgtcttcagtcagttttatgtaggtggctacagtgaatacactccagatctcttaccaaatggagcagattttaaaaatggttttcaaggctgtattttcactcttcaagttcgcactgagaaggatggccatttcagaggactgggaaatcctgagggccacccaaatgctggacgcagtgttggccagtgtcatgcttctccctgcagtttaatgaaatgtggcaatggtgggacatgcatagagagtggaactagtgtttactgcaattgtaccactgggtggaaaggatcattctgcacagagacagtttctacctgtgatcctgaacatgaccctccacaccactgtagcagaggagcaacctgcatttcattacctcatggatacacctgtttctgtcctctaggaaccactggaatctactgtgaacaagctttatccataagtgatccatctttcagaagcaatgagttatcctggatgtcttttgcttcctttcatgttcgaaaaaagacacatattcaattgcagtttcagcctctcgctgcagatggtatcctattttatgctgcacaacacttaaaagcccaatcaggtgattttttatgcatctctttagtaaatagttccgttcaacttcgctacaaccttggcgacagaactatcattctagaaactctccaaaaagtaactataaacggaagtacttggcatataataaaagcaggaagagttggtgcagaaggctacctggatctagatgggataaatgtaacagaaaaggcctccactaaaatgagttctctggacacaaatacagacttctatattggaggagtatcttctttaaatcttgtaaatcccatggcaatagaaaatgaacctgtaggttttcaaggctgtatccgacaagttatcataaataatcaagaattacaattaactgaatttggagcaaaaggtggctcaaatgtaggtgactgtgatgggacagcctgtgggtacaacacatgcagaaatggaggtgaatgtacagtaaatggcacaactttttcttgcagatgtttgccagattgggctggaaatacatgtaaccagtctgtgtcctgtttgaataatctttgcctccaccaatctttatgtatacctgaccaatcattttcttacagttgcctgtgtactttgggttgggtgggaaggtattgtgaaaacaaaacttcattttcaactgcaaaatttatgggtaattcttacattaaatacattgatccaaattatagaatgagaaacctccagttcactactatatccttaaatttcagtaccactaaaacagaaggtctaattgtatggatgggaatagctcaaaatgaagaaaatgattttctggcaattggtctccataatcagaccttgaaaatagcagttaacttgggagaaagaatctctgtgcctatgagctataacaatggcacattctgttgtaataaatggcaccatgtagttgtaattcaaaatcagactcttatcaaggcctacataaataacagtctaattctttccgaggatattgatccacataaaaactttgtggctctaaactatgatggcatttgttatctagggggctttgaatatggtagaaaggtaaatatcgttactcaagagatttttaaaaccaattttgttggcaaaattaaagatgttgtattttttcaggaaccaaaaaacattgaactaattaaattagaaggatacaatgtttatgatggagatgaacaaaatgaggttacataagttaacactagagattttagtacacactatacataaatgcagttattttgatagttatttctttgatacattgcttacggggaatcaactgtttactatattacctgaaatagtctaaatgctaacatatctttttgataagattgtaaaatgtcactgaaggttctgattgtttttcctacatctaatttatctgtatatattttgattcatgttttaactccattagttcagtgcttattcacagaatgtgcttattcactttgcttattcactttttacctatccctaatgcttacattttaaaatcaacgtgtaaacacaattttaaaaatcaatgtgtaagctgaactttaaaatgtttaaaattcagttgggaatgaattagggataggtacaaataagaaaaaaatcaagttattaatcaaaggaaaaataaaaattatacaaagcaatgtaaccatattgtattacatggcttagctacaacttatttatatgattcaacaatgtaaaacttgaacatagatttaaaccaaaaattattgcatgaatgtagaaagagaaggtgagaggagaggagaacaggctggtaagagctaaatccttatctttt

SEQ ID NO: 6931 - DNA, 10485 bp, Homo sapiens
  source 1..10485: mol_type = unassigned DNA
gatacacgctaggcatgtccagacattaaccgtaatcagaagcctcctagggttgcaagcctccttggctaatggttgggctttgtgcctcactcttctcttacacctggggagtcaagtctggatcctctgctccatatttatttagcaaataaaacactgatctcaaacagcaacggaacctgtgtacttgaggtgttttttgaaaactaatcagaagaggaatgcttatctcccaagaaaattgaaaccatctgtaaaagaatcttggctgtgctgtgttttgattagattgaagcttggtgtaaagagaaaacacaaaagaccgcagaatatttacaacatttgaattcctgtttctccatcaaagcacattgtcatcaaagctactttgggtatagaaaaaaggtcaattccaattcccaggaatccttaaccacaactttacttggaaatttccggtaatacttaaaacaccattttgcagcaattctttatgataaactgtaaaatacagctacccgaaaatgactgacaaatcaatcgtcattctgagcctgatggtttttcacagctctttcataaatggaaaaacatgtagacggcaattggtggaagaatggcatccacaaccctcatcatatgtggtaaattggacactaacagaaaacatctgcttggacttctacagagattgctggtttttgggtgtaaacactaaaatagatacttcaggcaatcaagctgttccccagatttgccctttgcaaattcaattaggagatatccttgtaatttcttctgaaccatctcttcaatttccagaaataaatttgatgaatgtttctgaaacatctttcgttggctgtgtgcaaaataccacaacggaagatcagttactttttggctgcagactaaaaggaatgcacactgttaattctaagtggctgagtgttgggacacattattttatcacagttatggcaagtggtccatcaccttgtccactgggacttcgactaaatgtgacagtgaaacagcagttctgccaggaatctctgagttcagaattttgctctggtcatggtaaatgtcttagtgaagcttggagcaagacatatagctgccattgccagcctccattttctggaaaatactgccaggaacttgatgcatgttcttttaaaccatgtaaaaataatggcagttgcattaataaaagagaaaattgggatgagcaagcatatgaatgtgtctgtcacccaccatttacaggaaagaattgctcagaaataattggccagtgtcaaccacatgtctgtttccatggaaactgcagcaatattacttcaaatagtttcatttgtgaatgtgatgagcaattttcaggtccattctgtgaggtgtcagcaaaaccttgtgtttctctgcttttttggaaaagaggaatttgcccaaatagcagttctgcttatacttatgaatgcccaaaaggatcttccagccaaaatggtgaaactgatgtcagtgagttttcattagtaccatgtcagaatggtactgactgcatcaaaatatcaaatgatgttatgtgcatctgttcaccaatatttacagatttgctttgtaagagcattcaaacatcatgtgagtcatttcctttgaggaataatgctacatgtaagaaatgtgagaaagattatccttgcagctgtatatcaggatttactgaaaaaaactgtgagaaagcaattgaccactgtaaactgctcagcatcaactgtctgaatgaagaatggtgtttcaatataattggaagattcaaatatgtatgcattccagggtgcacaaaaaatccatgttggtttttgaagaatgtttacctaattcatcaacacctctgctactgtggagtcaccttccatggtatttgccaagataaaggtcctgctcaatttgaatatgtgtggcaattgggatttgcaggatctgaaggcgaaaagtgccaaggggttattgatgcctatttctttctggctgcaaactgcactgaagatgcaacctatgtgaacgatcctgaagataataattcttcatgttggttcccacatgaaggcacaaaagagatttgtgcaaatggatgcagttgtttgagtgaagaagacagtcaggaatatcggtatctatgttttctcagatgggctggcaacatgtatctggaaaatacaactgatgatcaagaaaatgagtgtcaacatgaagctgtttgtaaagatgaaattaatagacccagatgcagctgttctcttagttacattggcagattgtgtgttgtcaatgttgactattgcttagggaaccacagtatatcagtgcatggcctctgcctggccctttcgcacaattgtaactgtagcggtctgcaaagatatgaaaggaacatctgtgagatagatactgaagactgcaaatctgcgtcctgcaaaaatggaacaactagtacacatttaaggggatatttcttccgcaagtgtgtcccaggatttaaaggtacgcaatgtgaaattgatatagatgagtgtgcttcacatccctgcaaaaatggagccacctgcattgaccaacctggtaattacttctgccagtgtgtgcctccatttaaagtggttgatggcttttcctgcttatgcaatccaggctatgttgggataagatgtgaacaggacattgatgactgcatcctgaatgcctgtgagcacaattctacctgcaaagacctgcatctcagctaccagtgtgtgtgcctatctgattgggaaggaaatttttgtgaacaagaatccaatgagtgtaaaatgaatccttgcaagaacaattccacctgtactgacctttacaaaagctatcgatgtgagtgtacatctggatggactggacagaactgtagtgaagaaataaatgaatgcgactctgatccatgcatgaatggaggtctttgtcatgaatctaccatccctggacaatttgtatgtctgtgcccacccctttatactggacaattttgccaccaacgctataacctttgtgacctacttcataacccttgcagaaacaactcaacatgcttagctttggtagacgcaaatcagcattgtatttgtagagaagaatttgaaggtaaaaactgtgaaattgatgtgaaagactgcctcttcctttcctgccaggattatggtgactgtgaagatatggtcaacaatttcaggtgtatttgcagacctgggttttctggatctctgtgtgaaattgaaattaatgaatgttcctctgaaccttgcaaaaataatggaacatgtgtggatctgacaaacagatttttttgtaattgtgaacctgagtaccatgggcccttctgtgaacttgatgtaaataaatgtaaaatctcaccttgtctagatgaagaaaattgtgtctacaggactgatggatacaactgcctctgtgcccctggttatacaggcatcaactgtgaaataaatctagatgaatgcctatcagagccctgtctccatgatggagtttgtatcgatggcatcaatcattatacctgtgactgcaagagtgggttttttggaacacactgtgaaacaaacgccaatgattgcctttcaaatccttgtctacatggaaggtgcacagaacttattaatgaatatccatgttcatgtgatgcagatgggactagcacacaatgtaagatcaaaattaatgactgcacatcaatcccttgtatgaatgaaggcttctgtcagaagtcagcacatggatttacttgcatttgcccacgtggatacactggtgcatactgtgaaaaaagcattgataattgtgctgagcctgaacttaattcagtcatctgtcttaatggagggatctgtgttgatgggcctggacatacttttgactgcagatgtcttcctggattttctggtcaattttgtgaaattaatataaatgaatgctcttcatcaccatgtctacatggtgcagactgtgaagatcacatcaatggatatgtttgcaaatgccaaccaggatggtctggacaccactgtgagaatgagcttgagtgcattcccaactcatgtgttcatgaactctgcatggagaatgaacctggctcgacatgtttatgcacacctggatttatgacctgctccattgggcttctttgtggtgatgaaataaggagaattacctgtttaactcccatctttcaaagaacagatcccatttccacacagacatatacaattcccccttctgagactttggtcagcagctttccatctataaaggctactagaataccagccataatggacacttacccagttgatcaaggtccaaaacagacaggcattgtcaagcacgacattctcccaaccactggtttggcaacattaagaattagcacacccttggaaagctacttactccaagaactgattgtcactagagagctttcagcaaaacacagtcttctttcttccgcagatgtttcctcttctcgattcctgaattttggtattcgtgacccagcacaaattgtccaggacaaaacatcggtatcacatatgcctattcgaacttcagcagccacactaggtttcttttttcctgataggagagcaaggaccccatttatcatgtcttccttaatgtcagattttatttttcctacacaatctttattatttgagaactgtcagactgttgctttatctgctaccccaacgacttcagtaattagaagcattccaggggctgatattgagctaaacaggcagtcattactctcccgtggattcctgcttatagctgcctccataagtgcaactccagttgtctctaggggggctcaagaggatattgaagaatattcagctgattctttaatttcaagaagagagcactggagattgctcagcccctcgatgtctcccatttttcctgctaaggtaattatatctaaacaggtaaccatcttaaactcatcagctctgcaccggttcagtacaaaagccttcaatcccagtgaatatcaggctattactgaggcttcaagcaaccagagactcacaaacatcaaatcacaggctgctgattctttaagagaattaagccaaacatgtgcaacatgttctatgactgaaataaaatcctctcgtgaattctcagatcaagttttgcatagcaaacagtcccacttttatgagacattctggatgaactcagcgatattagccagctggtatgcactaatgggagctcaaactatcacttctgggcattcattttcttctgctactgaaataacaccatcagtggcattcacagaagtgccatctttatttccttctaaaaagagtgcaaaaagaacaattttatcctcatccttggaagaatccattaccctatcaagtaatttggatgttaatttatgtttggataagacttgtttatccattgtcccttcacaaactatctcttcagacttgatgaattctgatttgacttcaaaaatgactactgatgaactgtcagtatcagaaaacattttaaaactattgaaaataagacaatatggcataactatgggacccactgaggtactaaatcaagagagcttattggacatggaaaaaagtaaaggatctcatacactgttcaaacttcacccaagtgatagttctctggattttgagttaaacttacaaatttatccggatgttactttaaagacatattcagaaattacacatgcaaatgacttcaaaaataatctgccaccattgacaggctcagtgcctgatttttcagaagtcaccaccaatgttgcattttatacagtttcagcaactccagcactttcaatacagacgtcttcctccatgtctgtaattaggccagattggccatattttacagattatatgacctctcttaaaaaagaggtcaagacttcttcagaatggtccaaatgggaacttcagcctagtgtgcaatatcaggaatttcccactgcaagccggcatcttcccttcactagatctcttactttgtcttcactggaatccattctggcacctcaacggctgatgatttctgatttcagttgtgttcgttattatggagattcttatctagaatttcagaatgtggctttaaatccacaaaataacatctccctagaatttcagaccttcagctcctatggacttctgctgtatgtcaagcaagactcaaatttagtagatggattttttattcaattgtttattgaaaatggtactttaaagtaccacttttactgtcctggtgaagcaaaatttaaaagcattaatactactgttagagtggacaacgggcaaaagtatacactgcttatcaggcaagaattggatccatgtaacgctgagctgactattttagggaggaatacacaaatatgcgaatctatcaatcatgtactcggaaaacccctgccaaaatcaggatctgtcttcattggtggatttccagaccttcatgggaaaatccagatgcctgtaccagtcaagaattttactggctgcatagaagttatagaaataaataactggagatctttcattccatccaaggcagtgaaaaactatcacattaacaattgcagatcccagggatttatgctgtctccaacagcctcctttgttgatgcttctgatgtgacacaaggggttgataccatgtggacttctgtcagcccctctgttgcagcaccctctgtgtgccagcaggatgtatgccacaatggaggcacatgccatgccatcttcctctccagtggcatagtgtcattccaatgtgactgtccactacatttcactggccgcttctgtgaaaaagatgcaggtttattctttccatctttcaatgggaattcctatttagaactgccctttttgaagtttgtcctggagaaggaacataacagaactgttaccatctacttgactataaaaacaaacagtttaaatggaactattctttacagtaatgggaataattgtggaaagcagtttcttcatttatttcttgtggaaggaaggccatcagttaaatatgggtgtggaaattctcaaaatattttgactgtttctgctaattacagcattaacacaaatgcattcacccctatcacaatacgctacacaacgcctgttggcagccctggagttgtttgtatgattgaaatgactgcagatggaaaacctccagtacagaagaaagacacagagatttcccatgcctctcaggcatattttgaatcaatgttccttggccatattcctgcaaatgttcaaattcataagaaagcaggtcctgtttatgggttcaggggctgcattctagaccttcaagtaaacaacaaagaattcttcatcatcgatgaagcacgacatggaaagaatattgagaactgccacgtcccttggtgtgctcatcatctgtgccgcaacaatggcacctgcatcagtgataatgaaaatctgttttgtgagtgtccaaggctgtattcaggcaagctgtgccagtttgcaagttgtgaaaacaacccatgtggaaatggtgccacctgtgttccaaaatccggaacagatattgtctgcctctgcccatatgggaggtctggacccctctgcactgatgctattaatattactcagccaaggttcagtggcacagatgcctttggatacacctcattcctggcttattcacggatctcagacatcagcttccattatgaattccacctgaagtttcagctggcaaacaaccactcagcactgcaaaataacttgatattttttactggacagaaaggccatgggttgaatggcgatgacttcctggctgtgggcctgctcaatggcagtgtggtttatagttataacctggggtctggcatagcaagcatcaggagcgagcccctcaatctgagccttggagtccacactgttcatctgggcaagttcttccaagagggctggctgaaggtagatgatcataaaaataaatccattatcgccccaggaagactggttggtctcaatgtcttcagtcagttttatgtaggtggctacagtgaatacactccagatctcttaccaaatggagcagattttaaaaatggttttcaaggctgtattttcactcttcaagttcgcactgagaaggatggccatttcagaggactgggaaatcctgagggccacccaaatgctggacgcagtgttggccagtgtcatgcttctccctgcagtttaatgaaatgtggcaatggtgggacatgcatagagagtggaactagtgtttactgcaattgtaccactgggtggaaaggatcattctgcacagagacagtttctacctgtgatcctgaacatgaccctccacaccactgtagcagaggagcaacctgcatttcattacctcatggatacacctgtttctgtcctctaggaaccactggaatctactgtgaacaagcacttatcctcattgtgatcttggaaaagccaaaaccagcagaacggaaagtgaagaaggaggctttatccataagtgatccatctttcagaagcaatgagttatcctggatgtcttttgcttcctttcatgttcgaaaaaagacacatattcaattgcagtttcagcctctcgctgcagatggtatcctattttatgctgcacaacacttaaaagcccaatcaggtgattttttatgcatctctttagtaaatagttccgttcaacttcgctacaaccttggcgacagaactatcattctagaaactctccaaaaagtaactataaacggaagtacttggcatataataaaagcaggaagagttggtgcagaaggctacctggatctagatgggataaatgtaacagaaaaggcctccactaaaatgagttctctggacacaaatacagacttctatattggaggagtatcttctttaaatcttgtaaatcccatggcaatagaaaatgaacctgtaggttttcaaggctgtatccgacaagttatcataaataatcaagaattacaattaactgaatttggagcaaaaggtggctcaaatgtaggtgactgtgatgggacagcctgtgggtacaacacatgcagaaatggaggtgaatgtacagtaaatggcacaactttttcttgcagatgtttgccagattgggctggaaatacatgtaaccagtctgtgtcctgtttgaataatctttgcctccaccaatctttatgtatacctgaccaatcattttcttacagttgcctgtgtactttgggttgggtgggaaggtattgtgaaaacaaaacttcattttcaactgcaaaatttatgggtaattcttacattaaatacattgatccaaattatagaatgagaaacctccagttcactactatatccttaaatttcagtaccactaaaacagaaggtctaattgtatggatgggaatagctcaaaatgaagaaaatgattttctggcaattggtctccataatcagaccttgaaaatagcagttaacttgggagaaagaatctctgtgcctatgagctataacaatggcacattctgttgtaataaatggcaccatgtagttgtaattcaaaatcagactcttatcaaggcctacataaataacagtctaattctttccgaggatattgatccacataaaaactttgtggctctaaactatgatggcatttgttatctagggggctttgaatatggtagaaaggtaaatatcgttactcaagagatttttaaaaccaattttgttggcaaaattaaagatgttgtattttttcaggaaccaaaaaacattgaactaattaaattagaaggatacaatgtttatgatggagatgaacaaaatgaggttacataagttaacactagagattttagtacacactatacataaatgcagttattttgatagttatttctttgatacattgcttacggggaatcaactgtttactatattacctgaaatagtctaaatgctaacatatctttttgataagattgtaaaatgtcactgaaggttctgattgtttttcctacatctaatttatctgtatatattttgattcatgttttaactccattagttcagtgcttattcacagaatgtgcttattcactttgcttattcactttttacctatccctaatgcttacattttaaaatcaacgtgtaaacacaattttaaaaatcaatgtgtaagctgaactttaaaatgtttaaaattcagttgggaatgaattagggataggtacaaataagaaaaaaatcaagttattaatcaaaggaaaaataaaaattatacaaagcaatgtaa

SEQ ID NO: 6932 - DNA, 2295 bp, Homo sapiens
  source 1..2295: mol_type = unassigned DNA
cagcattaacacaaatgcattcacccctatcacaatacgctacacaacgcctgttggcagccctggagttgtttgtatgattgaaatgactgcagatggaaaacctccagtacagaagaaagacacagagatttcccatgcctctcaggcatattttgaatcaatgttccttggccatattcctgcaaatgttcaaattcataagaaagcaggtcctgtttatgggttcaggggctgcattctagaccttcaagtaaacaacaaagaattcttcatcatcgatgaagcacgacatggaaagaatattgagaactgccacgtcccttggtgtgctcatcatctgtgccgcaacaatggcacctgcatcagtgataatgaaaatctgttttgtgagtgtccaaggctgtattcaggcaagctgtgccagtttgcaagttgtgaaaacaacccatgtggaaatggtgccacctgtgttccaaaatccggaacagatattgtctgcctctgcccatatgggaggtctggacccctctgcactgatgctattaatattactcagccaaggttcagtggcacagatgcctttggatacacctcattcctggcttattcacggatctcagacatcagcttccattatgaattccacctgaagtttcagctggcaaacaaccactcagcactgcaaaataacttgatattttttactggacagaaaggccatgggttgaatggcgatgacttcctggctgtgggcctgctcaatggcagtgtggtttatagttataacctggggtctggcatagcaagcatcaggagcgagcccctcaatctgagccttggagtccacactgttcatctgggcaagttcttccaagagggctggctgaaggtagatgatcataaaaataaatccattatcgccccaggaagactggttggtctcaatgtcttcagtcagttttatgtaggtggctacagtgaatacactccagatctcttaccaaatggagcagattttaaaaatggttttcaaggctgtattttcactcttcaagttcgcactgagaaggatggccatttcagaggactgggaaatcctgagggccacccaaatgctggacgcagtgttggccagtgtcatgcttctccctgcagtttaatgaaatgtggcaatggtgggacatgcatagagagtggaactagtgtttactgcaattgtaccactgggtggaaaggatcattctgcacagagacagtttctacctgtgatcctgaacatgaccctccacaccactgtagcagaggagcaacctgcatttcattacctcatggatacacctgtttctgtcctctaggaaccactggaatctactgtgaacaaggtcatcaatttattggaaaagatgttttcaaataatttatccaacatttttggtggttttcatgatggagatgaggtaaatcatgttatctaatctactatactgctggaaacaaaagtcaactattggatttattttaaaagaagcccatctggccgggcgcagtggctcatgcctgtaatctcagcactttgggaggccaaggcgggcaaatcacctgaggtcaggagttcgagaccagcttggccaacatggggaaaccccgtctctactaaaaacacaaaaattagccgggtgtagtggtgggcgcccgtaatcccagctactcgggaggctgaggcaggagaatcgcttgaacccaggaggcagaggttgcagtgagccaagattgcgccactgcactccaacatgggtgacagagcagaactctgtctcagaaaaaaaaaaaaaagaaagaaagaagcccttctgaccagtattgcataaagcattaaaaactatagaagaaagttaaaagtgctatgagaggacattgcaagtgggaacaccatcacttggtcccaagttttgaggagcagatactgctagaccctgatcagtgattttaagggtagggaagggacactgataaagaaaaaggtccttccatagtagtacatttaatgtgccagcctgtaacttatccctccatcctcattaaagcagcaagaaagaagataaaacagtgtcctttttcctttttaaaatgcatttggtgtaaaaaataatgaggtatgcccaatatcatggtaactcaaagacagcttaactgatgaattaaaaattaaagtatgcttgaacacaagcaagatatggagtatgcatgagaaaaaaatacattataataaaaagaaaagagaagccactaaaa

SEQ ID NO: 6933 - DNA, 718 bp, Homo sapiens
  source 1..718: mol_type = unassigned DNA
actcagcactgcaaaataacttgatattttttactggacagaaaggccatgggttgaatggcgatgacttcctggctgtgggcctgctcaatggcagtgtggtttatagttataacctggggtctggcatagcaagcatcaggagcgagcccctcaatctgagccttggagtccacactgttcatctgggcaagttcttccaagagggctggctgaaggtagatgatcataaaaataaatccattatcgccccaggaagactggttggtctcaatgtcttcagtcagttttatgtaggtggctacagtgaatacactccagatctcttaccaaatggagcagattttaaaaatggttttcaagttcaaaaggcaagagacagactgcagtcaacccatccataccaccaaggggtagcccacagaggccagagcaagccaagaggattaaggacaacattgtgcttggaaacattaagattgcacactcctggaagtatgtcaactgccacagtctttatctcgctgtgtcatcaaggctggagtacagtggtgccatctcagctcactgcaaccttcatctccagggctcaatcaatcctcccaccttagcctctcatgtagctgagccactaaacccagctaacatatccttacaaagctgatttatattgtagtagagttataaaataaagacatgctttaaattgtaataacaa

SEQ ID NO: 6934 - DNA, 484 bp, Homo sapiens
  source 1..484: mol_type = unassigned DNA
ataggtgacaattgttccaatccagaccagcttatgttggatttggagaggcaggaggttcaaaatgtcttcctggattttctggtcaattttgtgaaattaatataaatgaatgctcttcatcaccatgtctacatggtgcagactgtgaagatcacatcaatggatatgtttgcaaatgccaaccaggatggtctggacaccactgtgagaatgagcttgagtgcattcccaactcatgtgttcatgaactctgcatggagaatgaacctggctcgacatgtttatgcacacctggatttatgacctgctccattgggcttctttgtggtgatgaaataaggagaattacctgtttaactcccatctttcaaagaacagatcccatttccacacagacatatacaattcccccttctgagactttggtcagcagctttccatctataaaggctactagaataccagccataatggacactta

SEQ ID NO: 6935 - DNA, 567 bp, Homo sapiens
  source 1..567: mol_type = unassigned DNA
catcatcatctgcagcattaattacaactggtggatgcttggggctaggaacattttcggaactttctactttcataacgctccgcagctgaggggaaggattggactggacagacaatttgttctgctgaactgaaagttggctagccttcacttcctcttctggtgactcaggcacagtgggcaacacacttttgctcggagatgcagctgttctcttagttacattggcagattgtgtgttgtcaatgttgactattgcttagggaaccacagtatatcagtgcatggcctctgcctggccctttcgcacaattgtaactgtagcggtctgcaaagatatgaaaggaacatctgtgagatagatactgaagactgcaaatctgcgtcctgcaaaaatggaacaactagtacacatttaaggggatatttcttccgcaagtgtgtcccaggatttaaaggcaagttttttttttcctgataaattaaattttctagtaaataatgttgttaatatatttatttgatatatctcaaatatatctcaaatgtgtctattgattggta

SEQ ID NO: 6936 - DNA, 517 bp, Homo sapiens
  source 1..517: mol_type = unassigned DNA
ataacgctccgcagctgaggggaaggattggactggacagacaatttgttctgctgaactgaaagttggctagccttcacttcctcttctggtgactcaggcacagtgggcaacacacttttgctcggagcctgttccattcttgagcaatacacagagcccagggatgtggtgcaatactacagaggagaaattaagtaaaaatctactcccaaaacaaagatgcagctgttctcttagttacattggcagattgtgtgttgtcaatgttgactattgcttagggaaccacagtatatcagtgcatggcctctgcctggccctttcgcacaattgtaactgtagcggtctgcaaagatatgaaaggaacatctgtgagatagatactgaagactgcaaatctgcgtcctgcaaaaatggaacaactagtacacatttaaggggatatttcttccgcaagtgtgtcccaggatttaaaggcaagttttttttttcctgataaattaaattttctagt

SEQ ID NO: 6937 - DNA, 5450 bp, Homo sapiens
  source 1..5450: mol_type = unassigned DNA
agaaacaaagtgatacacgctaggcatgtccagacattaaccgtaatcagaagcctcctagggttgcaagcctccttggctaatggttgggctttgtgcctcactcttctcttacacctggggagtcaagtctggatcctctgctccatatttatttagcaaataaaacactgatctcaaacagcaacggaacctgtgtacttgaggtgttttttgaaaactaatcagaagaggaatgcttatctcccaagaaaattgaaaccatctgtaaaagaatcttggctgtgctgtgttttgattagattgaagcttggtgtaaagagaaaacacaaaagaccgcagaatatttacaacatttgaattcctgtttctccatcaaagcacattgtcatcaaagctactttgggtatagaaaaaaggtcaattccaattcccaggaatccttaaccacaactttacttggaaatttccggtaatacttaaaacaccattttgcagcaattctttatgataaactgtaaaatacagctacccgaaaatgactgacaaatcaatcgtcattctgagcctgatggtttttcacagctctttcataaatggaaaaacatgtagacggcaattggtggaagaatggcatccacaaccctcatcatatgtggtaaattggacactaacagaaaacatctgcttggacttctacagagattgctggtttttgggtgtaaacactaaaatagatacttcaggcaatcaagctgttccccagatttgccctttgcaaattcaattaggagatatccttgtaatttcttctgaaccatctcttcaatttccagaaataaatttgatgaatgtttctgaaacatctttcgttggctgtgtgcaaaataccacaacggaagatcagttactttttggctgcagactaaaaggaatgcacactgttaattctaagtggctgagtgttgggacacattattttatcacagttatggcaagtggtccatcaccttgtccactgggacttcgactaaatgtgacagtgaaacagcagttctgccaggaatctctgagttcagaattttgctctggtcatggtaaatgtcttagtgaagcttggagcaagacatatagctgccattgccagcctccattttctggaaaatactgccaggaacttgatgcatgttcttttaaaccatgtaaaaataatggcagttgcattaataaaagagaaaattgggatgagcaagcatatgaatgtgtctgtcacccaccatttacaggaaagaattgctcagaaataattggccagtgtcaaccacatgtctgtttccatggaaactgcagcaatattacttcaaatagtttcatttgtgaatgtgatgagcaattttcaggtccattctgtgaggtgtcagcaaaaccttgtgtttctctgcttttttggaaaagaggaatttgcccaaatagcagttctgcttatacttatgaatgcccaaaaggatcttccagccaaaatggtgaaactgatgtcagtgagttttcattagtaccatgtcagaatggtactgactgcatcaaaatatcaaatgatgttatgtgcatctgttcaccaatatttacagatttgctttgtaagagcattcaaacatcatgtgagtcatttcctttgaggaataatgctacatgtaagaaatgtgagaaagattatccttgcagctgtatatcaggatttactgaaaaaaactgtgagaaagcaattgaccactgtaaactgctcagcatcaactgtctgaatgaagaatggtgtttcaatataattggaagattcaaatatgtatgcattccagggtgcacaaaaaatccatgttggtttttgaagaatgtttacctaattcatcaacacctctgctactgtggagtcaccttccatggtatttgccaagataaaggtcctgctcaatttgaatatgtgtggcaattgggatttgcaggatctgaaggcgaaaagtgccaaggggttattgatgcctatttctttctggctgcaaactgcactgaagatgcaacctatgtgaacgatcctgaagataataattcttcatgttggttcccacatgaaggcacaaaagagatttgtgcaaatggatgcagttgtttgagtgaagaagacagtcaggaatatcggtatctatgttttctcagatgggctggcaacatgtatctggaaaatacaactgatgatcaagaaaatgagtgtcaacatgaagctgtttgtaaagatgaaattaatagacccagaagaatcctcaacacggtgataccacaccaaattcagcaacatatagaaaggtttatacagcatgaccaggtgggatttatcgtaagaatataagtttgatttagtggcttaaaatcaattaatgtaatttaatgtatcaatagaataaataaagaagaaaatgcatgataatgtagatggagaaaaaaattgtattacagaatctcacaacactttatgaaacaaacactcaacaaataaagaataaaagggaacttccacaatctgataagagaagttaaaaaaaaataagaagaatgaagaaacataactaacattatactttacggtgaaaggctgaaagactggaattttaaatcaaaacaatgagataacactttacacccagcaattctacttctagtatatactcaaaaaattgaaaatatatgttctttacaaaaatttatatgtgaatgtttacagttttgttcgaaagagtcaaaaagttgaaacaacccaaatgaccatcaactgatgaatggatatataaaatttgttatatccatacaatgaaatgttattcagcaatagacaaagatgaattactgatatgtgcttcaatacgaataaacattgaaaacattttgataaggaaaagtagtaagccacaaaagacacatagaatagtgctcaacaaatacttgtttaatgaaacaatgattttcagaagcttttttatttactaagaaaattatccttcgttttgtgatgttatttccttttttctgattttgtgattctcttttgtttgccattattttttgatatccagagaatcttggataaattacaaaatttttgtaatttatcaacactttaatgagttcttgatattgtctcataattaatactaacaatggagcccaacaaatgttgcagatacaagtattttatataaaattaagtttctctatatcagttgcaatatctagaaattatatgtgtgataccacctgttataatgtcaaaagatatgcaaaatgtttagaattaaaaaaaagatgctctaattctccattaaaaagaccctctatataccactaagctcaatgaaaaagagaaaattatatatacactgaataaatggaaatataatgcatggagttaaatattaggccttaaattagctaaaatattaattcttcccaaattaattcacacatttaatgcaatagtaaaaatattgcaagttattttagaaactaattatcatgttatatatatttatgaataatattttctaaattatgaagtcatctttgaaaaggaagactaatggggtgggatctgatgaaccatatgacatgacagactacataacacatatgggtgcctttaaaggaaaaaaaataataatgggtcaacagagagctctgacaacaacccgagtatatacgggaactcaatatatgagaaatttggctataatctcatttgaacatacagggttctttagtaaatggtattgaggaaatggctcataataagaccttaaatgaaactggattacaaccttataccttatatagaagtagactctaaatgtgtatagggatctaaaagtttaaggtaaaatgacgatataaatgaaagaaatgtagaaaaatatctttgtgatttcgggatggagaaatttttcaattaaactcaatttataaggcaaaataatgatagtattataatgatagacactaataatgttgatgatgttaacggacacaaagttaatgaatagcgtataaacattttcttttaaagtgtattttaaatgggtgcagattaaaattcattatataaatgatgtattgcaaacaggtctgcatattaccacatttttttgccctgaaatcttcaaaaaatttttctgggggtttataaaatgtttaatgagccaaagactaaatcataccagccatattgttacttaagaccaggaaagatttgctaagtctgggatgttaatttcttaataccatgcccagactgtgaagtgttcatgactcccacctgtttttgaagcctcaaatttatgtctaagtcaccaatccctacttgctaccagaaatatcataacagaatgaaatatattcattcatacatttattatttattgaatctcctctaactggaagatatttttcaaaatgttatgacaatgagacatgatacctgtccccaggtaatgtactatacataggtaagattatacactcttcagaacacatctcatggttcttctgtttcatttagaaagtgaacacatttttaaagtactaaagtaattatttttttcactttctgaacatacaagttgcttgattatagcagtgtgtcttctggctttctttctggaagttttaaatttaacctgtttcctttacaggctattttaggagattcacattttctgtgtaatgttaaatatatccaaaacataattttcagttataagtaagagttctgtttcaaagtgtagaatctaaaagtccataagaaaatcaggtgaagtttcaaaaactatttctgtagagtcaggaggcttgtaaaaatagagctttatgtgaatatggcacaaaagtatagtataatttgaccaggattttcttaaattatttctgatcccaaaagtctaataattatttattctaagactattgtaatttctgccgtgatgtccgtgattttattaacaagttgaatagttggttttaggtttatttatttattttggctatactatgcaaacttttctgccttcaagtaaaagttttatgtgggtatatttttacctttaaagcaaaaaagatatcgaactgcatatgaaagtgtcatattgaatgtatttttgggttggggccagtcttgaaaccactagatcaagtgtctaaatctttttgtctaaggcacttacatacactgatatattttctctctttattatgctctagaaaaccaaataatcttggttcttaaatccttatagtaaaatgatatagaaatcattcatttaagcaattctagagtacatatcattgtattacccatacacataccaaaattattataacaaacttcattaaatgaagcatttttgaataataaa

SEQ ID NO: 6938 - DNA, 2168 bp, Homo sapiens
  source 1..2168: mol_type = unassigned DNA
gtgttttttgaaaactaatcagaagaggaatgcttatctcccaagaaaattgaaaccatctgtaaaagaatcttggctgtgctgtgttttgattagattgaagcttggtgtaaagagaaaacacaaaagaccgcagaatatttacaacatttgaattcctgtttctccatcaaagcacattgtcatcaaagctactttgggtatagaaaaaaggtcaattccaattcccaggaatccttaaccacaactttacttggaaatttccggtaatacttaaaacaccattttgcagcaattctttatgataaactgtaaaatacagctacccgaaaatgactgacaaatcaatcgtcattctgagcctgatggtttttcacagctctttcataaatggaaaaacatgtagacggcaattggtggaagaatggcatccacaaccctcatcatatgtggtaaattggacactaacagaaaacatctgcttggacttctacagagattgctggtttttgggtgtaaacactaaaatagatacttcaggcaatcaagctgttccccagatttgccctttgcaaattcaattaggagatatccttgtaatttcttctgaaccatctcttcaatttccagaaataaatttgatgaatgtttctgaaacatctttcgttggctgtgtgcaaaataccacaacggaagatcagttactttttggctgcagactaaaaggaatgcacactgttaattctaagtggctgagtgttgggacacattattttatcacagttatggcaagtggtccatcaccttgtccactgggacttcgactaaatgtgacagtgaaacagcagttctgccaggaatctctgagttcagaattttgctctggtcatggtaaatgtcttagtgaagcttggagcaagacatatagctgccattgccagcctccattttctggaaaatactgccaggaacttgatgcatgttcttttaaaccatgtaaaaataatggcagttgcattaataaaagagaaaattgggatgagcaagcatatgaatgtgtctgtcacccaccatttacaggaaagaattgctcagaaataattggccagtgtcaaccacatgtctgtttccatggaaactgcagcaatattacttcaaatagtttcatttgtgaatgtgatgagcaattttcaggtccattctgtgaggtgtcagcaaaaccttgtgtttctctgcttttttggaaaagaggaatttgcccaaatagcagttctgcttatacttatgaatgcccaaaaggatcttccagccaaaatggtgaaactgatgtcagtgagttttcattagtaccatgtcagaatggtactgactgcatcaaaatatcaaatgatgttatgtgcatctgttcaccaatatttacagatttgctttgtaagagcattcaaacatcatgtgagtcatttcctttgaggaataatgctacatgtaagaaatgtgagaaagattatccttgcagctgtatatcaggatttactgaaaaaaactgtgagaaagcaattgaccactgtaaactgctcagcatcaactgtctgaatgaagaatggtgtttcaatataattggaagattcaaatatgtatgcattccagggtgcacaaaaaatccatgttggtttttgaagaatgtttacctaattcatcaacacctctgctactgtggagtcaccttccatggtatttgccaagataaaggtcctgctcaatttgaatatgtgtggcaattgggatttgcaggatctgaaggcgaaaagtgccaaggggttattgatgcctatttctttctggctgcaaactgcactgaagatgcaacctatgtgaacgatcctgaagataataattcttcatgttggttcccacatgaaggcacaaaagagatttgtgcaaatggatgcagttgtttgagtgaagaagacagtcaggaatatcggtatctatgttttctcagatgggctggcaacatgtatctggaaaatacaactgatgatcaagaaaatgagtgtcaacatgaagctgtttgtaaagatgaaattaatagacccaggtatttatgtatcatttgagcagataatatcacatatcaaaaagttataattaaattgatagtcatcgaa

SEQ ID NO: 6939 - DNA, 2622 bp, Homo sapiens
  source 1..2622: mol_type = unassigned DNA
gatacacgctaggcatgtccagacattaaccgtaatcagaagcctcctagggttgcaagcctccttggctaatggttgggctttgtgcctcactcttctcttacacctggggagtcaagtctggatcctctgctccatatttatttagcaaataaaacactgatctcaaacagcaacggaacctgtgtacttgaggtgttttttgaaaactaatcagaagaggaatgcttatctcccaagaaaattgaaaccatctgtaaaagaatcttggctgtgctgtgttttgattagattgaagcttggtgtaaagagaaaacacaaaagaccgcagaatatttacaacatttgaattcctgtttctccatcaaagcacattgtcatcaaagctactttgggtatagaaaaaaggtcaattccaattcccaggaatccttaaccacaactttacttggaaatttccggtaatacttaaaacaccattttgcagcaattctttatgataaactgtaaaatacagctacccgaaaatgactgacaaatcaatcgtcattctgagcctgatggtttttcacagctctttcataaatggaaaaacatgtagacggcaattggtggaagaatggcatccacaaccctcatcatatgtggtaaattggacactaacagaaaacatctgcttggacttctacagagattgctggtttttgggtgtaaacactaaaatagatacttcaggcaatcaagctgttccccagatttgccctttgcaaattcaattaggagatatccttgtaatttcttctgaaccatctcttcaatttccagaaataaatttgatgaatgtttctgaaacatctttcgttggctgtgtgcaaaataccacaacggaagatcagttactttttggctgcagactaaaaggaatgcacactgttaattctaagtggctgagtgttgggacacattattttatcacagttatggcaagtggtccatcaccttgtccactgggacttcgactaaatgtgacagtgaaacagcagttctgccaggaatctctgagttcagaattttgctctggtcatggtaaatgtcttagtgaagcttggagcaagacatatagctgccattgccagcctccattttctggaaaatactgccaggaacttgatgcatgttcttttaaaccatgtaaaaataatggcagttgcattaataaaagagaaaattgggatgagcaagcatatgaatgtgtctgtcacccaccatttacaggaaagaattgctcagaaataattggccagtgtcaaccacatgtctgtttccatggaaactgcagcaatattacttcaaatagtttcatttgtgaatgtgatgagcaattttcaggtaaaaaatgcatatgtatacaaccatatacacaagtaactttaattttatctatgtatttcaaattaaatgtgaaatatttcctttattattgaaaaatacaatttcagaaggtatatatactgaactcttttatggtaaagtttaataaatcaatttggttaatacaattaaatcatattactgctaaatgttttatagcataagaagagtctgaacaacagttcacatgcttttcaccataaaattacttacatctttcttcagacttgcatttatgaccaatgaatttgaaattgttcatgtgtttatttgacacttcttaaccattacattttaaattatggacattttcactgaacacatgttgaggtttctgttaatttctttaaaaaaagtctgctaaaggaagatattattacatctttttttgatataaaatatgcagatgaaatatatatttttaaattacactttaagttctgggttacatgtgaaggatgggcaattttgttacataggtatgccatgtgccatggtggtttgctcacccatcaacccgtcacctatattaggtatttctcctaatgctatgcctcctctagccgccaacccccaacaggccccaatgtgtaatgttccccttcctgtgtccatgtgttctcattgttgaacccccatttatgactgagaacttccagcgtttggtttactgatcttgcgatagtttgctgagaatgatggtttccagcttcatccatgtccctacaaaggacatgaaatcatcctttttttttatggctgcatagcattccatggtgtatatgtgccacattttctttatccagtctatcattgatggacatttgggttagttccaagtctttgctattgtgaattgtgctgcagtaaacatatgtgtgcatgtgtctttatcgtagaatgattataatcctttgggtatatgcccagcaatgggattgctgggtcaaatggtatttctagttctagatccttgaggaatcaccatactgtcttccacaatggttggactaatttacactcccaccaacagtgtaaaagcattcctatttttccacaacctctctagcatctgttgtttcctgactttttaatgatcaccattctaaatggcataagatggtatctcattgtggctttgatttgcatttctctaatgaccagtgatgatgagcattttttcacatatct

SEQ ID NO: 6940 - DNA, 1253 bp, Homo sapiens
  source 1..1253: mol_type = unassigned DNA
taaaggtgttttttgaaaactaatcagaagaggaatgcttatctcccaagaaaattgaaaccatctgtaaaagaatcttggctgtgctgtgttttgattagattgaagcttggtgtaaagagaaaacacaaaagaccgcagaatatttacaacatttgaattcctgtttctccatcaaagcacattgtcatcaaagctactttgggtatagaaaaaaggtcaattccaattcccaggaatccttaaccacaactttacttggaaatttccgctctttcataaatggaaaaacatgtagacggcaattggtggaagaatggcatccacaaccctcatcatatgtggtaaattggacactaacagaaaacatctgcttggacttctacagagattgctggtttttgggtgtaaacactaaaatagatacttcaggcaatcaagctgttccccagatttgccctttgcaaattcaattaggagatatccttgtaatttcttctgaaccatctcttcaatttccagaaataaatttgatgaatgtttctgaaacatctttcgttggctgtgtgcaaaataccacaacggaagatcagttactttttggctgcagactaaaaggaatgcacactgttaattctaagtggctgagtgttgggacacattattttatcacagttatggcaagtggtccatcaccttgtccactgggacttcgactaaatgtgacagtgaaacagcagttctgccaggaatctctgagttcagaattttgctctggtcatggtaaatgtcttagtgaagcttggagcaagacatatagctgccattgccagcctccattttctggaaaatactgccaggaacttgatgcatgttcttttaaaccatgtaaaaataatggcagttgcattaataaaagagaaaattgggatgagcaagcatatgaatgtgtctgtcacccaccatttacagggttgcttggaggcaaatgaagaaaaaagttctgcattagtgaggcagggatgtcagtatataaggaatttgaaagacatcaatgataatggcaaaaactgctcataaattaaattaagagcttaattaaactggggaaaaaaacatattgccaaattacatgcagttggtttgtaacagcatttgtccacttgctatgccctgggattttcaaggcacattcctctactaaggaaagaattgctcagaaataattggccagtgtcaaccacatgtctgtt

SEQ ID NO: 6941 - DNA, 2287 bp, Homo sapiens
  source 1..2287: mol_type = unassigned DNA
gcgccgccggccctttatagcgcgcggggcaccggctccccaagactgcgagctccccgcaccccctcgcactccctctggccggcccagggcgccttcagcccaacctccccagccccacgggcgccacggaacccgctcgatctcgccgccaactggtagacatggagacccctgcctggccccgggtcccgcgccccgagaccgccgtcgctcggacgctcctgctcggctgggtcttcgcccaggtggccggcgcttcaggcactacaaatactgtggcagcatataatttaacttggaaatcaactaatttcaagacaattttggagtgggaacccaaacccgtcaatcaagtctacactgttcaaataagcactaagtcaggagattggaaaagcaaatgcttttacacaacagacacagagtgtgacctcaccgacgagattgtgaaggatgtgaagcagacgtacttggcacgggtcttctcctacccggcagggaatgtggagagcaccggttctgctggggagcctctgtatgagaactccccagagttcacaccttacctggagacaaacctcggacagccaacaattcagagttttgaacaggtgggaacaaaagtgaatgtgaccgtagaagatgaacggactttagtcagaaggaacaacactttcctaagcctccgggatgtttttggcaaggacttaatttatacactttattattggaaatcttcaagttcaggaaagaaaacagccaaaacaaacactaatgagtttttgattgatgtggataaaggagaaaactactgtttcagtgttcaagcagtgattccctcccgaacagttaaccggaagagtacagacagcccggtagagtgtatgggccaggagaaaggggaattcagagaaatattctacatcattggagctgtggtatttgtggtcatcatccttgtcatcatcctggctatatctctacacaagtgtagaaaggcaggagtggggcagagctggaaggagaactccccactgaatgtttcataaaggaagcactgttggagctactgcaaatgctatattgcactgtgaccgagaacttttaagaggatagaatacatggaaacgcaaatgagtatttcggagcatgaagaccctggagttcaaaaaactcttgatatgacctgttattaccattagcattctggttttgacatcagcattagtcactttgaaatgtaacgaatggtactacaaccaattccaagttttaatttttaacaccatggcaccttttgcacataacatgctttagattatatattccgcactcaaggagtaaccaggtcgtccaagcaaaaacaaatgggaaaatgtcttaaaaaatcctgggtggacttttgaaaagcttttttttttttttttttttttttgagacggagtcttgctctgttgcccaggctggagtgcagtagcacgatctcggctcactgcaccctccgtctctcgggttcaagcaattgtctgcctcagcctcccgagtagctgggattacaggtgcgcactaccacgccaagctaatttttgtattttttagtagagatggggtttcaccatcttggccaggctggtcttgaattcctgacctcaggtgatccacccaccttggcctcccaaagtgctagtattatgggcgtgaaccaccatgcccagccgaaaagcttttgaggggctgacttcaatccatgtaggaaagtaaaatggaaggaaattgggtgcatttctaggacttttctaacatatgtctataatatagtgtttaggttcttttttttttcaggaatacatttggaaattcaaaacaattggcaaactttgtattaatgtgttaagtgcaggagacattggtattctgggcaccttcctaatatgctttacaatctgcactttaactgacttaagtggcattaaacatttgagagctaactatatttttataagactactatacaaactacagagtttatgatttaaggtacttaaagcttctatggttgacattgtatatataattttttaaaaaggttttctatatggggattttctatttatgtaggtaatattgttctatttgtatatattgagataatttatttaatatactttaaataaaggtgactgggaattgttactgttgtacttattctatcttccatttattatttatgtacaatttggtgtttgtattagctctactacagtaaatgactgtaaaattgtca

SEQ ID NO: 6942 - DNA, 1879 bp, Homo sapiens
  source 1..1879: mol_type = unassigned DNA
catggagacccctgcctggccccgggtcccgcgccccgagaccgccgtcgctcggacgctcctgctcggctgggtcttcgcccaggtggccggcgcttcaggcactacaaatactgtggcagcatataatttaacttggaaatcaactaatttcaagacaattttggagtgggaacccaaacccgtcaatcaagtctacactgttcaaataagcactaagtcaggagattggaaaagcaaatgcttttacacaacagacacagagtgtgacctcaccgacgagattgtgaaggatgtgaagcagacgtacttggcacgggtcttctcctacccggcagggaatgtggagagcaccggttctgctggggagcctctgtatgagaactccccagagttcacaccttacctggagacaaacctcggacagccaacaattcagagttttgaacaggtgggaacaaaagtgaatgtgaccgtagaagatgaacggactttagtcagaaggaacaacactttcctaagcctccgggatgtttttggcaaggacttaatttatacactttattattggaaatcttcaagttcaggaaagaaatattctacatcattggagctgtggtatttgtggtcatcatccttgtcatcatcctggctatatctctacacaagtgtagaaaggcaggagtggggcagagctggaaggagaactccccactgaatgtttcataaaggaagcactgttggagctactgcaaatgctatattgcactgtgaccgagaacttttaagaggatagaatacatggaaacgcaaatgagtatttcggagcatgaagaccctggagttcaaaaaactcttgatatgacctgttattaccattagcattctggttttgacatcagcattagtcactttgaaatgtaacgaatggtactacaaccaattccaagttttaatttttaacaccatggcaccttttgcacataacatgctttagattatatattccgcactcaaggagtaaccaggtcgtccaagcaaaaacaaatgggaaaatgtcttaaaaaatcctgggtggacttttgaaaagcttttttttttttttttttttttttgagacggagtcttgctctgttgcccaggctggagtgcagtagcacgatctcggctcactgcaccctccgtctctcgggttcaagcaattgtctgcctcagcctcccgagtagctgggattacaggtgcgcactaccacgccaagctaatttttgtattttttagtagagatggggtttcaccatcttggccaggctggtcttgaattcctgacctcaggtgatccacccaccttggcctcccaaagtgctagtattatgggcgtgaaccaccatgcccagccgaaaagcttttgaggggctgacttcaatccatgtaggaaagtaaaatggaaggaaattgggtgcatttctaggacttttctaacatatgtctataatatagtgtttaggttcttttttttttcaggaatacatttggaaattcaaaacaattggcaaactttgtattaatgtgttaagtgcaggagacattggtattctgggcaccttcctaatatgctttacaatctgcactttaactgacttaagtggcattaaacatttgagagctaactatatttttataagactactatacaaactacagagtttatgatttaaggtacttaaagcttctatggttgacattgtatatataattttttaaaaaggttttctatatggggattttctatttatgtaggtaatattgttctatttgtatatattgagataatttatttaatatactttaaataaaggtgactgggaattgttactgttg

SEQ ID NO: 6943 - DNA, 472 bp, Homo sapiens
  source 1..472: mol_type = unassigned DNA
cactaagtcaggagattggaaaagcaaatgcttttacacaacagacacagagtgtgacctcaccgacgagattgtgaaggatgtgaagcagacgtacttggcacgggtcttctcctacccggcagggaatgtggagagcaccggttctgctggggagcctctgtatgagaactccccagagttcacaccttacctggagacaaacctcggacagccaacaattcagagttttgaacaggtgggaacaaaagtgaatgtgaccgtagaagatgaacggactttagtcagaaggaacaacactttcctaagcctccgggatgtttttggcaaggacttaatttatacactttattattggaaatcttcaagttcaggaaaggtgagcattttttaatttgtttttatgacctgttttaaattgtgaatacttgggttttacaacccatttcttccccaattcaaaaatagcaga

SEQ ID NO: 6944 - DNA, 1193 bp, Homo sapiens
  source 1..1193: mol_type = unassigned DNA
aagactgcgagctccccgcaccccctcgcactccctctggccggcccagggcgccttcagcccaacctccccagccccacgggcgccacggaacccgctcgatctcgccgccaactggtagacatggagacccctgcctggccccgggtcccgcgccccgagaccgccgtcgctcggacgctcctgctcggctgggtcttcgcccaggtggccggcgcttcaggtttgggtagaggcaatccaaaagggctggattgctgcttagattggagcaggtacaacgttgtgcatgccccgtatttctacgaggtgttcgggacggcgtagagactgggacctgctgcgtactggcaaagcagaccttcataagaaataatcctgatccaatacagccgacggtgtgacaggccacacgtccccgtgggtctctgtggaagtttcagtgtagcgacatttcagataaaagtggaaaaagtgaagtttggcttttttcatttgtatgcagtcctaactcttgtcacacgtgtgggatttatctttttccataacttactgaaaacccttcctggcgggctgaacctgactcttcctgagctgagtcctggactggcacactgatggctctgggctcttcccggtcaagttataacaaggctttgcccatgaataatttcaaacgaaaatgtcaagatccttgccggtgtcctgggattacaaggcactacaaatactgtggcagcatataatttaacttggaaatcaactaatttcaagacaattttggagtgggaacccaaacccgtcaatcaagtctacactgttcaaataagcactaagtcaggagattggaaaagcaaatgcttttacacaacagacacagagtgtgacctcaccgacgagattgtgaaggatgtgaagcagacgtacttggcacgggtcttctcctacccggcagggaatgtggagagcaccggttctgctggggagcctctgtatgagaactccccagagttcacaccttacctggagacaaacctcggacagccaacaattcagagttttgaacaggtgggaacaaaagtgaatgtgaccgtagaagatgaacggactttagtcagaaggaacaacactttcctaagcctccgggatgtttttggcaaggacttaatttatacactttattattggaaatc

SEQ ID NO: 6945 - DNA, 2075 bp, Homo sapiens
  source 1..2075: mol_type = unassigned DNA
ggacacctctagtgacacttccgggtcatcccgccacagaggctgcattaacctcagttgccctcagtgccttgctctcccagacaacatcaggcctcagtctaggtgccctgtctccagaatgcccctctagccaggggcacggcatttagggatgggatacctgtctagcacctgacaaattccagagtcacagtggcctctataagatgggctctgagccgccagcacaccccacccatcctgcccatcctgcccatcccgcccatcccatgttcctttgcaatctgccaggtcccttcctggctcacaaatgggaagtaagacagtctctccagatcttccagacgtggtggcccgccctccccaaagccaccaaaggtgccaagcctacgcagtggaatgtctgggccgctgtgcccctgtcctctgcagggagtggccagggtttggccagctgccggggcccctggctgcctcctgatgcccaagcctctccatctgcaggcacccttcgacggctcccgcctggtcttcccccctgtgccagcctccctggtgatcggcgtcttctacttgtgcatgcagctcatcctgcccgaggcagtagggggcactgtgtttgcggggggcctcctgggctacgtcctctatgacatgacccattactacctgcactttggctcgccgcacaagggctcctacctgtacagcctgaaggcccaccacgtcaagcaccactttgcacatcagaagtcaggatttggtatcagcactaaattgtgggattactgtttccacaccctcactccagagaaaccccacctgaagacgcagtgacaactcccaccccctccgtcctgccctcagcccggccctggccccttcccgacccccacccgccattcagaccccattaagaaggttggcttggccaggcaggatgggctgtgtccggccctgcagcctagtggaaggtgctgagggggccctgaggcaggaccgccctcctgacccctggtaggagggtcacatccacttggtggccaggtggcccttggtgacccacttcttcctggagcgtccctgcctagagctcagcccacaggactgcttcaggccgtggccacaggtagcagccgcaaggggaaatgaagaaaactgagccctcgtggccacctgtgtcacccttgtgccttagcctcatgggctgcctaggagctgcctgcacggcacagctcgctttcacagtcagaagtgggtctgtgggatctgtggtccctgtcctccctgctgtcccttctggggaggctttggtggctctgaggtggacaaagagctctcgcaagaagagacagcgtgatgcctcccacagtccaccccagaccctggggcagcccctctggccctgccagctgcctgcgtcgttgggcccagggtggctggcaggagtcccagctgcttgctttaggacctggcagcttttcttgccgtccctcccctgcctccagaatcacagcccttctccccaagggaggctgaggaggcttctccaccagtggcagccccaccccgtccctggccattcttggcctccaccccgctcaggcccctactcgggcgctcccagaaggagccacctctcagtgcctcacctccccctgcctcccagcctccgcagatgaggttcctgccccttcctcctcgtaaccaaaaccctcactgctcccaggacggtcttatttataaaccagatacatgttcttagtctggtcccagaccaaggagctggtcagacggccctttctaatcctacatgttgagcttatgtaaaaaatgttgtttcctcctgtttttggttcctttcttacccacaaaccattactacttgaaacttaaaaaactcgccaagtgtaaaggctaaagagaagcagtttgacggaccttgtgatttgtactgtttgctgcggagctatttaaagattttggaataaatatacaaaactacggttgtgaaataaaaacttaaattgtatattttgaaaaataaaacactgaaaagaaaccaacaaaaa

SEQ ID NO: 6946 - DNA, 2424 bp, Homo sapiens
  source 1..2424: mol_type = unassigned DNA
atgttagaggcgctcagggtggcagcagagcagacgccgggctgcgcgctgggagctgcggtctccggccatggcccccgctccgccccccgccgcctccttctcgccctccgaggtccagcggcgcctggcggccggcgcgtgctgggtccgccgcggggcccgcctctacgacctctccagcttcgtgcggcaccacccggggggcgagcagctgctgcgggccagggcgggccaggacatcagcgccgacctggacgggccgccgcacaggcactcggccaacgcgcgccgctggctggagcagtactacgtgggagagctccgcggggagcagcagggctccatggagaacgagcctgtagcccttgaggaaactcagaagacagatcctgctatggaaccacggttcaaagtggtggattgggacaaggacctggtggactggcgaaagcctctcctgtggcaggtgggccacttgggagagaagtacgatgagtgggttcaccagccggtgaccaggcccatccgcctcttccactcagacctcattgagggcctctctaagactgtctggtacagtgtccccatcatctgggtgcccctggtgctgtatctcagctggtcctactaccgaacctttgcccagggcaacgtccgactcttcacgtcatttacaacagagtacacggtggcagtgcccaagtccatgttccccgggctcttcatgctggggacattcctctggagcctcatcgagtacctcatccaccgcttcctgttccacatgaagccccccagcgacagctattacctcatcatgctgcacttcgtcatgcacggccagcaccacaaggcacccttcgacggctcccgcctggtcttcccccctgtgccagcctccctggtgatcggcgtcttctacttgtgcatgcagctcatcctgcccgaggcagtagggggcactgtgtttgcggggggcctcctgggctacgtcctctatgacatgacccattactacctgcactttggctcgccgcacaagggctcctacctgtacagcctgaaggcccaccacgtcaagcaccactttgcacatcagaagtcaggatttggtatcagcactaaattgtgggattactgtttccacaccctcactccagagaaaccccacctgaagacgcagtgacaactcccaccccctccgtcctgccctcagcccggccctggccccttcccgacccccacccgccattcagaccccattaagaaggttggcttggccaggcaggatgggctgtgtccggccctgcagcctagtggaaggtgctgagggggccctgaggcaggaccgccctcctgacccctggtaggagggtcacatccacttggtggccaggtggcccttggtgacccacttcttcctggagcgtccctgcctagagctcagcccacaggactgcttcaggccgtggccacaggtagcagccgcaaggggaaatgaagaaaactgagccctcgtggccacctgtgtcacccttgtgccttagcctcatgggctgcctaggagctgcctgcacggcacagctcgctttcacagtcagaagtgggtctgtgggatctgtggtccctgtcctccctgctgtcccttctggggaggctttggtggctctgaggtggacaaagagctctcgcaagaagagacagcgtgatgcctcccacagtccaccccagaccctggggcagcccctctggccctgccagctgcctgcgtcgttgggcccagggtggctggcaggagtcccagctgcttgctttaggacctggcagcttttcttgccgtccctcccctgcctccagaatcacagcccttctccccaagggaggctgaggaggcttctccaccagtggcagccccaccccgtccctggccattcttggcctccaccccgctcaggcccctactcgggcgctcccagaaggagccacctctcagtgcctcacctccccctgcctcccagcctccgcagatgaggttcctgccccttcctcctcgtaaccaaaaccctcactgctcccaggacggtcttatttataaaccagatacatgttcttagtctggtcccagaccaaggagctggtcagacggccctttctaatcctacatgttgagcttatgtaaaaaatgttgtttcctcctgtttttggttcctttcttacccacaaaccattactacttgaaacttaaaaaactcgccaagtgtaaaggctaaagagaagcagtttgacggaccttgtgatttgtactgtttgctgcggagctatttaaagattttggaataaatatacaaaactacggttgtgaaataaaaacttaaattgtatattttgaaaaataaaacactgaaaagaaaccaacaaaaa

SEQ ID NO: 6947 - DNA, 1537 bp, Homo sapiens
  source 1..1537: mol_type = unassigned DNA
cccgggatgttagaggcgctcagggtggcagcagagcagacgccgggctgcgcgctgggagctgcggtctccggccatggcccccgctccgccccccgccgcctccttctcgccctccgaggtccagcggcgcctggcggccggcgcgtgctgggtccgccgcggggcccgcctctacgacctctccagcttcgtgcggcaccacccggggggcgagcagctgctgcgggccagggcgggccaggacatcagcgccgacctggacgggccgccgcacaggcactcggccaacgcgcgccgctggctggagcagtactacgtgggagagctccgcggggagcagcagggctccatggagaacgagcctgtagcccttgaggaaactcagaagacagatcctgctatggaaccacggttcaaagtggtggattgggacaagagtacacggtggcagtgcccaagtccatgttccccgggctcttcatgctggggacattcctctggagcctcatcgagtacctcatccaccgcttcctgttccacatgaagccccccagcgacagctattacctcatcatgctgcacttcgtcatgcacggccagcaccacaaggcacccttcgacggctcccgcctggtcttcccccctgtgccagcctccctggtgatcggcgtcttctacttgtgcatgcagctcatcctgcccgaggcagtagggggcactgtgtttgcggggggcctcctgggctacgtcctctatgacatgacccattactacctgcactttggctcgccgcacaagggctcctacctgtacagcctgaaggcccaccacgtcaagcaccactttgcacatcagaagtcaggatttggtatcagcactaaattgtgggattactgtttccacaccctcactccagagaaaccccacctgaagacgcagtgacaactcccaccccctccgtcctgccctcagcccggccctggccccttcccgacccccacccgccattcagaccccattaagaaggttggcttggccaggcaggatgggctgtgtccggccctgcagcctagtggaaggtgctgagggggccctgaggcaggaccgccctcctgacccctggtaggagggtcacatccacttggtggccaggtggcccttggtgacccacttcttcctggagcgtccctgcctagagctcagcccacaggactgcttcaggccgtggccacaggtagcagccgcaaggggaaatgaagaaaactgagccctcgtggccacctgtgtcacccttgtgccttagcctcatgggctgcctaggagctgcctgcacggcacagctcgctttcacagtcagaagtgggtctgtgggatctgtggtccctgtcctccctgctgtcccttctggggaggctttggtggctctgaggtggacaaagagctctcgcaagaagagacagcgtgatgcctcccacagtccaccccagaccctggggcagcccctctggccctgccagctgcctgcgtcgttggg

SEQ ID NO: 6948 - DNA, 578 bp, Homo sapiens
  source 1..578: mol_type = unassigned DNA
aatgcccagcttccagctccctgccatggccaccagcaccatggcttccttcagtcacaaggacacagagaagggctccatggagaacgagcctgtagcccttgaggaaactcagaagacagatcctgctatggaaccacggttcaaagtggtggattgggacaaggacctggtggactggcgaaagcctctcctgtggcaggtgggccacttgggagagaagtacgatgagtgggttcaccagccggtgaccaggcccatccgcctcttccactcagacctcattgagggcctctctaagactgtctggtacagtgtccccatcatctgggtgcccctggtgctgtatctcagctggtcctactaccgaacctttgcccagggcaacgtccgactcttcacgtcatttacaacagagtacacggtggcagtgcccaagtccatgttccccgggctcttcatgctggggacattcctctggagcctcatcgagtacctcatccaccgcttcctgttccacatgaagccccccagcgacagctattacctcatcatgctgcacttcgtcatgcacggcc

SEQ ID NO: 6949 - DNA, 292 bp, Homo sapiens
  source 1..292: mol_type = unassigned DNA
actcttcacgtcatttacaacaggtaatgccagtttctttcctgacttgccctgaggatcctagagggaggagacctcagtgctttccctggcccagagtttctgagagcacagaaccccaaactacatcacagacatttttggtgaagcctctctgtagaaatagtcttccaaagaagaattttgtctgactcccatctaccccccaaatggatacaaaacccaacaacacatcagcagaaactaaatggaatcatcgggtggcatagcaataaaaaaagagagagagaga

SEQ ID NO: 6950 - DNA, 4144 bp, Homo sapiens
  source 1..4144: mol_type = unassigned DNA
ccgcgcggcgtgagctccccggacatcgcgtctcgggatgctgcaagccagcgcggccgctcgcgcgcagccccgcacctccgcccctgcctctgcctcctgggccatgccctgctgtttacatgccggtgaggtccccggccgctccgaacccctccgagccccggctccccgagggtgaagcccgccggcccgcgaactggactggtggatctctcagacctggggccccggactccgatctccgccgtctccgccaccatcagggcgggatccggctctggtgttttgaggagggggtgtggtgtagggaaaggaatcccgtccctctccaccttttttcgccttcggggcttcagactcagggaactcgctcatggctttcttgatgaagaagaagaaattcaaattccaaactactttcaccctggaggagctgactgcggttcccttcgtgaacggggtcctcttctgcaaggtccggctgctggatggaggggattttgtcagcttgtcgtcaagggaggaggtacaggagaactgtgtgcggtggcgaaagaggttcaccttcgtgtgtaagatgagtgctaacccggccaccggcctgctggacccctgtgtcttccgtgtgtctgtgcgcaaggagctgaaaggcgggaaggcttattccaagctgggcttcgctgacttgaacctggccgagtttgcgggctcgggctccacggtgcgctgctgcctgctcgagggatatgacacgaagaacactcgccaggacaactccatccttaaggtcaccattggtatgttcctgctctctggagatccctgcttcaagacgccaccatcgactgccaagtccatctccatcccaggccaggattcctccctgcagctgacgtgtaagggtggtgggaccagcagtgggggcagcagcaccaactccctgactgggtcccggccccccaaggctcggcccactattctcagctcagggctgccagaggaacccgaccagaacctgtccagccctgaggaggtgttccactctggccactcccgcaactccagctatgccagccagcagtccaagatctccggctacagcacagagcactcgcgctcctccagcctctcagacctgacgcaccgccgcaacacgtccaccagcagcagcgcctctgggggccttggcatgaccgtggagggccctgagggcagtgagcgggagcaccggcccccggagaagccgccgcggccaccccggcccctgcatctgtccgatcgctctttcaggcggaagaaggactcggtggagagccacccgacctgggtggacgacacgcggatcgatgcggatgccatcgtggagaagatcgtgcagagccaggatttcacagatggcagcaacaccgaggacagcaacctccggctgttcgtgagccgcgatggctctgccacgctgagcggcatccagcttgccaccagggtctcttctggggtctacgagccagttgtgattgaaagccattgaggagcaggtgtccgggctggagaagagtcctgctttctctggagtccagacctgtatcattccatgaggaactttccccttcagatcacctctgcgccacatctcatccatgcctcctccatgcactccagtccacactccccgtagcatcattccattgcccctcccatccatgctgggaccctcctggcccaccaaggcccaggcaccactgtgaatattctcctctgaaccactagagggcaggccaggcaggccaggcgggcccgtgcagcttgtgggcaagaaggagctggcaaggaccggcgctgctggagactgacccagccctctggctgaggacatgcagcggctcctaaatgtagagatgcctgtggctgagggggcctctctacctgtgtccccactcactccaggagcactggctttggtcacgtcttagcagcagggccttgctccgttgttcccttgccctggtggtgggggggccagaccacctccggaatcctgccacctgtgactgtctgactgcttagtgcttcagctgtcccttccttgtgtcctgggggacctgctggcggcctcttcctgggagccatgacctcagaccccacccacactccagatcgagacccctgcctccccccggcaaatgtcctcccgctgccttgcagcctgcactttgcacatgctcacccccagcacagtcccactggcccctcacctccccttccctgagctccttcccaaggactcctggtcactgcctgctgtgcagtcagaggcccagggtccagcagcccggcgggaacgggtgctgcctcttcctccagttagctccagctcaggtctgagacccgtgctgagaaaggtctgagcaccgaccgtgccctctgcccagggctgggtcctgagcagctggttttcctgcaggaaggttggagcaagcaaagtccttctctgccctcagggtcagctgcccagactggggcggatgccagagaggcaggtgggctgtggctggactggtccggagctggcttccttaccagaaaagcctcagccttcctctggaagcatcccccgttctgggcaagggggaagggctcctttaaggggtgtgctttcccagtggggagcagtctggccctgccccctactaaagcctctgctctcagcactttcccccaagtccttgtaacttgcttgaaggtgggttctggctgccagccagtccctggacaaactctcctgccccttttaaatttcactcattttgtataaacccagcaggctggtgtttacttagccctgtagcttttttcattttttctttccgtctttcttcttgagttcacggttcaatattgcctcctcgccctggtgaggggaggtgctgcttttctgccccacctgccggctggttccagcagcgctggggcccagctggggggccgggatgggggcttctctctctgggaggggtgcaggtgccctccccaggctgggagggttccttccctagctccccatctgcccccgctggtgagagttgggcttcttggtcttggaactccctggcattgggaacagagcatttccagcatttgttgttgttttactcacctaacccttagaaaatgaatgttagaaggtgcctgccgaggcgggacagagtgttcgctcgcgctggagaaggctctgctcagccctgagagtcccttcctgccccaccgatactggcactttaaaaaggaagctgaccgcacagtgtccagacgaattggcccccagaagatggggagttctgtcctgcccttctgtgtctgcgtgacctcacccagcctaggagggaggtgcattcagggtagatttgcctctcattcaaagttctggggctttgggtggaaaacagccagctttggcgctgttggggagactcctccagaccaggaaccccagaaggagacagagcctgccacatcctcccacgccaggccctgggccagggtgattggactgagaatttggccacaaccaaattgatgctggctggaaccagaggccagaaagcctggccttgtccccatgtgggagccctgtcctcagccctcttgtccccttgagctcagtgaattcccaccaggtgcccacagctcctggacttcaaattctatatattgagagagttggagagtatatcagagatatttttggaaaggagttggtctatgcaatgtcagtttggaatcttcttgaaagtttaatgtttttattaggagatttaaagaaaataaaggtctacaatatctttaggttttttttttttcctgtttaccgcacaaactgaccacatggcatgtctatcaggatggagggtgtccatgttctcctctgtctttagggaggtgataaggagatgggcggaggggtgtttttttctttgactcccctcctttctaacagaatgttgccaccactgcttgagtgggctgtgtttgttcctctgtcccagcttctgttgtagaaaataacattgttaggggaactcaggctagtgtcagcgtcttggtttggggagaaaaaattaaatgtttcggtttttgtttcttt

SEQ ID NO: 6951 - DNA, 4316 bp, Homo sapiens
  source 1..4316: mol_type = unassigned DNA
gggtggtgggaccagcagtgggggcagcagcaccaactccctgactgggtcccggccccccaaggctcggcccactattctcagctcagggctgccagaggaacccgaccagaacctgtccagccctgaggaggtgttccactctggccactcccgcaactccagctatgccagccagcagtccaagatctccggctacagcacagagcactcgcgctcctccagcctctcagacctgacgcaccgccgcaacacgtccaccagcagcagcgcctctgggggccttggcatgaccgtggagggccctgagggcagtgagcgggagcaccggcccccggagaagccgccgcggccaccccggcccctgcatctgtccgatcgctctttcaggcggaagaaggactcggtggagagccacccgacctgggtggacgacacgcggatcgatgcggatgccatcgtggagaagatcgtgcagagccaggatttcacagatggcagcaacaccgaggacagcaacctccggctgttcgtgagccgcgatggctctgccacgctgagcggcatccagcttgccaccaggtagggcaggcttagggaggggtcgtcggggcggctggggcttgggggtgagagcagagtccccacagtccactcacctggccttgaacgccaaatcttgtcgccacagtgtgaccctgggcctgtcatgtctctgaacctccctttccccatctgtcaggctgtgtggacaccaccacctcacctgggagcctggggcagtgagggcacggacaggttcggtggtttcccacagttcacaaggtcacctccagcaatgcctggtgcagggctcagcacatggcaggggcctcacacgcatttatttagaaccctcccttctacttcctcccagctccagggactcgggaagaatggtggtggtgatgcctcatgggtttactgaacaaatctttccctagcaccagctaggcactaggccctaagtgaaggcctggttcaatgcaggctgctgcctacacagcatccacagatggcaggggtagatgggaccaaagttgcgggaacgacagtttatagagtgctgcgtcacagacattcatttggagcatgttgactatgtgcctggctctccatgtgctttggctaaccaaatgaatgagcgagtgagcgaatgagcttcccacaggcgggctgctgagggcaggtggggagcccgcctaacatccacatccccagggaagaggcgtggccaggccgctgcgcagaggctaccctctcaagctgctctgctgactcctgctggccacggcctggaatggcagctatcacctcccagtagcctcctgggctgctctcgggtgggggtgagggggcggtgagcaagaaggaaactgaggggctggcttccttatgggtttgtaaacacacccctccctggccccctctgaaaatgaggaagcatcttggggaaagaaaccaatctggttgggagcgagatcacagcagagctacatgctgagccccgagagtccccgactccagggctgggcctgggctcggcagggaaaggagctgaccaggtttcctgacttcccactgccctcttggtcaccctcacatccctctgagcctcagtttcttcacctgtcaagtggggcaggatgcagtgactccctgccgaggtgaccgtgaggatggggtggcacagccagatgtgcccggaagggctctgcaggccccacagactctgatgcttactatctgtgtcactgtgggcaagggacttaccatcgctggggcacggttttagcccctttgcaacacagggctggttaacagtacctgcttgtgaaacacctccagaggcctggtccagtggagcgctcaggaaatggggtatcgagggggacatgctgacctgtctctcacctgcagggtctcttctggggtctacgagccagttgtgattgaaagccattgaggagcaggtgtccgggctggagaagagtcctgctttctctggagtccagacctgtatcattccatgaggaactttccccttcagatcacctctgcgccacatctcatccatgcctcctccatgcactccagtccacactccccgtagcatcattccattgcccctcccatccatgctgggaccctcctggcccaccaaggcccaggcaccactgtgaatattctcctctgaaccactagagggcaggccaggcaggccaggcgggcccgtgcagcttgtgggcaagaaggagctggcaaggaccggcgctgctggagactgacccagccctctggctgaggacatgcagcggctcctaaatgtagagatgcctgtggctgagggggcctctctacctgtgtccccactcactccaggagcactggctttggtcacgtcttagcagcagggccttgctccgttgttcccttgccctggtggtgggggggccagaccacctccggaatcctgccacctgtgactgtctgactgcttagtgcttcagctgtcccttccttgtgtcctgggggacctgctggcggcctcttcctgggagccatgacctcagaccccacccacactccagatcgagacccctgcctccccccggcaaatgtcctcccgctgccttgcagcctgcactttgcacatgctcacccccagcacagtcccactggcccctcacctccccttccctgagctccttcccaaggactcctggtcactgcctgctgtgcagtcagaggcccagggtccagcagcccggcgggaacgggtgctgcctcttcctccagttagctccagctcaggtctgagacccgtgctgagaaaggtctgagcaccgaccgtgccctctgcccagggctgggtcctgagcagctggttttcctgcaggaaggttggagcaagcaaagtccttctctgccctcagggtcagctgcccagactggggcggatgccagagaggcaggtgggctgtggctggactggtccggagctggcttccttaccagaaaagcctcagccttcctctggaagcatcccccgttctgggcaagggggaagggctcctttaaggggtgtgctttcccagtggggagcagtctggccctgccccctactaaagcctctgctctcagcactttcccccaagtccttgtaacttgcttgaaggtgggttctggctgccagccagtccctggacaaactctcctgccccttttaaatttcactcattttgtataaacccagcaggctggtgtttacttagccctgtagcttttttcattttttctttccgtctttcttcttgagttcacggttcaatattgcctcctcgccctggtgaggggaggtgctgcttttctgccccacctgccggctggttccagcagcgctggggcccagctggggggccgggatgggggcttctctctctgggaggggtgcaggtgccctccccaggctgggagggttccttccctagctccccatctgcccccgctggtgagagttgggcttcttggtcttggaactccctggcattgggaacagagcatttccagcatttgttgttgttttactcacctaacccttagaaaatgaatgttagaaggtgcctgccgaggcgggacagagtgttcgctcgcgctggagaaggctctgctcagccctgagagtcccttcctgccccaccgatactggcactttaaaaaggaagctgaccgcacagtgtccagacgaattggcccccagaagatggggagttctgtcctgcccttctgtgtctgcgtgacctcacccagcctaggagggaggtgcattcagggtagatttgcctctcattcaaagttctggggctttgggtggaaaacagccagctttggcgctgttggggagactcctccagaccaggaaccccagaaggagacagagcctgccacatcctcccacgccaggccctgggccagggtgattggactgagaatttggccacaaccaaattgatgctggctggaaccagaggccagaaagcctggccttgtccccatgtgggagccctgtcctcagccctcttgtccccttgagctcagtgaattcccaccaggtgcccacagctcctggacttcaaattctatatattgagagagttggagagtatatcagagatatttttggaaaggagttggtctatgcaatgtcagtttggaatcttcttgaaagtttaatgtttttattaggagatttaaagaaaataaaggtctacaatatc

SEQ ID NO: 6952 - DNA, 3352 bp, Homo sapiens
  source 1..3352: mol_type = unassigned DNA
gctgccgacccggggcctctgtccttgggtcccagttatgcaacagtcagtcgaggctgtggggctggcccaggggctttatctgtctccctctccaacttttgccaagttacccttctgggcttccgccagccaggagcccacactccctcagccctcccacacgctcctctcacctcctagctgggcttcgctgacttgaacctggccgagtttgcgggctcgggctccacggtgcgctgctgcctgctcgagggatatgacacgaagaacactcgccaggacaactccatccttaaggtcaccattggtatgttcctgctctctggagatccctgcttcaagacgccaccatcgactgccaagtccatctccatcccaggccaggattcctccctgcagctgacgtgtaagggtggtgggaccagcagtgggggcagcagcaccaactccctgactgggtcccggccccccaaggctcggcccactattctcagctcagggctgccagaggaacccgaccagaacctgtccagccctgaggaggtgttccactctggccactcccgcaactccagctatgccagccagcagtccaagatctccggctacagcacagagcactcgcgctcctccagcctctcagacctgacgcaccgccgcaacacgtccaccagcagcagcgcctctgggggccttggcatgaccgtggagggccctgagggcagtgagcgggagcaccggcccccggagaagccgccgcggccaccccggcccctgcatctgtccgatcgctctttcaggcggaagaaggactcggtggagagccacccgacctgggtggacgacacgcggatcgatgcggatgccatcgtggagaagatcgtgcagagccaggatttcacagatggcagcaacaccgaggacagcaacctccggctgttcgtgagccgcgatggctctgccacgctgagcggcatccagcttgccaccagggtctcttctggggtctacgagccagttgtgattgaaagccattgaggagcaggtgtccgggctggagaagagtcctgctttctctggagtccagacctgtatcattccatgaggaactttccccttcagatcacctctgcgccacatctcatccatgcctcctccatgcactccagtccacactccccgtagcatcattccattgcccctcccatccatgctgggaccctcctggcccaccaaggcccaggcaccactgtgaatattctcctctgaaccactagagggcaggccaggcaggccaggcgggcccgtgcagcttgtgggcaagaaggagctggcaaggaccggcgctgctggagactgacccagccctctggctgaggacatgcagcggctcctaaatgtagagatgcctgtggctgagggggcctctctacctgtgtccccactcactccaggagcactggctttggtcacgtcttagcagcagggccttgctccgttgttcccttgccctggtggtgggggggccagaccacctccggaatcctgccacctgtgactgtctgactgcttagtgcttcagctgtcccttccttgtgtcctgggggacctgctggcggcctcttcctgggagccatgacctcagaccccacccacactccagatcgagacccctgcctccccccggcaaatgtcctcccgctgccttgcagcctgcactttgcacatgctcacccccagcacagtcccactggcccctcacctccccttccctgagctccttcccaaggactcctggtcactgcctgctgtgcagtcagaggcccagggtccagcagcccggcgggaacgggtgctgcctcttcctccagttagctccagctcaggtctgagacccgtgctgagaaaggtctgagcaccgaccgtgccctctgcccagggctgggtcctgagcagctggttttcctgcaggaaggttggagcaagcaaagtccttctctgccctcagggtcagctgcccagactggggcggatgccagagaggcaggtgggctgtggctggactggtccggagctggcttccttaccagaaaagcctcagccttcctctggaagcatcccccgttctgggcaagggggaagggctcctttaaggggtgtgctttcccagtggggagcagtctggccctgccccctactaaagcctctgctctcagcactttcccccaagtccttgtaacttgcttgaaggtgggttctggctgccagccagtccctggacaaactctcctgccccttttaaatttcactcattttgtataaacccagcaggctggtgtttacttagccctgtagcttttttcattttttctttccgtctttcttcttgagttcacggttcaatattgcctcctcgccctggtgaggggaggtgctgcttttctgccccacctgccggctggttccagcagcgctggggcccagctggggggccgggatgggggcttctctctctgggaggggtgcaggtgccctccccaggctgggagggttccttccctagctccccatctgcccccgctggtgagagttgggcttcttggtcttggaactccctggcattgggaacagagcatttccagcatttgttgttgttttactcacctaacccttagaaaatgaatgttagaaggtgcctgccgaggcgggacagagtgttcgctcgcgctggagaaggctctgctcagccctgagagtcccttcctgccccaccgatactggcactttaaaaaggaagctgaccgcacagtgtccagacgaattggcccccagaagatggggagttctgtcctgcccttctgtgtctgcgtgacctcacccagcctaggagggaggtgcattcagggtagatttgcctctcattcaaagttctggggctttgggtggaaaacagccagctttggcgctgttggggagactcctccagaccaggaaccccagaaggagacagagcctgccacatcctcccacgccaggccctgggccagggtgattggactgagaatttggccacaaccaaattgatgctggctggaaccagaggccagaaagcctggccttgtccccatgtgggagccctgtcctcagccctcttgtccccttgagctcagtgaattcccaccaggtgcccacagctcctggacttcaaattctatatattgagagagttggagagtatatcagagatatttttggaaaggagttggtctatgcaatgtcagtttggaatcttcttgaaagtttaatgtttttattaggagatttaaagaaaataaaggtctacaatatc

SEQ ID NO: 6953 - DNA, 3148 bp, Homo sapiens
  source 1..3148: mol_type = unassigned DNA
gctgccgacccggggcctctgtccttgggtcccagttatgcaacagtcagtcgaggctgtggggctggcccaggggctttatctgtctccctctccaacttttgccaagttacccttctgggcttccgccagccaggagcccacactccctcagccctcccacacgctcctctcacctcctagctgggcttcgctgacttgaacctggccgagtttgcgggctcgggctccacggtgcgctgctgcctgctcgagggatatgacacgaagaacactcgccaggacaactccatccttaagggctgccagaggaacccgaccagaacctgtccagccctgaggaggtgttccactctggccactcccgcaactccagctatgccagccagcagtccaagatctccggctacagcacagagcactcgcgctcctccagcctctcagacctgacgcaccgccgcaacacgtccaccagcagcagcgcctctgggggccttggcatgaccgtggagggccctgagggcagtgagcgggagcaccggcccccggagaagccgccgcggccaccccggcccctgcatctgtccgatcgctctttcaggcggaagaaggactcggtggagagccacccgacctgggtggacgacacgcggatcgatgcggatgccatcgtggagaagatcgtgcagagccaggatttcacagatggcagcaacaccgaggacagcaacctccggctgttcgtgagccgcgatggctctgccacgctgagcggcatccagcttgccaccagggtctcttctggggtctacgagccagttgtgattgaaagccattgaggagcaggtgtccgggctggagaagagtcctgctttctctggagtccagacctgtatcattccatgaggaactttccccttcagatcacctctgcgccacatctcatccatgcctcctccatgcactccagtccacactccccgtagcatcattccattgcccctcccatccatgctgggaccctcctggcccaccaaggcccaggcaccactgtgaatattctcctctgaaccactagagggcaggccaggcaggccaggcgggcccgtgcagcttgtgggcaagaaggagctggcaaggaccggcgctgctggagactgacccagccctctggctgaggacatgcagcggctcctaaatgtagagatgcctgtggctgagggggcctctctacctgtgtccccactcactccaggagcactggctttggtcacgtcttagcagcagggccttgctccgttgttcccttgccctggtggtgggggggccagaccacctccggaatcctgccacctgtgactgtctgactgcttagtgcttcagctgtcccttccttgtgtcctgggggacctgctggcggcctcttcctgggagccatgacctcagaccccacccacactccagatcgagacccctgcctccccccggcaaatgtcctcccgctgccttgcagcctgcactttgcacatgctcacccccagcacagtcccactggcccctcacctccccttccctgagctccttcccaaggactcctggtcactgcctgctgtgcagtcagaggcccagggtccagcagcccggcgggaacgggtgctgcctcttcctccagttagctccagctcaggtctgagacccgtgctgagaaaggtctgagcaccgaccgtgccctctgcccagggctgggtcctgagcagctggttttcctgcaggaaggttggagcaagcaaagtccttctctgccctcagggtcagctgcccagactggggcggatgccagagaggcaggtgggctgtggctggactggtccggagctggcttccttaccagaaaagcctcagccttcctctggaagcatcccccgttctgggcaagggggaagggctcctttaaggggtgtgctttcccagtggggagcagtctggccctgccccctactaaagcctctgctctcagcactttcccccaagtccttgtaacttgcttgaaggtgggttctggctgccagccagtccctggacaaactctcctgccccttttaaatttcactcattttgtataaacccagcaggctggtgtttacttagccctgtagcttttttcattttttctttccgtctttcttcttgagttcacggttcaatattgcctcctcgccctggtgaggggaggtgctgcttttctgccccacctgccggctggttccagcagcgctggggcccagctggggggccgggatgggggcttctctctctgggaggggtgcaggtgccctccccaggctgggagggttccttccctagctccccatctgcccccgctggtgagagttgggcttcttggtcttggaactccctggcattgggaacagagcatttccagcatttgttgttgttttactcacctaacccttagaaaatgaatgttagaaggtgcctgccgaggcgggacagagtgttcgctcgcgctggagaaggctctgctcagccctgagagtcccttcctgccccaccgatactggcactttaaaaaggaagctgaccgcacagtgtccagacgaattggcccccagaagatggggagttctgtcctgcccttctgtgtctgcgtgacctcacccagcctaggagggaggtgcattcagggtagatttgcctctcattcaaagttctggggctttgggtggaaaacagccagctttggcgctgttggggagactcctccagaccaggaaccccagaaggagacagagcctgccacatcctcccacgccaggccctgggccagggtgattggactgagaatttggccacaaccaaattgatgctggctggaaccagaggccagaaagcctggccttgtccccatgtgggagccctgtcctcagccctcttgtccccttgagctcagtgaattcccaccaggtgcccacagctcctggacttcaaattctatatattgagagagttggagagtatatcagagatatttttggaaaggagttggtctatgcaatgtcagtttggaatcttcttgaaagtttaatgtttttattaggagatttaaagaaaataaaggtctacaata

SEQ ID NO: 6954 - DNA, 366 bp, Homo sapiens
  source 1..366: mol_type = unassigned DNA
gtcccggtccgatttgggatacagggaggaggtacaggagaactgtgtgcggtggcgaaagaggttcaccttcgtgtgtaagatgagtgctaacccggccaccggcctgctggacccctgtgtcttccgtgtgtctgtgcgcaaggagctgaaaggcgggaaggcttattccaagctgggcttcgctgacttgaacctggccgagtttgcgggctcgggctccacggtgcgctgctgcctgctcgagggatatgacacgaagaacactcgccaggacaactccatccttaaggtcaccattggtatgttcctgctctctggagatccctgcttcaagacgccaccatcgactgccaagtccatctc

SEQ ID NO: 6955 - DNA, 423 bp, Homo sapiens
  source 1..423: mol_type = unassigned DNA
gctgactgcggttcccttcgtgaacggggtcctcttctgcaaggtccggctgctggatggaggggattttgtcagcttgtcgtcaaggagctgaaaggcgggaaggcttattccaaggtaagaggggctgtgtgaaggggcagtgggatggaatggggggtggcatgggacaggcacaagggaagcctccagccccttttctgccacaagcaagaggcactcagccctacctgagatgtgttattttttagaaatatctttattgatggtctttgcactcaatataaaggcagcatatggttgttgcaatataaatggtacagaagtccacagagcaaaagggccagtttctgtcccctttcctctctccaggcctctttctgggaccccattattggatagattaagacctttccagacctt

SEQ ID NO: 6956 - DNA, 536 bp, Homo sapiens
  source 1..536: mol_type = unassigned DNA
gcggccgctcgcgcgcagccccgcacctccgcccctgcctctgcctcctgggccatgccctgctgtttacatgccggtgaggtccccggccgctccgaacccctccgagccccggctccccgagggtgaagcccgccggcccgcgaactggactggtggatctctcagacctggggccccggactccgatctccgccgtctccgccaccatcagggcgggatccggctctggtgttttgaggagggggtgtggtgtagggaaaggaatcccgtccctctccaccttttttcgccttcggggcttcagactcagggaactcgctcatggctttcttgatgaagaagaagaaattcaaattccaaactactttcaccctggaggagctgactgcggttcccttcgtgaacggggtcctcttctgcaaggtccggctgctggatggaggggattttgtcagcttgtcgtcaaggcctgcaggagacatttccatcctgcttctgctacttgctgcctgtgtgaccttgggcaagggact

SEQ ID NO: 6957 - DNA, 5600 bp, Homo sapiens
  source 1..5600: mol_type = unassigned DNA
tcccgactcccagacgggcggcagcggcggcggaggcggcggcggcggcggcggcgagctgagcaccaaaagggcgctcacctccccgggcgagctgcagcacgaccgctccccgcgggcggtcggggtccgcgccgcagctgccgccgcgttccggcccaggctgccgcgagaggcggcggcagcggccccggccgcggccggcctgcggcgccccccggccgcgcccccgcgcacagctcgcggccccggccatggggctgggctgatccggggctcggccaagctgaggcggcggcgcccggccgtgcgcccagcttgcaggcgcctggctctcacgatgatgaagaagaagaagtttaagtttaaggtggacttcgagctcgaggagctctcctcagtgcccttcgtcaatggggtcctcttctgcaagatgcggctgctggacggcggcagcttcaccgccgagtcctccagggaggtggtacaagcaaactgtgttcgctggagaaagaagttctcatttatgtgcaaaatgagtgcaagtgctgccacaggcatcctagatccttgtatctacagagtatccgtgaggaaggaattaaaaggtggaaaagcttatgcaaagctgggctttgcagatctaaacctggcagagtttgctggatcaggaaataccactcgccgctgtttactggaaggctatgataccaaaaatacaagacaggataattccattcttaaagttttgatcagtatgcaactgatgtctggtgacccatgttttaaaacgcctccctccacttcaatgtctataccaattgctggtgaatctgaatctttgcaagaagatagaaaaggtggagagactctcaaagtgcatcttggaatagcagatctttcagcaaagagtgcctctgttccagacgaacttggtgcctgtggacattctagaacatcaagctatgcaagtcagcagtcaaaagtatcagggtatagcacgtgtcactcccggtcatctagtttctctgagctctgccacaggagaaatacctcagtgggaagcacatcaacaggagttgaaagtattctagagccatgtgatgaaattgagcagaaaatcgctgagccaaatcttgatacagctgataaagaagatacagcttcagaaaaactcagcagatgcccagtgaaacaagattctgtagaatctcagctgaagcgagttgatgacaccagggtggatgcagatgacattgtagagaaaatattacaaagtcaagacttcagcctagattccagtgcggaagaagaaggactaaggctatttgtgggtcctgggggaagtacaacctttggcagtcatcatcttccaaatagggtggggtctggagcttatgaacaagttgtgatcaaacgctagaagtcaagtcggtgaaaacatttccttgtggatttaagatgtgagtagttgatgtatcaaggcattttattcaagcacttaatagaaaatgaacctcaactatcaagaggaaagccaatgctggtttcttctctggaaggacccaccgccatcctgtaccagccaccaaaggggaacatctacatggcagtctccaggcactgtgccactgtgtgccttggaagcacctggcttctgtggtcactgcacatcataatgaaaagcctgctttttctttcagaacaccccagcggagaaaacagcattatatacatcggagtatcattttaggattcaagtgtaaaaatctgtgatcaagaggctcaatagatttgggctctatggtttggtttttttagtttgagagacagtacatgaatataacttaaaccctatagattttgtcaagatagttgtaattcctgttctggaaatcttccctattacactacctacagcattgtataaagtgtgggtgttcatgctttgggaaaatgttagactacaatttaaacatgtgatgtgcttattcataattctcagtgtatcagtcataaatgaaataacaagtgcatttaagtcagagatacgtgaatggatgtaatgccgttatgcagtatatattgttaattgtcattaatattagatgagctgcagaaccacccccaagcactacataaaagactcaaaataagtttaacacttactgtgttgggcaccctaacagaagagctatcttaactcattgaatattaagatctgctggtttcaggagtcaaaatgtagaaaaagaggagaattgtaatatggtcagaaacagagaagccttttctatgtaaattcagacttatctgaggctaacagttttccgaagtggtggtgggtagcagcatgacagctgcttgccatgactgatgcagactactaggtttccattttagctctctgtaggtactgttttcttccccactgtgtcgaaagtgatttgttttgaagcaagagtagaatataacatctatcaaatatagcttttaaaataagaatacctggtctggatccagttgagcagcacagcagataaaccttagagtttttctgttcttacatgacggtttccatgtggaaagatctaaactttcttggaatcactattagtgaagaaaaatgtagaatctgtataaccagtaattccccaattcttactttcaaagtcatatccaagaaagacaatatgtcagaatagaatgactttggtctaggtgttttcacgttggcaaaaataaggaggaaattatattattttaatatccaaatttaaaggtttggaaaattttgaatagttaatattagaacttatgttgctgttttttatatttcaaggattgagtattctgcattaatccaatactattccaacaaagagattctggaagtttttaaaaaatgataccctgttttatattttgaatgtagagagactctgagagagagaatgttctgagttatactttttattttttaagatttatttttaagaataaaacattgacctgaacattttagcctaaccaagggacttaagtggtaaagacttgcattatgtcttcatgtgaactgatccgttcattatatattatgggaaaaatcaaagaaagttttttatagagatatgaagatattatttagagagatatttattatgacattttttaaaaacatatttttctattttcaaaatattatttctaggctatatttttattggtgctgtgcaaatgattttgcagttttgaaaatgataaaactagattgtaagtggggttcagtgaggacattcatcagacacgtaagaggtgctgcaatcagggtgatgcccatcttactcatccttggctgcccttggtccgacacctctctatacaagactggttctcagtattttaaatggtacagaattctttttaaaaagtagagagattttgaaaagcataaaaatcatgcctttataatcttagcagccatcagatacaccttgatttatgtagtagtaaatataacaaatattttaataaatagaaacactgataaggaagaaaaaagaactaatgtctatgtcttctgtagtcagcaaaagtctggatccattttctattttgtgttccattggcacactttgtgttcaaatttcagtgcagtcctttcaaaatactcgctaagggttgcctaagtgtctgccttactttctgattgtccttttctgagagcatggttaagaacatcttaaccatatagctgttgaaaaaatctgtttattaaataacaagttcacttctgtttatgttttgagtttagaaaatttgacttgaaaatttagattattaataaatttatttttaaatattaaagtcaaatttcaaatcacccagtgttgaagaatttgcagatgtatacaatactttttctaattatgtcttttctatctccatgcctggctttttctaattatatcctagagaaaaagactaatggtatttcaaagctgtgtatttgtgacgagataaagaagagtcttaaacatcttgtttgggagaatgcacaggccagtcaggagacccacctcctcctgtgccctgagctgctgagacccgacagatcatgaaggctagtaaagggcagagaaggccctgagccatcagtttacactcgaattgttgactcccctttgtggtgtttttgaaggctgcttataccaacagctaatgtggattagtgcttatgatcttgaaaaagtcttgaccaagaatcctaaactccaccactcctcccattccagcttaacactatcagaataatatccaaattccagatttttttcttttttacttttttttcttccttttttaagagagacagtgtcttgctcggtcacctaggctggagtgtagtggcgcaatcgttgctcactacagcctcccaactcccaggctcaaatgagcctcccaccttggcctcccaaagtgctaggaccacaggcatgagccactgtgcccagcctagtttcttttctgtatgctttttttacaaaactgtgagccacagaggttgaccacttagccaatttgttgctagaagggagaaaaaaatctccaactagcctccagacaaaacatactcaaattcaaacagcagttagttttaattaacatacagaagtaattttagactttcagatttctatgctgactagaacactttgcaggctgaagctgacattattaccaaatacttcatttaagtacatactctgaagtgtcaggcttccagtatatatagcaacgctctgagagacaaactgggctcatatgacggggttgcattttattttcttaacaggtctttaaattgggcagttctgaaattctgtttggtcagttctagatggtacgtcatgtgaatgcaaccaagcactgtagttgaaattgtgttatgccactactcatgttgtcttaggtactacgcataatgttaatagctgagatgttaaagaatttgaagtctaaaatataaaagatgaatatacccatattaatcctatgttaagatgctctggaaataaaggccttattcccttacacatgcgatttttgtaagataatatatacacagtatattttaaatgtttgtgtgggtggtctgtgtagttactccccatacaacaaagctgacaaaatttttaatttacacaatgtattctgcattttcaaatgtttatgttgtgtatatagcaaagaaattatcttactgatatgcgttgaccaaatcccatggagaaaagacatctcatttgaggttccccttcctctcatgtgtttgattttttggaaggtgatacagtatgtgggtaaccatgcaaatgtttatgaataactttactgaagtgattccatccgtattctgttctaatacttggagaatgaccttcatatttatatattttatttctttgtttcaactatccagtgataattcaggaaatgtttccttttttttttttttttacaaaaactttttatttgtaaaatgtttgtaataatgtaaaggtgaacatgttcaataaaaatcatatattaaaagttta

SEQ ID NO: 6958 - DNA, 1585 bp, Homo sapiens
  source 1..1585: mol_type = unassigned DNA
tcccgactcccagacgggcggcagcggcggcggaggcggcggcggcggcggcggcgagctgagcaccaaaagggcgctcacctccccgggcgagctgcagcacgaccgctccccgcgggcggtcggggtccgcgccgcagctgccgccgcgttccggcccaggctgccgcgagaggcggcggcagcggccccggccgcggccggcctgcggcgccccccggccgcgcccccgcgcacagctcgcggccccggccatggggctgggctgatccggggctcggccaagctgaggcggcggcgcccggccgtgcgcccagcttgcaggcgcctggctctcacgatgatgaagaagaagaagtttaagtttaaggtggacttcgagctcgaggagctctcctcagtgcccttcgtcaatggggtcctcttctgcaagatgcggctgctggacggcggcagcttcaccgccgagtcctccagggaggtggtacaagcaaactgtgttcgctggagaaagaagttctcatttatgtgcaaaatgagtgcaagtgctgccacaggcatcctagatccttgtatctacagagtatccgtgaggaaggaattaaaaggtggaaaagcttatgcaaagctgggctttgcagatctaaacctggcagagtttgctggatcaggaaataccactcgccgctgtttactggaaggctatgataccaaaaatacaagacaggataattccattcttaaagttttgatcagtatgcaactgatgtctggtgacccatgttttaaaacgcctccctccacttcaatgtctataccaattgctggtgaatctgaatctttgcaagaagatagaaaaggtggagagactctcaaagtgcatcttggaatagcagatctttcagcaaagagtgcctctgttccagacgaacttggtgcctgtggacattctagaacatcaagctatgcaagtcagcagtcaaaagtatcagggtatagcacgtgtcactcccggtcatctagtttctctgagctctgccacaggagaaatacctcagtgggaagcacatcaacaggagttgaaagtattctagagccatgtgatgaaattgagcagaaaatcgctgagccaaatcttgatacagctgataaagaagatacagcttcagaaaaactcagcagatgcccagtgaaacaagattctgtagaatctcagctgaagcgagttgatgacaccagggtggatgcagatgacattgtagagaaaatattacaaagtcaagacttcagcctagattccagtgcggaagaagaaggactaaggctatttgtgggtcctgggggaagtacaacctttggcagtcatcatcttccaaatagtgccctggaagctccctccttgctttgagttgtccccgcctttctggatggaaccaatgtacttcttacatatattgattaatgtctcatgtctccctaaaatgtataaaaccaagatgtgccccgaccaccctgagtacatgttgtcaggacctcctgagactgtgtcatgggagcgtgtcctcaaccttggcaaaataaactt

SEQ ID NO: 6959 - DNA, 8333 bp, Homo sapiens
  source 1..8333: mol_type = unassigned DNA
ctataccaattgctggtgaatctgaatctttgcaagaagatagaaaaggtggagagactctcaaagtgcatcttggaatagcaggtatggatgtgtggcttactggttttttaatttgtgagagacgacttgatgccctaaaaattctttgggaattgtgtgggtatttgacttgaaacaggccaataagaatcaacagttttaattatgtaattcttggttgatccagtgctttattttgtctaaagtattgtgctctgacagattaaaaactagatgttacaatgacactctcctcactgtatgcatctactccccacaggtacaagagaatactacaggattttttccatttttcccgttccattaccctgcaacttctgcaaagcagcttctgcctctcgggtgtcgctcctcttccatgaatcgctttccctctgtcagtggttctcaagccctagtgtgcatcagagtctcctggagggcttgtgaaaacacaggttgctggcggcagcagccagagtgttcgattcagtagatctgggttagagcctgaagttttgtatcactaaggcattcccacaagacgctgatgctgctagtccctgaccacaccttgagatccacatttccagacacacttctggcagcagtcagaatctgctccagaagtaaaagcatggtggggataatgtcaaggttgcaggaggaaaaggacttaggagcttccttctttcttcagtattatgtgaacaggatgtattgtttgaaagaagggaaaggtgaagttatataattaaccctttcactgccttttaaaatatgcaaatatttggtttcttataaataatggtgactctgaaatttcctgttttgggatcagtggatcttttgggaacttgtaaccattccattagctccttctcttcagcatgtaaatatgctgatttctttctcctactgaaaaaatgaaaacaaaaactccttagccctacatccttctctatctactgcactcccttagactccagcaggctggcgcatgtgctcacatgctctctctcttcccccactctgccccaaatatagatacatctctctctctctctctgtgtgtgtgtgtgtgtgtgtgtgtgtgtgtgtgtgtgtgtgtgtgtgtgtgtggagagagagagagaaagatcagcaagagatgatatatgtaccacacacttcttatagccaaacttctagaaagaatatactgtccatttattcctaaacacattagcagtctggcttccatcatctgccctctcttgctgctatcccctgatacatgattgtcaagtcctgtggacatttgttctggtcttatctgatggccagttattcattcttgatgctttctcttcccttggctcctacctctctgatctttccttttctagcttcttagaggcttcttcatcttcctccaacttccctttacatattgatgttccaaagggtttggtcccctcacttccttgagcaataccatctatacccttggctttatctatcacataaatgtaaatgtgattctgtgatgtacatgtgatcaaatgctttggggaaaggtccacttcataccaaatgtaacactgaaatccatctgtttctctttctacccagccagagtctaactaagttcttcatgatcaggtcttatttatttctgtatccccagcagaaggcccgggacacagtagatgagtgactgttgaataggcatcctcaggtgtctctaattccgcatatctagcacaagtcttcctaccttttcctcctgtcttttctacttcagttttcctgacacaaacttctcctttcttattgagtcctgctatttgtgcctatgaaacatctctccctctcagctggattattatgaaaacctacactcttatgccccctgtttatcctgttgccagagtgttcttcccaaaatgtagatttgatcatgtcacaccctttcttaaagccactgaactgttttcttctttaaactcatagaaggttcttcatcaacaggcatctactcatctttctagccccttttccctcggttattatactccactaccctatatgccaactttaccaaacgatctgcttccctacaaagaaggcatgctcttcccggtgcctttccttgctcatctagctcaggagttcctatacgtcgctcaagtcctggggttaacctcctctgttaccaggttgtgtcagatgcactgtcctttggagctcttaatagctgcttttttgtgcttgtatttttgtacttaccacattgtataagttttgcttctacctctaaactctaagcatgtattttgtcttattttgtacttcctataccttgtacagtattaggcacctgactgggtaaaatattaataaatattgattgaatgaataaattttgaaaaccagaagatatgtggatgacttaagatctgggccaaacccagaagtaaagagcgctgcataactcgatatgaaccaactttttgagttcagattttgctgaatgtttgcttttggaccacttatactctgtccagaaatgagaaacctttgcagaaggaccaggttactccagtattttccttgttttgcagcatttgttggtccaactgcatgcagtatcatttatagaatagctgctataatagctatgttactcaattgctttccttctgcttctaagttaaaaacagttcttgtttccaaatatgattgtgccctagggaaaatggtcacagttctgcattctctggaagaagcctggttctgaaaatatgtaattggcacctggaacatacacatgatcagaaactattagaaatggctttgacactgccttttgtacatttactttgaatatgaatactataatcactttcttaagaacttttactctcagtgctacgtcccatgctgtgttgatttaagccacagacattgcccaaattatagcctagcactaacaacactaacattaaagtaatagagtactctttagcttgctgttgtgatggatttttaaggaagcagtatttccttagaaaccacattaaaacctaccaattttgtgaacatttataagaatacatctgagtcatttttgttagagaaatactgaacactaaaactgtagcagttttaagatagagtgctgttaaatgttttgaacaacaggagtttattgcatagactgaactaataaaggactgaaataattttttaatgttatgaaaaatataattcttcagcgaactaaggtatttaaatactttgtatatcttgcaatacagttacttccattgcactgacttaaaaggatgtccctcattttgtaacttattgttttgataatgaacttggcagagtttataaagtctgcagagtagaatacaaattgaccattaactttttggcaataagaatgacatcatgttatgacatattacagatctttcagcaaagagtgcctctgttccagacgaacttggtgcctgtggacattctagaacatcaagctatgcaagtcagcagtcaaaagtatcaggtagaggctaacagtgaagttgaattccttattgttccaaagggacttgaaactgctgtggtgtgggggaacgatgtcagattgcagagtgtttgatatgagtattatatccaaggtgattttctctgacagggtatagcacgtgtcactcccggtcatctagtttctctgagctctgccacaggagaaatacctcagtgggaagcacatcaacaggagttgaaagtattctagagccatgtgatgaaattgagcagaaaatcgctgagccaaatcttgatacagctgataaagaagatacagcttcagaaaaactcagcagatgcccagtgaaacaagattctgtagaatctcagctgaagcgagttgatgacaccagggtggatgcagatgacattgtagagaaaatattacaaagtcaagacttcagcctagattccagtgcggaagaagaaggactaaggctatttgtgggtcctgggggaagtacaacctttggcagtcatcatcttccaaatagggtggggtctggagcttatgaacaagttgtgatcaaacgctagaagtcaagtcggtgaaaacatttccttgtggatttaagatgtgagtagttgatgtatcaaggcattttattcaagcacttaatagaaaatgaacctcaactatcaagaggaaagccaatgctggtttcttctctggaaggacccaccgccatcctgtaccagccaccaaaggggaacatctacatggcagtctccaggcactgtgccactgtgtgccttggaagcacctggcttctgtggtcactgcacatcataatgaaaagcctgctttttctttcagaacaccccagcggagaaaacagcattatatacatcggagtatcattttaggattcaagtgtaaaaatctgtgatcaagaggctcaatagatttgggctctatggtttggtttttttagtttgagagacagtacatgaatataacttaaaccctatagattttgtcaagatagttgtaattcctgttctggaaatcttccctattacactacctacagcattgtataaagtgtgggtgttcatgctttgggaaaatgttagactacaatttaaacatgtgatgtgcttattcataattctcagtgtatcagtcataaatgaaataacaagtgcatttaagtcagagatacgtgaatggatgtaatgccgttatgcagtatatattgttaattgtcattaatattagatgagctgcagaaccacccccaagcactacataaaagactcaaaataagtttaacacttactgtgttgggcaccctaacagaagagctatcttaactcattgaatattaagatctgctggtttcaggagtcaaaatgtagaaaaagaggagaattgtaatatggtcagaaacagagaagccttttctatgtaaattcagacttatctgaggctaacagttttccgaagtggtggtgggtagcagcatgacagctgcttgccatgactgatgcagactactaggtttccattttagctctctgtaggtactgttttcttccccactgtgtcgaaagtgatttgttttgaagcaagagtagaatataacatctatcaaatatagcttttaaaataagaatacctggtctggatccagttgagcagcacagcagataaaccttagagtttttctgttcttacatgacggtttccatgtggaaagatctaaactttcttggaatcactattagtgaagaaaaatgtagaatctgtataaccagtaattccccaattcttactttcaaagtcatatccaagaaagacaatatgtcagaatagaatgactttggtctaggtgttttcacgttggcaaaaataaggaggaaattatattattttaatatccaaatttaaaggtttggaaaattttgaatagttaatattagaacttatgttgctgttttttatatttcaaggattgagtattctgcattaatccaatactattccaacaaagagattctggaagtttttaaaaaatgataccctgttttatattttgaatgtagagagactctgagagagagaatgttctgagttatactttttattttttaagatttatttttaagaataaaacattgacctgaacattttagcctaaccaagggacttaagtggtaaagacttgcattatgtcttcatgtgaactgatccgttcattatatattatgggaaaaatcaaagaaagttttttatagagatatgaagatattatttagagagatatttattatgacattttttaaaaacatatttttctattttcaaaatattatttctaggctatatttttattggtgctgtgcaaatgattttgcagttttgaaaatgataaaactagattgtaagtggggttcagtgaggacattcatcagacacgtaagaggtgctgcaatcagggtgatgcccatcttactcatccttggctgcccttggtccgacacctctctatacaagactggttctcagtattttaaatggtacagaattctttttaaaaagtagagagattttgaaaagcataaaaatcatgcctttataatcttagcagccatcagatacaccttgatttatgtagtagtaaatataacaaatattttaataaatagaaacactgataaggaagaaaaaagaactaatgtctatgtcttctgtagtcagcaaaagtctggatccattttctattttgtgttccattggcacactttgtgttcaaatttcagtgcagtcctttcaaaatactcgctaagggttgcctaagtgtctgccttactttctgattgtccttttctgagagcatggttaagaacatcttaaccatatagctgttgaaaaaatctgtttattaaataacaagttcacttctgtttatgttttgagtttagaaaatttgacttgaaaatttagattattaataaatttatttttaaatattaaagtcaaatttcaaatcacccagtgttgaagaatttgcagatgtatacaatactttttctaattatgtcttttctatctccatgcctggctttttctaattatatcctagagaaaaagactaatggtatttcaaagctgtgtatttgtgacgagataaagaagagtcttaaacatcttgtttgggagaatgcacaggccagtcaggagacccacctcctcctgtgccctgagctgctgagacccgacagatcatgaaggctagtaaagggcagagaaggccctgagccatcagtttacactcgaattgttgactcccctttgtggtgtttttgaaggctgcttataccaacagctaatgtggattagtgcttatgatcttgaaaaagtcttgaccaagaatcctaaactccaccactcctcccattccagcttaacactatcagaataatatccaaattccagatttttttcttttttacttttttttcttccttttttaagagagacagtgtcttgctcggtcacctaggctggagtgtagtggcgcaatcgttgctcactacagcctcccaactcccaggctcaaatgagcctcccaccttggcctcccaaagtgctaggaccacaggcatgagccactgtgcccagcctagtttcttttctgtatgctttttttacaaaactgtgagccacagaggttgaccacttagccaatttgttgctagaagggagaaaaaaatctccaactagcctccagacaaaacatactcaaattcaaacagcagttagttttaattaacatacagaagtaattttagactttcagatttctatgctgactagaacactttgcaggctgaagctgacattattaccaaatacttcatttaagtacatactctgaagtgtcaggcttccagtatatatagcaacgctctgagagacaaactgggctcatatgacggggttgcattttattttcttaacaggtctttaaattgggcagttctgaaattctgtttggtcagttctagatggtacgtcatgtgaatgcaaccaagcactgtagttgaaattgtgttatgccactactcatgttgtcttaggtactacgcataatgttaatagctgagatgttaaagaatttgaagtctaaaatataaaagatgaatatacccatattaatcctatgttaagatgctctggaaataaaggccttattcccttacacatgcgatttttgtaagataatatatacacagtatattttaaatgtttgtgtgggtggtctgtgtagttactccccatacaacaaagctgacaaaatttttaatttacacaatgtattctgcattttcaaatgtttatgttgtgtatatagcaaagaaattatcttactgatatgcgttgaccaaatcccatggagaaaagacatctcatttgaggttccccttcctctcatgtgtttgattttttggaaggtgatacagtatgtgggtaaccatgcaaatgtttatgaataactttactgaagtgattccatccgtattctgttctaatacttggagaatgaccttcatatttatatattttatttctttgtttcaactatccagtgataattcaggaaatgtttccttttttttttttttttacaaaaactttttatttgtaaaatgtttgtaataatgtaaaggtgaacatgttcaataaaaatcatatattaaaa

SEQ ID NO: 6960 - DNA, 3367 bp, Homo sapiens
  source 1..3367: mol_type = unassigned DNA
ctgcctcaggaagcttggcttcccctcccatggggaagtgctggaatccactcttgcctgaccctcccataagaaacaagggaaattcctttacgtgagccgccttgctcagaacaaagcttggcgtgtttcttattcctcatcaatctgacaaaatgggtatttatttgtgcctctcaagcgtgtggcttggacatgatgttccgcatcgtggaagtggccgtgcaccaagtggaatatctgttactatagtaacagttcctttttattgataccagaataaacaggaatgcaaaggctgtctcacttgttggcacatttcagcagcctccgttcccaggggtttaagaaccgccctctagaggcagccctccttgctagtctgggacttcccggtggagtgaggaacccagcaacacgctcctgacttcccttcccaaggactcgacctgagaaccgccatgtactcggagatccagagggagcgggcagacattgggggcctgatggcccggccagaatacagagagtggaatccggagctcatcaagcccaagaagctgctgaaccccgtgaaggcctctcggagtcaccaggagctccaccgggagctgctcatgaaccacagaaggggccttggtgtggacagcaagccagagctgcagcgtgtcctagagcaccgccggcggaaccagctcatcaagaagaagaaggaggagctggaagccaagcggctgcagtgcccctttgagcaggagctgctgagacggcagcagaggctgaaccagctggaaaaaccaccagagaaggaagaggatcacgcccccgagtttattaaagtcagggaaaacctgcggagaattgccacactgaccagcgaagagagagagctgtagggccagctgccgggctcaggccactgcccaccctggcctggacagcctccttcagcccttctgtacctggcagccctgggccccaggccctgggacgtctgtgatgttcccacctgcttctgtagaaatgtgtcaccccagagggcctggctctccctgggaggctggggcccctaagctcctaggttttccttccaagcacccagccctcctgctccaagagggataacctgcacccctccctgcaaggggttcagagcccagcacaggagctttctctggcagaattgaggaggaagaggtggccctctgacttgacaagccttctgttctgcccaggccttcccaccaggaatctccgaggctccccagggccccgcttctccgtacaccccagctcctaggtctcagagaactcccccacctgtggttttacctgcagccagcagagcttagcttcaaggacacctgccttcaaagccactgaggggaggaagggcagggcagactgcagatggccttgttgctggcatcccggccaggtgggcggggactaacaaagacagctgtttagggtcttctcccctcacccatgctttcatcatcccctccgcacagcctccccgtccaggccttctaaccacacctacccagggctgccgcattcctgcactcagaagtctgcagcggtgcctcacaaacttgattgtgcataaaaatcactggggatcttgttaatacagcttctaactcaatagatctgggagatcctgcatttctaacaagctcccaggtaaggcggaggctgctggtgtgaggaccatgctgtgagcagcagggcgagagtgcccagggctgatatatattggaaatatcacccctgaagccatcgctggcccccacctcctgtggactgatgccccagggattcccaccccacttctgcaaccccaggtatccttcattatccaccccatcccagactcccaccccagggattgcccgtgaagactttggcctagcaaattgtgttggttatgtgagtgttgttttaatcagagatgtacatgattgccaatctgcatttcttaccagtgtgaccacactgttacgatgcaattctagccaaaaaaaaaaaaaaaaaaaaaaaaattttttttttttactttttcctagtcttatggaaagcaaatatacaatgattttcagtaggcttctggaatagaaacagtggtttgaagaccccactgccacctttatggactggcccctttgagtctgaatccccggcctctgtcacctgagacccaacccctagctgggccaactccagtgaattcacccatttttcttcttcagaaggcctttcctgtgtgagacccacatattttaaccttttgctcctatcccatttttaaagaattagagaataaaccaggcctgtttcttttcccctgaaatccctgcctctggcttcctaaacccatcatctaaggtgacagagcagtgctggaatagcatctcctttcactttcccaaaactgccacagatagctgccactggcatgctctttgattcctggaagcaaacgtgggactgtcggaggaaagggattgttctggtcttactcataactgggtggtttgagggtgactgaagtcgtgcttttcctgtgtgtgctgccagcacagggctgtaaatgcagatattgcgcctgtgtgcgtgtgtataagtcaagctccaagaggctcctgaatgtgactggcgtgctgagaatgtgtttacgctgtttaatgtctgccaggtgagggttacactgaagatgcacaatccctaaaataaagatcaccacttccccaaagaagcagccctcgggtccatgtgttgttcagacatgtgaagagaagcaagacagagggtctcagatggacgagggctctccaagggaatgcctggggattcacccagtggtccccagaggtgctccatggaggcaacaagtcattccatgaagccccagaggtagaagggacctcaagcaccacgccctccagggcagccgtgcagacgaccttggttcacttttcaggggtcgtcccaactctgtatctccagccactccaactgtggaggctgtaaatccagattttcactgttccagtctcctttgcagcttaggatggctatgtgatcaggtgtggccaatgaaattgaagaggaagtctacctgggcttctgggaaagcttttccaataaaagacacaggcatggctaacacctccctgggcctcttcttcctaccttgattgagggtgtgatgcctggagccacagcagccactttgctaccatgacaaaaaggccaagagaatcacagagtcattgaccctatcattatttcaccaagccaataccagccgccatccttctccagaattcttgtaaataaaataaatccctctttgtttaaa

SEQ ID NO: 6961 - DNA, 3465 bp, Homo sapiens
  source 1..3465: mol_type = unassigned DNA
ctgcctcaggaagcttggcttcccctcccatggggaagtgctggaatccactcttgcctgaccctcccataagaaacaagggaaattcctttacgtgagccgccttgctcagaacaaagcttggcgtgtttcttattcctcatcaatctgacaaaatgggtatttatttgtgcctctcaagcgtgtggcttggacatgatgttccgcatcgtggaagtggccgtgcaccaagtggaatatctgttactatagtaacagttcctttttattgataccagaataaacaggaatgcaaaggctgtctcacttgttggcacatttcagcagcctccgttcccaggggtttaagaaccgccctctagaggcagccctccttgctagtctgggacttcccggtggagtgaggaacccagcaacacgctcctgacttcccttcccaaggactcgacctgagaaggacacagcagtctctgaatttcatgctctcctctttgatgtgaagaaaatgaaaagctgaacagttgtggaactgtggatagagttagacaataaggccgccatgtactcggagatccagagggagcgggcagacattgggggcctgatggcccggccagaatacagagagtggaatccggagctcatcaagcccaagaagctgctgaaccccgtgaaggcctctcggagtcaccaggagctccaccgggagctgctcatgaaccacagaaggggccttggtgtggacagcaagccagagctgcagcgtgtcctagagcaccgccggcggaaccagctcatcaagaagaagaaggaggagctggaagccaagcggctgcagtgcccctttgagcaggagctgctgagacggcagcagaggctgaaccagctggaaaaaccaccagagaaggaagaggatcacgcccccgagtttattaaagtcagggaaaacctgcggagaattgccacactgaccagcgaagagagagagctgtagggccagctgccgggctcaggccactgcccaccctggcctggacagcctccttcagcccttctgtacctggcagccctgggccccaggccctgggacgtctgtgatgttcccacctgcttctgtagaaatgtgtcaccccagagggcctggctctccctgggaggctggggcccctaagctcctaggttttccttccaagcacccagccctcctgctccaagagggataacctgcacccctccctgcaaggggttcagagcccagcacaggagctttctctggcagaattgaggaggaagaggtggccctctgacttgacaagccttctgttctgcccaggccttcccaccaggaatctccgaggctccccagggccccgcttctccgtacaccccagctcctaggtctcagagaactcccccacctgtggttttacctgcagccagcagagcttagcttcaaggacacctgccttcaaagccactgaggggaggaagggcagggcagactgcagatggccttgttgctggcatcccggccaggtgggcggggactaacaaagacagctgtttagggtcttctcccctcacccatgctttcatcatcccctccgcacagcctccccgtccaggccttctaaccacacctacccagggctgccgcattcctgcactcagaagtctgcagcggtgcctcacaaacttgattgtgcataaaaatcactggggatcttgttaatacagcttctaactcaatagatctgggagatcctgcatttctaacaagctcccaggtaaggcggaggctgctggtgtgaggaccatgctgtgagcagcagggcgagagtgcccagggctgatatatattggaaatatcacccctgaagccatcgctggcccccacctcctgtggactgatgccccagggattcccaccccacttctgcaaccccaggtatccttcattatccaccccatcccagactcccaccccagggattgcccgtgaagactttggcctagcaaattgtgttggttatgtgagtgttgttttaatcagagatgtacatgattgccaatctgcatttcttaccagtgtgaccacactgttacgatgcaattctagccaaaaaaaaaaaaaaaaaaaaaaaaattttttttttttactttttcctagtcttatggaaagcaaatatacaatgattttcagtaggcttctggaatagaaacagtggtttgaagaccccactgccacctttatggactggcccctttgagtctgaatccccggcctctgtcacctgagacccaacccctagctgggccaactccagtgaattcacccatttttcttcttcagaaggcctttcctgtgtgagacccacatattttaaccttttgctcctatcccatttttaaagaattagagaataaaccaggcctgtttcttttcccctgaaatccctgcctctggcttcctaaacccatcatctaaggtgacagagcagtgctggaatagcatctcctttcactttcccaaaactgccacagatagctgccactggcatgctctttgattcctggaagcaaacgtgggactgtcggaggaaagggattgttctggtcttactcataactgggtggtttgagggtgactgaagtcgtgcttttcctgtgtgtgctgccagcacagggctgtaaatgcagatattgcgcctgtgtgcgtgtgtataagtcaagctccaagaggctcctgaatgtgactggcgtgctgagaatgtgtttacgctgtttaatgtctgccaggtgagggttacactgaagatgcacaatccctaaaataaagatcaccacttccccaaagaagcagccctcgggtccatgtgttgttcagacatgtgaagagaagcaagacagagggtctcagatggacgagggctctccaagggaatgcctggggattcacccagtggtccccagaggtgctccatggaggcaacaagtcattccatgaagccccagaggtagaagggacctcaagcaccacgccctccagggcagccgtgcagacgaccttggttcacttttcaggggtcgtcccaactctgtatctccagccactccaactgtggaggctgtaaatccagattttcactgttccagtctcctttgcagcttaggatggctatgtgatcaggtgtggccaatgaaattgaagaggaagtctacctgggcttctgggaaagcttttccaataaaagacacaggcatggctaacacctccctgggcctcttcttcctaccttgattgagggtgtgatgcctggagccacagcagccactttgctaccatgacaaaaaggccaagagaatcacagagtcattgaccctatcattatttcaccaagccaataccagccgccatccttctccagaattcttgtaaataaaataaatccctctttgtttaaa

SEQ ID NO: 6962 - DNA, 2159 bp, Homo sapiens
  source 1..2159: mol_type = unassigned DNA
gctagtctgggacttcccggtggagtgaggaacccagcaacacgctcctgacttcccttcccaaggactcgacctgagaaccgccatgtactcggagatccagagggagcgggcagacattgggggcctgatggcccggccagaatacagagagtggaatccggagctcatcaagcccaagaagctgctgaaccccgtgaaggcctctcggagtcaccaggagctccaccgggagctgctcatgaaccacagaaggggccttggtgtggacagcaagccagagctgcagcgtgtcctagagcaccgccggcggaaccagctcatcaagaagaagaaggaggagctggaagccaagcggctgcagtgcccctttgagcaggagctgctgagacggcagcagaggctgaaccaggtgggtgatgggcacccagcagggaccacgcatcctccagggctgtcctccagggaggagctctgctgtggccacagctagtaagagggaagaggatcagcagacagagcactggactaagagtccactcctggcctgagtcctccctctgccattcactttgctaggtccttagggcgagtggcttccctgaacctcagcttcctcactggcccagtgtactgcatgctgattctgatttcattcttataactgtcttgtgagccaggtggcattcccattttagagatggggaagctgaggcccagagggggtgagtgatttgaaccaggctgcacaaggagaactcagtctcatgctctgtgccccagctaccaggctgatagcaaaactcatccccaggttggttctgtttccccactgagtgggcccttggtccaaactccacaggttttcagagtaggaatccccctagctccacccacttcactctctgcttctccctccttcagctggaaaaaccaccagagaaggaagaggatcacgcccccgagtttattaaagtcagggaaaacctgcggagaattgccacactgaccagcgaagagagagagctgtagggccagctgccgggctcaggccactgcccaccctggcctggacagcctccttcagcccttctgtacctggcagccctgggccccaggccctgggacgtctgtgatgttcccacctgcttctgtagaaatgtgtcaccccagagggcctggctctccctgggaggctggggcccctaagctcctaggttttccttccaagcacccagccctcctgctccaagagggataacctgcacccctccctgcaaggggttcagagcccagcacaggagctttctctggcagaattgaggaggaagaggtggccctctgacttgacaagccttctgttctgcccaggccttcccaccaggaatctccgaggctccccagggccccgcttctccgtacaccccagctcctaggtctcagagaactcccccacctgtggttttacctgcagccagcagagcttagcttcaaggacacctgccttcaaagccactgaggggaggaagggcagggcagactgcagatggccttgttgctggcatcccggccaggtgggcggggactaacaaagacagctgtttagggtcttctcccctcacccatgctttcatcatcccctccgcacagcctccccgtccaggccttctaaccacacctacccagggctgccgcattcctgcactcagaagtctgcagcggtgcctcacaaacttgattgtgcataaaaatcactggggatcttgttaatacagcttctaactcaatagatctgggagatcctgcatttctaacaagctcccaggtaaggcggaggctgctggtgtgaggaccatgctgtgagcagcagggcgagagtgcccagggctgatatatattggaaatatcacccctgaagccatcgctggcccccacctcctgtggactgatgccccagggattcccaccccacttctgcaaccccaggtatccttcattatccaccccatcccagactcccaccccagggattgcccgtgaagactttggcctagcaaattgtgttggttatgtgagtgttgttttaatcagagatgtacatgattgccaatctgcatttcttaccagtgtgaccacactgttacgatgcaattctagcc

SEQ ID NO: 6963 - DNA, 2271 bp, Homo sapiens
  source 1..2271: mol_type = unassigned DNA
agttgaatgaaggagtctgctctcagagtatctgctgtgggagagccccggaccccaagcatcttcaaaggtctattattaatggggctgtccagctgaagctgacatccgcacgcagccctcccagagctctgcacctcagccagcccacggcctccaccgtctggccctgtcggctgagtggtgcccagcaaggtgagaaggccaagtcctgcccgctgggccaggcagaggtcacccgccgcgcctgagctaccggtgtgtgatgagaggactgccccacgtcttccctcatttcccagctgcctcagtttcccttcctgagagaggcagggttctgggaggtgaggagctgcagggacccaagaagggcatagaagccgcctggggacactggcccctctgtcaggatcaatcgccctaagcctgtctgaggcgctccgggcttaggagcagctgtgaaagccgcctttgtgcctgggagaatgagccgcaagaggacagggggccctcgccccgggagccccttgggtcctggctcctgagatcaacgccagcagggaggaccccagcctggcccctgcagcccacccaggcctggtgcccacttcgtgccatgggagcagcccaggggaagaagaaaacatactctcctcaggccagatttcatagtgaaaatgagaagcagagacgaaatggctcagccgccatgtactcggagatccagagggagcgggcagacattgggggcctgatggcccggccagaatacagagagtggaatccggagctcatcaagcccaagaagctgctgaaccccgtgaaggcctctcggagtcaccaggagctccaccgggagctgctcatgaaccacagaaggggccttggtgtggacagcaagccagagctgcagcgtgtcctagagcaccgccggcggaaccagctcatcaagaagaagaaggaggagctggaagccaagcggctgcagtgcccctttgagcaggagctgctgagacggcagcagaggctgaaccagctggaaaaaccaccagagaaggaagaggatcacgcccccgagtttattaaagtcagggaaaacctgcggagaattgccacactgaccagcgaagagagagagctgtagggccagctgccgggctcaggccactgcccaccctggcctggacagcctccttcagcccttctgtacctggcagccctgggccccaggccctgggacgtctgtgatgttcccacctgcttctgtagaaatgtgtcaccccagagggcctggctctccctgggaggctggggcccctaagctcctaggttttccttccaagcacccagccctcctgctccaagagggataacctgcacccctccctgcaaggggttcagagcccagcacaggagctttctctggcagaattgaggaggaagaggtggccctctgacttgacaagccttctgttctgcccaggccttcccaccaggaatctccgaggctccccagggccccgcttctccgtacaccccagctcctaggtctcagagaactcccccacctgtggttttacctgcagccagcagagcttagcttcaaggacacctgccttcaaagccactgaggggaggaagggcagggcagactgcagatggccttgttgctggcatcccggccaggtgggcggggactaacaaagacagctgtttagggtcttctcccctcacccatgctttcatcatcccctccgcacagcctccccgtccaggccttctaaccacacctacccagggctgccgcattcctgcactcagaagtctgcagcggtgcctcacaaacttgattgtgcataaaaatcactggggatcttgttaatacagcttctaactcaatagatctgggagatcctgcatttctaacaagctcccaggtaaggcggaggctgctggtgtgaggaccatgctgtgagcagcagggcgagagtgcccagggctgatatatattggaaatatcacccctgaagccatcgctggcccccacctcctgtggactgatgccccagggattcccaccccacttctgcaaccccaggtatccttcattatccaccccatcccagactcccaccccagggattgcccgtgaagactttggcctagcaaattgtgttggttatgtgagtgttgttttaatcagagatgtacatgattgccaatctgcatttcttaccagtgtgaccacactgttacgatgcaattctagcc

SEQ ID NO: 6964 - DNA, 1432 bp, Homo sapiens
  source 1..1432: mol_type = unassigned DNA
ttcccccggcggcgtctcctcgcccgcccctccggccgccgccgtaacttgaccctcagcggggtttgggacttggggccgcgtcaccgtcgcggaggcgcttcggctccggactacgctcctgctgtgcgctcgcggggccagcagtgctggctctgcagtaggaggcgcgggggcatggcgcagaggctgggcgagtgggcccgggggccctccgatgccaccgggctctaccgggctgtgctgctccggtcggccgccatgtactcggagatccagagggagcgggcagacattgggggcctgatggcccggccagaatacagagagtggaatccggagctcatcaagcccaagaagctgctgaaccccgtgaaggcctctcggagtcaccaggagctccaccgggagctgctcatgaaccacagaaggggccttggtgtggacagcaagccagagctgcagcgtgtcctagagcaccgccggcggaaccagctcatcaagaagaagaaggaggagctggaagccaagcggctgcagtgcccctttgagcaggagctgctgagacggcagcagaggctgaaccagctggaaaaaccaccagagaaggaagaggatcacgcccccgagtttattaaagtcagggaaaacctgcggagaattgccacactgaccagcgaagagagagagctgtagggccagctgccgggctcaggccactgcccaccctggcctggacagcctccttcagcccttctgtacctggcagccctgggccccaggccctgggacgtctgtgatgttcccacctgcttctgtagaaatgtgtcaccccagagggcctggctctccctgggaggctggggcccctaagctcctaggttttccttccaagcacccagccctcctgctccaagagggataacctgcacccctccctgcaaggggttcagagcccagcacaggagctttctctggcagaattgaggaggaagaggtggccctctgacttgacaagccttctgttctgcccaggccttcccaccaggaatctccgaggctccccagggccccgcttctccgtacaccccagctcctaggtctcagagaactcccccacctgtggttttacctgcagccagcagagcttagcttcaaggacacctgccttcaaagccactgaggggaggaagggcagggcagactgcagatggccttgttgctggcatcccggccaggtgggcggggactaacaaagacagctgtttagggtcttctcccctcacccatgctttcatcatcccctccgcacagcctccccgtccaggccttctaaccacacctacccagggctgccgcattcctgcactcagaagtctgcagcggtgcctcacaaacttgattgtgcataaaaatcactggggatcttgtt

SEQ ID NO: 6965 - DNA, 580 bp, Homo sapiens
  source 1..580: mol_type = unassigned DNA
agttgaatgaaggagtctgctctcagagtatctgctgtgggagagccccggaccccaagcatcttcaaaggtctattattaatggggctgtccagctgaagctgacatccgcacgcagccctcccagagctctgcacctcagccagcccacggcctccaccgtctggccctgtcggctgagtggtgcccagcaagaaaacatactctcctcaggccagatttcatagtgaaaatgagaagcagagacgaaatggctcagccgccatgtactcggagatccagagggagcgggcagacattgggggcctgatggcccggccagaatacagagagtggaatccggagctcatcaagcccaagaagctgctgaaccccgtgaaggcctctcggagtcaccaggagctccaccgggagctgctcatgaaccacagaaggggccttggtgtggacagcaagccagagctgcagcgtgtcctagagcaccgccggcggaaccagctcatcaagaagaagaaggaggagctggaagccaagcggctgcagtgcccctttgagcaggagctgctgagacggcagcaga

SEQ ID NO: 6966 - DNA, 834 bp, Homo sapiens
  source 1..834: mol_type = unassigned DNA
gcaaggtgagaaggccaagtcctgcccgctgggccaggcagaggtcacccgccgcgcctgagctaccggtgtgtgatgagaggactgccccacgtcttccctcatttcccagctgcctcagtttcccttcctgagagaggcagggttctgggaggtgaggagctgcagggacccaagaagggcatagaagccgcctggggacactggcccctctgtcaggatcaatcgccctaagcctgtctgaggcgctccgggcttaggagcagctgtgaaagccgcctttgtgcctgggagaatgagccgcaagaggacagggggccctcgccccgggagccccttgggtcctggctcctgagatcaacgccagcagggaggaccccagcctggcccctgcagcccacccaggcctggtgcccacttcgtgccatgggagcagcccaggggaagaagaaaaagaaatgaaggcccagacacgttacgccatttgcccaagaccacacagccagaagagagtggctgggatggacctatacctgccatctcttcacctgcatctgctgggaaccccatccctcagcactggggccatttccagctcctgcatcatggggcctccttgtcccctttcccatgaccaggccctgaaaatgctcccaccccaatcctgccagctcccccaactcctgagaaagtcccctctgagagccaagagtccctgcagatctcaggaaggtgtccaggggaaagagatgcatgcaaagccccattccagctctgccaactcactgcttattcattaataaaagaatgcccaggctattttgggcacctgta

SEQ ID NO: 6967 - DNA, 3316 bp, Homo sapiens
  source 1..3316: mol_type = unassigned DNA
ggcccccgggggcttctgggagtgcctgccttcgcagctggagagagccctcctcaggggctgtctctgccttcccttcttcccatgtgtatctggggcagctgaggcagggctaggagaagagcccaggttcctcctgccacctccaagcgatgaagcagccctgggccaactccagcattctcgtgtgaactgcagaggagccctgcgcttccagctacttgcagccagacagcccacctgaggatattgaccataaggactcatatctcattacaagaagcatcatggccgagccagactacatagaagatgacaatcctgaactcattaggcctcagaaactgatcaatcctgtaaaaacctcccggaaccatcaagatcttcacagagaacttcttatgaatcaaaaaaggggtcttgctcctcagaacaaaccagaattgcagaaggtgatggaaaaaagaaaacgagaccaagtaataaagcagaaggaagaagaagcacagaagaagaaatctgacttggaaatagagctattaaaacggcagcagaagttggagcagcttgaacttgagaagcagaaattgcaagaagagcaagaaaatgcccccgagtttgtgaaggtgaaaggcaatctcaggagaacaggccaagaagtcgcccaagcccaggagtcctaggctgaggctgcaccaagacctcgtgtgtcaccccacagagctgtctgtgggtgccttctcaatctcagggcaaaagcccctggagaatatttcagccagcagagaattttgacttgcagtaggatttggtttgattttcctacgatctgggtggatgccttgcctgtgacagttgcagttcctattcgccaaatgaagggcagtgccccgcacgtaagttggaatgatggacctgtgttcagagacttaacagaaccaacaagcaaaacaagtgagaacaggaaaaaggaagaggacactggaatcaattcttgagagttgcactacttggtttttcttccattccaagtttcgtgggacccagagccttttttcttttaaaagctaaaaaacaagtgtttaattcctctttttgttatctgttagataattgagatcacctagaaatgcgtttaatctgttcactcactgtaaattttgaggacccagaattgtcttgtttaatttatactttcacccctgttgcagttaacaccagagaaggaacgtgaatgtcgagcacagccactacccttgttggcacttaatttagaaatagggtgagaagtttaaaagcccatcttgattttattttcattccttttggttctctgtgtaataatagcaggctacatagtgacattccagttccaagaaggtacatcctgtccattcattaattgctttgattactaggagggtttctgttcagttttgtttttaaatgtcttgctgatctagttctttcagatggaataaccttccagtcccttagagagtggaactagtccatataacccagcttcagtagcaaaagtagaagccgccacatcttttcatttctccaagaggagagtggggaaggttcccatgaccagctgggcagtcaggatttctctaggcattctaatgtgaaataagtgtagactgctgtcaaggaggcttcatcagaagatgtatagcatttgaatgtctaatgataatgcatatcattagaatccaagctttgaaaatttctgattaatgctcatgtatttctttatctttgtttttccttgtgaagaaagactttcaccactgtctgagtgatgatgctgttgataaggatgatgtcgatgactactatattgcatctctcaggaacagctgatgggaagggaggggctgctgagttcccttgttctagctagcagcacgctcctcagagagggggccgagttacagacagcagccgcattctcatgcaaaattagttttaaactgctagtgtgggcatcggtaccttttgcctgggtgataccgaagaattgttgaggatttagtatgctccgtagagacagttcagccagtcatttctgcattggagagacttctcatactttctttgaagactcatagaaagctggatctagagcttttgaatccttaattagcacagtagaaattagctttctatgggaatgctttagtgttagcagttgacaattaggcccatattcaatctgaatgggaacaaaagtaaatgcaatgataatatactgctagttagagaaacatgttagttgattatacctgaaatggattatttatctcatcagcaagtattatttgaataaaatgagaaatgcttaagaaaaattgttgctctacagtaatttggtttcgaagaatggaatggtaactattttttcccatcgttcttttgagagaaggaagtgtgatgactgatgatcttgaaaagcccatttctgattgcacgttgactggaattctttctttgtgtctgtggactagcgatgctgtttgtaaaatgaagattcgggactggctcatatctttttatctaactagatgtcagatcttgaaatctgtattctcgaagcaattctgccacttgatcgtattcacaggggccctggtaggctcctttagaaggaccatttctgttcctagagcttaactagaattcattcttcactgaaaaaaaaaaaagttacttaagaaagcatttctttcctaatctcactcaaatctgcagaattatttgtaattagtaatacaaaatctggccaaaaggagacttgtaaatagcgtaaagtggtgtcttatgctaaacggtggaatgtataggcagagaagctctttgaagttgtcagatgagctgggctcacaagcctgattcaaacaggctgtcggtctcctctcaccccttaatactgtgcagcccaaactcctaggactcttgaacatctgagcagttttgtgctttgagccactttttgacaaaaatggctccatttttccacagcgtggttttcttaaaatagtttaatgttttatagtctcatagtagtagtgttgctttctaagctataacagtcgactttattcttctactctgaaaaatcttgacttgtttgagtgtatataatatatataaagggagccttaatggattggttttcataatttaatattttttgtatttgctcttgtataattgtttttaacggaaagtattaaagaattgagggtggaattcttagaaccaaagttattcttaataaaaatcaccacatgcttggaccatgcaa

SEQ ID NO: 6968 - DNA, 3785 bp, Homo sapiens
  source 1..3785: mol_type = unassigned DNA
acagaaggaagagcgcgaaattgcccaggatggacactttcaaaggggccccagcggctaagtgactctcagggaaggtggccttgccatcccaacttctatttaggggcaaccactagcaagttcttctcttcgggcaattggaaagagttcctataagcaaagtggaggtgatgtggacccctggaaaatttccttgccccgtttgaactttgcaatgattcactgcaagtcatgtccacgtggaaagcaagactcaccaaaagactgaagtctccctctagaagcatgcatccatttccgtgctcagctctgctcgcctgttttgggaatacgagggagagtgcttccttcaatcagtccggcgtggctgatactcattccaccgtccgtgtgcagcctgtggccaaagcaggcagacagccaagacacccaagcgcagaaggagctccagagaaaaggcaagattcgagcacccatgcagagagaaatggcagtgcgaatcggaattcaagtcaccgcactgcggcccagcccgcggagacgcctgaagatgtgcccgggtccctggatgatggggcggactgtgaagcagtggtgtttcacgcttccatccccagaccatcaattattgacacgcccaaggaagaagaatttcgagaagaacctaaatgcctcgagctggagcagaaaatgacatcagacagcccacctgaggatattgaccataaggactcatatctcattacaagaagcatcatggccgagccagactacatagaagatgacaatcctgaactcattaggcctcagaaactgatcaatcctgtaaaaacctcccggaaccatcaagatcttcacagagaacttcttatgaatcaaaaaaggggtcttgctcctcagaacaaaccagaattgcagaaggtgatggaaaaaagaaaacgagaccaagtaataaagcagaaggaagaagaagcacagaagaagaaatctgacttggaaatagagctattaaaacggcagcagaagttggagcagcttgaacttgagaagcagaaattgcaagaagagcaagaaaatgcccccgagtttgtgaaggtgaaaggcaatctcaggagaacaggccaagaagtcgcccaagcccaggagtcctaggctgaggctgcaccaagacctcgtgtgtcaccccacagagctgtctgtgggtgccttctcaatctcagggcaaaagcccctggagaatatttcagccagcagagaattttgacttgcagtaggatttggtttgattttcctacgatctgggtggatgccttgcctgtgacagttgcagttcctattcgccaaatgaagggcagtgccccgcacgtaagttggaatgatggacctgtgttcagagacttaacagaaccaacaagcaaaacaagtgagaacaggaaaaaggaagaggacactggaatcaattcttgagagttgcactacttggtttttcttccattccaagtttcgtgggacccagagccttttttcttttaaaagctaaaaaacaagtgtttaattcctctttttgttatctgttagataattgagatcacctagaaatgcgtttaatctgttcactcactgtaaattttgaggacccagaattgtcttgtttaatttatactttcacccctgttgcagttaacaccagagaaggaacgtgaatgtcgagcacagccactacccttgttggcacttaatttagaaatagggtgagaagtttaaaagcccatcttgattttattttcattccttttggttctctgtgtaataatagcaggctacatagtgacattccagttccaagaaggtacatcctgtccattcattaattgctttgattactaggagggtttctgttcagttttgtttttaaatgtcttgctgatctagttctttcagatggaataaccttccagtcccttagagagtggaactagtccatataacccagcttcagtagcaaaagtagaagccgccacatcttttcatttctccaagaggagagtggggaaggttcccatgaccagctgggcagtcaggatttctctaggcattctaatgtgaaataagtgtagactgctgtcaaggaggcttcatcagaagatgtatagcatttgaatgtctaatgataatgcatatcattagaatccaagctttgaaaatttctgattaatgctcatgtatttctttatctttgtttttccttgtgaagaaagactttcaccactgtctgagtgatgatgctgttgataaggatgatgtcgatgactactatattgcatctctcaggaacagctgatgggaagggaggggctgctgagttcccttgttctagctagcagcacgctcctcagagagggggccgagttacagacagcagccgcattctcatgcaaaattagttttaaactgctagtgtgggcatcggtaccttttgcctgggtgataccgaagaattgttgaggatttagtatgctccgtagagacagttcagccagtcatttctgcattggagagacttctcatactttctttgaagactcatagaaagctggatctagagcttttgaatccttaattagcacagtagaaattagctttctatgggaatgctttagtgttagcagttgacaattaggcccatattcaatctgaatgggaacaaaagtaaatgcaatgataatatactgctagttagagaaacatgttagttgattatacctgaaatggattatttatctcatcagcaagtattatttgaataaaatgagaaatgcttaagaaaaattgttgctctacagtaatttggtttcgaagaatggaatggtaactattttttcccatcgttcttttgagagaaggaagtgtgatgactgatgatcttgaaaagcccatttctgattgcacgttgactggaattctttctttgtgtctgtggactagcgatgctgtttgtaaaatgaagattcgggactggctcatatctttttatctaactagatgtcagatcttgaaatctgtattctcgaagcaattctgccacttgatcgtattcacaggggccctggtaggctcctttagaaggaccatttctgttcctagagcttaactagaattcattcttcactgaaaaaaaaaaaagttacttaagaaagcatttctttcctaatctcactcaaatctgcagaattatttgtaattagtaatacaaaatctggccaaaaggagacttgtaaatagcgtaaagtggtgtcttatgctaaacggtggaatgtataggcagagaagctctttgaagttgtcagatgagctgggctcacaagcctgattcaaacaggctgtcggtctcctctcaccccttaatactgtgcagcccaaactcctaggactcttgaacatctgagcagttttgtgctttgagccactttttgacaaaaatggctccatttttccacagcgtggttttcttaaaatagtttaatgttttatagtctcatagtagtagtgttgctttctaagctataacagtcgactttattcttctactctgaaaaatcttgacttgtttgagtgtatataatatatataaagggagccttaatggattggttttcataatttaatattttttgtatttgctcttgtataattgtttttaacggaaagtattaaagaattgagggtggaattcttagaaccaaagttattcttaataaaaatcaccacatgcttggaccatg

SEQ ID NO: 6969 - DNA, 2633 bp, Homo sapiens
  source 1..2633: mol_type = unassigned DNA
gcgccggactggcttgcgggccgggccgccgcccccggagccgccctcgcgccgcctcgggccgccgccgagcagtcgggccgctgggcgccgccgcgggcgccgggagcgagctgggagggagccgcgcgcctttgtgcgcgcgccgagacagcccacctgaggatattgaccataaggactcatatctcattacaagaagcatcatggccgagccagactacatagaagatgacaatcctgaactcattaggcctcagaaactgatcaatcctgtaaaaacctcccggaaccatcaagatcttcacagagaacttcttatgaatcaaaaaaggggtcttgctcctcagaacaaaccagaattgcagaaggtgatggaaaaaagaaaacgagaccaagtaataaagcagaaggaagaagaagcacagaagaagaaatctgacttggaaatagagctattaaaacggcagcagaagttggagcagcttgaacttgagaagcagaaattgcaagaagagcaagaaaatgcccccgagtttgtgaaggtgaaaggcaatctcaggagaacaggccaagaagtcgcccaagcccaggagtcctaggctgaggctgcaccaagacctcgtgtgtcaccccacagagctgtctgtgggtgccttctcaatctcagggcaaaagcccctggagaatatttcagccagcagagaattttgacttgcagtaggatttggtttgattttcctacgatctgggtggatgccttgcctgtgacagttgcagttcctattcgccaaatgaagggcagtgccccgcacgtaagttggaatgatggacctgtgttcagagacttaacagaaccaacaagcaaaacaagtgagaacaggaaaaaggaagaggacactggaatcaattcttgagagttgcactacttggtttttcttccattccaagtttcgtgggacccagagccttttttcttttaaaagctaaaaaacaagtgtttaattcctctttttgttatctgttagataattgagatcacctagaaatgcgtttaatctgttcactcactgtaaattttgaggacccagaattgtcttgtttaatttatactttcacccctgttgcagttaacaccagagaaggaacgtgaatgtcgagcacagccactacccttgttggcacttaatttagaaatagggtgagaagtttaaaagcccatcttgattttattttcattccttttggttctctgtgtaataatagcaggctacatagtgacattccagttccaagaaggtacatcctgtccattcattaattgctttgattactaggagggtttctgttcagttttgtttttaaatgtcttgctgatctagttctttcagatggaataaccttccagtcccttagagagtggaactagtccatataacccagcttcagtagcaaaagtagaagccgccacatcttttcatttctccaagaggagagtggggaaggttcccatgaccagctgggcagtcaggatttctctaggcattctaatgtgaaataagtgtagactgctgtcaaggaggcttcatcagaagatgtatagcatttgaatgtctaatgataatgcatatcattagaatccaagctttgaaaatttctgattaatgctcatgtatttctttatctttgtttttccttgtgaagaaagactttcaccactgtctgagtgatgatgctgttgataaggatgatgtcgatgactactatattgcatctctcaggaacagctgatgggaagggaggggctgctgagttcccttgttctagctagcagcacgctcctcagagagggggccgagttacagacagcagccgcattctcatgcaaaattagttttaaactgctagtgtgggcatcggtaccttttgcctgggtgataccgaagaattgttgaggatttagtatgctccgtagagacagttcagccagtcatttctgcattggagagacttctcatactttctttgaagactcatagaaagctggatctagagcttttgaatccttaattagcacagtagaaattagctttctatgggaatgctttagtgttagcagttgacaattaggcccatattcaatctgaatgggaacaaaagtaaatgcaatgataatatactgctagttagagaaacatgttagttgattatacctgaaatggattatttatctcatcagcaagtattatttgaataaaatgagaaatgcttaagaaaaattgttgctctacagtaatttggtttcgaagaatggaatggtaactattttttcccatcgttcttttgagagaaggaagtgtgatgactgatgatcttgaaaagcccatttctgattgcacgttgactggaattctttctttgtgtctgtggactagcgatgctgtttgtaaaatgaagattcgggactggctcatatctttttatctaactagatgtcagatcttgaaatctgtattctcgaagcaattctgccacttgatcgtattcacaggggccctggtaggctcctttagaaggaccatttctgttcctagagcttaactagaattcattcttcactgaaaaaaaaaaaa

SEQ ID NO: 6970 - DNA, 2374 bp, Homo sapiens
  source 1..2374: mol_type = unassigned DNA
gcggggccgcggggagcgagagccgccctgcgccggactggcttgcgggccgggccgccgcccccggagccgccctcgcgccgcctcgggccgccgccgagcagtcgggccgctgggcgccgccgcgggcgccgggagcgagctgggagggagccgcgcgcctttgtgcgcgcgccgaggagaatgcagttgaaactaattttgtggatagagaaactgttggaactgctttacaaagtattttaacagcccacctgaggatattgaccataaggactcatatctcattacaagaagcatcatggccgagccagactacatagaagatgacaatcctgaactcattaggcctcagaaactgatcaatcctgtaaaaacctcccggaaccatcaagatcttcacagagaacttcttatgaatcaaaaaaggggtcttgctcctcagaacaaaccagaattgcagaaggtgatggaaaaaagaaaacgagaccaagtaataaagcagaaggaagaagaagcacagaagaagaaatctgacttggaaatagagctattaaaacggcagcagaagttggagcagcttgaacttgagaagcagaaattgcaagaagagcaagaaaatgcccccgagtttgtgaaggtgaaaggcaatctcaggagaacaggccaagaagtcgcccaagcccaggagtcctaggctgaggctgcaccaagacctcgtgtgtcaccccacagagctgtctgtgggtgccttctcaatctcagggcaaaagcccctggagaatatttcagccagcagagaattttgacttgcagtaggatttggtttgattttcctacgatctgggtggatgccttgcctgtgacagttgcagttcctattcgccaaatgaagggcagtgccccgcacgtaagttggaatgatggacctgtgttcagagacttaacagaaccaacaagcaaaacaagtgagaacaggaaaaaggaagaggacactggaatcaattcttgagagttgcactacttggtttttcttccattccaagtttcgtgggacccagagccttttttcttttaaaagctaaaaaacaagtgtttaattcctctttttgttatctgttagataattgagatcacctagaaatgcgtttaatctgttcactcactgtaaattttgaggacccagaattgtcttgtttaatttatactttcacccctgttgcagttaacaccagagaaggaacgtgaatgtcgagcacagccactacccttgttggcacttaatttagaaatagggtgagaagtttaaaagcccatcttgattttattttcattccttttggttctctgtgtaataatagcaggctacatagtgacattccagttccaagaaggtacatcctgtccattcattaattgctttgattactaggagggtttctgttcagttttgtttttaaatgtcttgctgatctagttctttcagatggaataaccttccagtcccttagagagtggaactagtccatataacccagcttcagtagcaaaagtagaagccgccacatcttttcatttctccaagaggagagtggggaaggttcccatgaccagctgggcagtcaggatttctctaggcattctaatgtgaaataagtgtagactgctgtcaaggaggcttcatcagaagatgtatagcatttgaatgtctaatgataatgcatatcattagaatccaagctttgaaaatttctgattaatgctcatgtatttctttatctttgtttttccttgtgaagaaagactttcaccactgtctgagtgatgatgctgttgataaggatgatgtcgatgactactatattgcatctctcaggaacagctgatgggaagggaggggctgctgagttcccttgttctagctagcagcacgctcctcagagagggggccgagttacagacagcagccgcattctcatgcaaaattagttttaaactgctagtgtgggcatcggtaccttttgcctgggtgataccgaagaattgttgaggatttagtatgctccgtagagacagttcagccagtcatttctgcattggagagacttctcatactttctttgaagactcatagaaagctggatctagagcttttgaatccttaattagcacagtagaaattagctttctatgggaatgctttagtgttagcagttgacaattaggcccatattcaatctgaatgggaacaaaagtaaatgcaatgataatatactgctagttagagaaacatgttagttgattatacctgaaatggattatttatctcatcagcaagtattatttgaataaaatgagaaatgcttaagaaaaa

SEQ ID NO: 6971 - DNA, 2317 bp, Homo sapiens
  source 1..2317: mol_type = unassigned DNA
ttccttgccccgtttgaactttgcaatgattcactgcaagtcatgtccacgtggaaagcaagactcaccaaaagactgaagtctccctctagaagcatgcatccatttccgtgctcagctctgctcgcctgttttgggaatacgagggagagtgcttccttcaatcagtccggcgtggctgatactcattccaccgtccgtgtgcagcctgtggccaaagcaggcagacagccaagacacccaagcgcagaaggagctccagagaaaaggcaagattcgagcacccatgcagagagaaatggcagtgcgaatcggaattcaagtcaccgcactgcggcccagcccgcggagacgcctgaagatgtgcccgggtccctggatgatggggcggactgtgaagcagtggtgtttcacgcttccatccccagaccatcaattattgacacgcccaaggaagaagaatttcgagaagaacctaaatgcctcgagctggagcagaaaatgacatcaggagaatgcagttgaaactaattttgtggatagagaaactgttggaactgctttacaaagtattttaacagcccacctgaggatattgaccataaggactcatatctcattacaagaagcatcatggccgagccagactacatagaagatgacaatcctgaactcattaggcctcagaaactgatcaatcctgtaaaaacctcccggaaccatcaagatcttcacagagaacttcttatgaatcaaaaaaggggtcttgctcctcagaacaaaccagaattgcagaaggtgatggaaaaaagaaaacgagaccaagtaataaagcagaaggaagaagaagcacagaagaagaaatctgacttggaaatagagctattaaaacggcagcagaagttggagcagcttgaacttgagaagcagaaattgcaagaagagcaagaaaatgcccccgagtttgtgaaggtgaaaggcaatctcaggagaacaggccaagaagtcgcccaagcccaggagtcctaggctgaggctgcaccaagacctcgtgtgtcaccccacagagctgtctgtgggtgccttctcaatctcagggcaaaagcccctggagaatatttcagccagcagagaattttgacttgcagtaggatttggtttgattttcctacgatctgggtggatgccttgcctgtgacagttgcagttcctattcgccaaatgaagggcagtgccccgcacgtaagttggaatgatggacctgtgttcagagacttaacagaaccaacaagcaaaacaagtgagaacaggaaaaaggaagaggacactggaatcaattcttgagagttgcactacttggtttttcttccattccaagtttcgtgggacccagagccttttttcttttaaaagctaaaaaacaagtgtttaattcctctttttgttatctgttagataattgagatcacctagaaatgcgtttaatctgttcactcactgtaaattttgaggacccagaattgtcttgtttaatttatactttcacccctgttgcagttaacaccagagaaggaacgtgaatgtcgagcacagccactacccttgttggcacttaatttagaaatagggtgagaagtttaaaagcccatcttgattttattttcattccttttggttctctgtgtaataatagcaggctacatagtgacattccagttccaagaaggtacatcctgtccattcattaattgctttgattactaggagggtttctgttcagttttgtttttaaatgtcttgctgatctagttctttcagatggaataaccttccagtcccttagagagtggaactagtccatataacccagcttcagtagcaaaagtagaagccgccacatcttttcatttctccaagaggagagtggggaaggttcccatgaccagctgggcagtcaggatttctctaggcattctaatgtgaaataagtgtagactgctgtcaaggaggcttcatcagaagatgtatagcatttgaatgtctaatgataatgcatatcattagaatccaagctttgaaaatttctgattaatgctcatgtatttctttatctttgtttttccttgtgaagaaagactttcaccactgtctgagtgatgatgctgttgataaggatgatgtcgatgactactatattgcatctctcaggaacagctgatgggaagggaggggctgctgagttcccttgttctagctagcagcacgctcctcagagagggggccgagttacagacagcagccgcattctcatgcaaaa

SEQ ID NO: 6972 - DNA, 1052 bp, Homo sapiens
  source 1..1052: mol_type = unassigned DNA
agaagttgctagagtgtttctctttgaacttgaactgtggctcttttgatatccagaaagagagttctttgtggggatggttaattcttgttttgggtgcttttcttcaccgctctaaggaactaccacagtcagaaggtgcattcttactgcgatctttttatttgctaccttgggcttaaggagcctgcctatatctactgagacagcccacctgaggatattgaccataaggactcatatctcattacaagaagcatcatggccgagccagactacatagaagatgacaatcctgaactcattaggcctcagaaactgatcaatcctgtaaaaacctcccggaaccatcaagatcttcacagagaacttcttatgaatcaaaaaaggggtcttgctcctcagaacaaaccagaattgcagaaggtgatggaaaaaagaaaacgagaccaagtaataaagcagaaggaagaagaagcacagaagaagaaatctgacttggaaatagagctattaaaacggcagcagaagttggagcagcttgaacttgagaagcagaaattgcaagaagagcaagaaaatgcccccgagtttgtgaaggtgaaaggcaatctcaggagaacaggccaagaagtcgcccaagcccaggagtcctaggctgaggctgcaccaagacctcgtgtgtcaccccacagagctgtctgtgggtgccttctcaatctcagggcaaaagcccctggagaatatttcagccagcagagaattttgacttgcagtaggatttggtttgattttcctacgatctgggtggatgccttgcctgtgacagttgcagttcctattcgccaaatgaagggcagtgccccgcacgtaagttggaatgatggacctgtgttcagagacttaacagaaccaacaagcaaaacaagtgagaacaggaaaaaggaagaggacactggaatcaattcttgagagttgcactacttggtttttcttccattccaagtttcgtgggacccagagccttttttcttttaaaagctaaaaaacaa

SEQ ID NO: 6973 - DNA, 1284 bp, Homo sapiens
  source 1..1284: mol_type = unassigned DNA
attgtttgctctggcttctgtgccggatgaggtcattcagttgcatacagttcctgctttcagaagttgctagagtgtttctctttgaacttgaactgtggctcttttgatatccagaaagagagttctttgtggggatggttaattcttgttttgggtgcttttcttcaccgctctaaggaactaccacagtcagaaggtgcattcttactgcgatctttttatttgctaccttgggcttaaggagcctgcctatatctactgaggtgaggttaggtcagtctctgtaaccgttcgtcacttaggccttgatgggtgacatggatggggatgacttcctgggctaactcttctcttgctaaaggatgatttttcaccaccttgaatgcccatgattaaaacataaacaagaaaatagatatctgaggagaatgcagttgaaactaattttgtggatagagaaactgttggaactgctttacaaagtattttaacagcccacctgaggatattgaccataaggactcatatctcattacaagaagcatcatggccgagccagactacatagaagatgacaatcctgaactcattaggcctcagaaactgatcaatcctgtaaaaacctcccggaaccatcaagatcttcacagagaacttcttatgaatcaaaaaaggggtcttgctcctcagaacaaaccagaattgcagaaggtgatggaaaaaagaaaacgagaccaagtaataaagcagaaggaagaagaagcacagaagaagaaatctgacttggaaatagagctattaaaacggcagcagaagttggagcagcttgaacttgagaagcagaaattgcaagaagagcaagaaaatgcccccgagtttgtgaaggtgaaaggcaatctcaggagaacaggccaagaagtcgcccaagcccaggagtcctaggctgaggctgcaccaagacctcgtgtgtcaccccacagagctgtctgtgggtgccttctcaatctcagggcaaaagcccctggagaatatttcagccagcagagaattttgacttgcagtaggatttggtttgattttcctacgatctgggtggatgccttgcctgtgacagttgcagttcctattcgccaaatgaagggcagtgccccgcacgtaagttggaatgatggacctgtgttcagagacttaacagaaccaacaagcaaaacaagtgagaacaggaaaaaggaagaggacactggaatcaattcttgagagttgcactacttggtttttctt

SEQ ID NO: 6974 - DNA, 790 bp, Homo sapiens
  source 1..790: mol_type = unassigned DNA
atatcgagtattgagaagggaatgtgcttggtctgtcttctctctctgcttcgtcacctgccagtcctgagggccccaggcagcagtgcagctttaatgtggattcctatggatcagaggtgtcctagggctcacgttgttattctgcattgcacttgcagccagacagcccacctgaggatattgaccataaggactcatatctcattacaagaagcatcatggccgagccagactacatagaagatgacaatcctgaactcattaggcctcagaaactgatcaatcctgtaaaaacctcccggaaccatcaagatcttcacagagaacttcttatgaatcaaaaaaggggtcttgctcctcagaacaaaccagaattgcagaaggtgatggaaaaaagaaaacgagaccaagtaataaagcagaaggaagaagaagcacagaagaagaaatctgacttggaaatagagctattaaaacggcagcagaagttggagcagcttgaacttgagaagcagaaattgcaagaagagcaagaaaatgcccccgagtttgtgaaggtgaaaggcaatctcaggagaacaggccaagaagtcgcccaagcccaggagtcctaggctgaggctgcaccaagacctcgtgtgtcaccccacagagctgtctgtgggtgccttctcaatctcagggcaaaagcccctggagaatatttcagccagcagagaattttgacttgcagtaggatttggtttgattttcctacgatctgggtggatgccttgcctgtgacagt

SEQ ID NO: 6975 - DNA, 692 bp, Homo sapiens
  source 1..692: mol_type = unassigned DNA
gtttctctttgaacttgaactgtggctcttttgatatccagaaagagagttctttgtggggatggttaattcttgttttgggtgcttttcttcaccgctctaaggaactaccacagtcagaagacagcccacctgaggatattgaccataaggactcatatctcattacaagaagcatcatggccgagccagactacatagaagatgacaatcctgaactcattaggcctcagaaactgatcaatcctgtaaaaacctcccggaaccatcaagatcttcacagagaacttcttatgaatcaaaaaaggggtcttgctcctcagaacaaaccagaattgcagaaggtgatggaaaaaagaaaacgagaccaagtaataaagcagaaggaagaagaagcacagaagaagaaatctgacttggaaatagagctattaaaacggcagcagaagttggagcagcttgaacttgagaagcagaaattgcaagaagagcaagaaaatgcccccgagtttgtgaaggtgaaaggcaatctcaggagaacaggccaagaagtcgcccaagcccaggagtcctaggctgaggctgcaccaagacctcgtgtgtcaccccacagagctgtctgtgggtgccttctcaatctcagggcaaaagcccctggagaatatttcagccagcagagaattttgacttgc

SEQ ID NO: 6976 - DNA, 857 bp, Homo sapiens
  source 1..857: mol_type = unassigned DNA
ttcgcagctggagagagccctcctcaggggctgtctctgccttcccttcttcccatgtgtatctggggcagctgaggcagggctaggagaagagcccaggttcctcctgccacctccaagcgatgaagcagccctgggccaactccagcattctcgtgtgaactgcagaggagccctgcgcttccagctacttgcagccagacagcccacctgaggatattgaccataaggactcatatctcattacaagaagcatcatggccgagccagactacatagaagatgacaatcctgaactcattaggcctcagaaactgatcaatcctgtaaaaacctcccggaaccatcaagatcttcacagagaacttcttatgaatcaaaaaaggattttggtctggttggaaatacattaaaaaaaaaaaaaagaaaaggcagatttcaaaatgaaatgaaaatatatctcatcttatctcttaagagttttcaaggggtcttgctcctcagaacaaaccagaattgcagaaggtgatggaaaaaagaaaacgagaccaagtaataaagcagaaggaagaagaagcacagaagaagaaatctgacttggaaatagagctattaaaacggcagcagaagttggagcagcttgaacttgagaagcagaaattgcaagaagagcaagaaaatgcccccgagtttgtgaaggtgaaaggcaatctcaggagaacaggccaagaagtcgcccaagcccaggagtcctaggctgaggctgcaccaagacctcgtgtgtcaccccacagagctgtctgtgggtgccttctcaatctcagggcaaaagcccctggagaatatttcagccagca

SEQ ID NO: 6977 - DNA, 568 bp, Homo sapiens
  source 1..568: mol_type = unassigned DNA
ttatgtactctttggagatctcctcttgcctttctttcgtgctggtgaatttcttagatcaccatgttgcctgctgtagcctagtaggtatcatactaattttgtagaccacttttccgtggttgatattgtaagttaaatttctgttcataaaaaatgtagccattagattaacgttttctatttttgttaatgctctttcgcaggggtcttgctcctcagaacaaaccagaattgcagaaggtgatggaaaaaagaaaacgagaccaagtaataaagcagaaggaagaagaagcacagaagaagaaatctgacttggaaatagagctattaaaacggcagcagaagttggagcagcttgaacttgagaagcagaaattgcaagaagagcaagaaaatgcccccgagtttgtgaaggtgaaaggcaatctcaggagaacaggccaagaagtcgcccaagcccaggagtcctaggctgaggctgcaccaagacctcgtgtgtcaccccacagagctgtctgtgggtgccttctcaatctcagggcaaaagcccctggagaatatttca

SEQ ID NO: 6978 - DNA, 697 bp, Homo sapiens
  source 1..697: mol_type = unassigned DNA
attcgtgggggaggtgtgtttgtggagtaaggcagtgggagggtagaggaaaaggagataaagaaaaagcccatttctaactctctgaacaggcgaggccagcttatctgagatgcctgtgatcaggagaatgcagttgaaactaattttgtggatagagaaactgttggaactgctttacaaagtattttaacagcccacctgaggatattgaccataaggactcatatctcattacaagaagcatcatggccgagccagactacatagaagatgacaatcctgaactcattaggcctcagaaactgatcaatcctgtaaaaacctcccggaaccatcaagatcttcacagagaacttcttatgaatcaaaaaaggggtcttgctcctcagaacaaaccagaattgcagaaggtgatggaaaaaagaaaacgagaccaagtaataaagcagaaggaagaagaagcacagaagaagaaatctgacttggaaatagagctattaaaacggcagcagaagttggagcagcttgaacttgagaagcagaaattgcaagaagagcaagaaaatgcccccgagtttgtgaaggtgaaaggcaatctcaggagaacaggccaagaagtcgcccaagcccaggagtcctaggctgaggctgcaccaagacctcgtgtgtcaccccacagagctgtctgtgggtg

SEQ ID NO: 6979 - DNA, 558 bp, Homo sapiens
  source 1..558: mol_type = unassigned DNA
ctttttcagccagagaatcctggtcaagccctgaacagtccagaaactctgagacagcccacctgaggatattgaccataaggactcatatctcattacaagaagcatcatggccgagccagactacatagaagatgacaatcctgaactcattaggcctcagaaactgatcaatcctgtaaaaacctcccggaaccatcaagatcttcacagagaacttcttatgaatcaaaaaaggggtcttgctcctcagaacaaaccagaattgcagaaggtgatggaaaaaagaaaacgagaccaagtaataaagcagaaggaagaagaagcacagaagaagaaatctgacttggaaatagagctattaaaacggcagcagaagttggagcagcttgaacttgagaagcagaaattgcaagaagagcaagaaaatgcccccgagtttgtgaaggtgaaaggcaatctcaggagaacaggccaagaagtcgcccaagcccaggagtcctaggctgaggctgcaccaagacctcgtgtgtcaccccacagagctgtctgtgggtg

SEQ ID NO: 6980 - DNA, 570 bp, Homo sapiens
  source 1..570: mol_type = unassigned DNA
atatttgcttacaagtagaggagctgatttttgtacagacaagtacatttcaccagtgctgccagcacgttctcttggtctggaagacagcccacctgaggatattgaccataaggactcatatctcattacaagaagcatcatggccgagccagactacatagaagatgacaatcctgaactcattaggcctcagaaactgatcaatcctgtaaaaacctcccggaaccatcaagatcttcacagagaacttcttatgaatcaaaaaaggggtcttgctcctcagaacaaaccagaattgcagaaggtgatggaaaaaagaaaacgagaccaagtaataaagcagaaggaagaagaagcacagaagaagaaatctgacttggaaatagagctattaaaacggcagcagaagttggagcagcttgaacttgagaagcagaaattgcaagaagagcaagaaaatgcccccgagtttgtgaaggtgaaaggcaatctcaggagaacaggccaagaagtcgcccaagcccaggagtcctaggctgaggctgcaccaagacctcgtgtgtcacc

SEQ ID NO: 6981 - DNA, 625 bp, Homo sapiens
  source 1..625: mol_type = unassigned DNA
acccagggctggagagtctgcgtgcatatttgcttacaagtagaggagctgatttttgtacagacaagtacatttcaccagtgctgccagcacgttctcttggtctggaaggagaatgcagttgaaactaattttgtggatagagaaactgttggaactgctttacaaagtattttaacagcccacctgaggatattgaccataaggactcatatctcattacaagaagcatcatggccgagccagactacatagaagatgacaatcctgaactcattaggcctcagaaactgatcaatcctgtaaaaacctcccggaaccatcaagatcttcacagagaacttcttatgaatcaaaaaaggggtcttgctcctcagaacaaaccagaattgcagaaggtgatggaaaaaagaaaacgagaccaagtaataaagcagaaggaagaagaagcacagaagaagaaatctgacttggaaatagagctattaaaacggcagcagaagttggagcagcttgaacttgagaagcagaaattgcaagaagagcaagaaaatgcccccgagtttgtgaaggtgaaaggcaatctcaggagaacaggccaagaagtcgcccaagcccaggagtc

SEQ ID NO: 6982 - DNA, 834 bp, Homo sapiens
  source 1..834: mol_type = unassigned DNA
attcagttgcatacagttcctgctttcagaagttgctagagtgtttctctttgaacttgaactgtggctcttttgatatccagaaagagagttctttgtggggatggttaattcttgttttgggtgcttttcttcaccgctctaaggaactaccacagtcagaaggtgcattcttactgcgatctttttatttgctaccttgggcttaaggagcctgcctatatctactgaggtgaggttaggtcagtctctgtaaccgttcgtcacttaggccttgatgggtgacatggatggggatgacttcctgggctaactcttctcttgctaaaggatgatttttcaccaccttgaatgcccatgattaaaacataaacaagaaaatagatatctgagacagcccacctgaggatattgaccataaggactcatatctcattacaagaagcatcatggccgagccagactacatagaagatgacaatcctgaactcattaggcctcagaaactgatcaatcctgtaaaaacctcccggaaccatcaagatcttcacagagaacttcttatgaatcaaaaaaggggtcttgctcctcagaacaaaccagaattgcagaaggtgatggaaaaaagaaaacgagaccaagtaataaagcagaaggaagaagaagcacagaagaagaaatctgacttggaaatagagctattaaaacggcagcagaagttggagcagcttgaacttgagaagcagaaattgcaagaagagcaagaaaatgcccccgagtttgtgaaggtgaaaggcaatctcaggagaacaggccaagaagtcgcccaagccc

SEQ ID NO: 6983 - DNA, 559 bp, Homo sapiens
  source 1..559: mol_type = unassigned DNA
acttgtggctgagcagaggtgtatgtagtgcatttaggattttgccgaggagcacgtttttccatgggacagtgtgttgatatcaggctggctgtgatgggttccctgagtcaccctctgcgagacagcccacctgaggatattgaccataaggactcatatctcattacaagaagcatcatggccgagccagactacatagaagatgacaatcctgaactcattaggcctcagaaactgatcaatcctgtaaaaacctcccggaaccatcaagatcttcacagagaacttcttatgaatcaaaaaaggggtcttgctcctcagaacaaaccagaattgcagaaggtgatggaaaaaagaaaacgagaccaagtaataaagcagaaggaagaagaagcacagaagaagaaatctgacttggaaatagagctattaaaacggcagcagaagttggagcagcttgaacttgagaagcagaaattgcaagaagagcaagaaaatgcccccgagtttgtgaaggtgaaaggcaatctcaggagaacaggccaagaagtcgccc

SEQ ID NO: 6984 - DNA, 561 bp, Homo sapiens
  source 1..561: mol_type = unassigned DNA
ctgcaagtttagcactggcctgtcctgattagtgaggacctctgattgcctaggccagggctcaggagaatgcagttgaaactaattttgtggatagagaaactgttggaactgctttacaaagtattttaacagcccacctgaggatattgaccataaggactcatatctcattacaagaagcatcatggccgagccagactacatagaagatgacaatcctgaactcattaggcctcagaaactgatcaatcctgtaaaaacctcccggaaccatcaagatcttcacagagaacttcttatgaatcaaaaaaggggtcttgctcctcagaacaaaccagaattgcagaaggtgatggaaaaaagaaaacgagaccaagtaataaagcagaaggaagaagaagcacagaagaagaaatctgacttggaaatagagctattaaaacggcagcagaagttggagcagcttgaacttgagaagcagaaattgcaagaagagcaagaaaatgcccccgagtttgtgaaggtgaaaggcaatctcaggagaacaggccaagaagt

SEQ ID NO: 6985 - DNA, 583 bp, Homo sapiens
  source 1..583: mol_type = unassigned DNA
attgagaagggaatgtgcttggtctgtcttctctctctgcttcgtcacctgccagtcctgagggccccaggcagcagtgcagctttaatgtggattcctatggatcagaggtgtcctagggctcacgttgttattctgcattgcacttgcagccaggagaatgcagttgaaactaattttgtggatagagaaactgttggaactgctttacaaagtattttaacagcccacctgaggatattgaccataaggactcatatctcattacaagaagcatcatggccgagccagactacatagaagatgacaatcctgaactcattaggcctcagaaactgatcaatcctgtaaaaacctcccggaaccatcaagatcttcacagagaacttcttatgaatcaaaaaaggggtcttgctcctcagaacaaaccagaattgcagaaggtgatggaaaaaagaaaacgagaccaagtaataaagcagaaggaagaagaagcacagaagaagaaatctgacttggaaatagagctattaaaacggcagcagaagttggagcagcttgaacttgagaagcagaaattgca

SEQ ID NO: 6986 - DNA, 552 bp, Homo sapiens
  source 1..552: mol_type = unassigned DNA
gcttttcttcaccgctctaaggaactaccacagtcagaaggtgcattcttactgcgatctttttatttgctaccttgggcttaaggagcctgcctatatctactgagccagagaatcctggtcaagccctgaacagtccagaaactctgaggagaatgcagttgaaactaattttgtggatagagaaactgttggaactgctttacaaagtattttaacagcccacctgaggatattgaccataaggactcatatctcattacaagaagcatcatggccgagccagactacatagaagatgacaatcctgaactcattaggcctcagaaactgatcaatcctgtaaaaacctcccggaaccatcaagatcttcacagagaacttcttatgaatcaaaaaaggggtcttgctcctcagaacaaaccagaattgcagaaggtgatggaaaaaagaaaacgagaccaagtaataaagcagaaggaagaagaagcacagaagaagaaatctgacttggaaatagagctattaaaacggcagcagaagttggagcag

SEQ ID NO: 6987 - DNA, 467 bp, Homo sapiens
  source 1..467: mol_type = unassigned DNA
agatagaatgattgctttggcattaagaaacttgttaactgactttcactatgttttttttttaaaggagaatgcagttgaaactaattttgtggatagagaaactgttggaactgctttacaaagtattttaacagcccacctgaggatattgaccataaggactcatatctcattacaagaagcatcatggccgagccagactacatagaagatgacaatcctgaactcattaggcctcagaaactgatcaatcctgtaaaaacctcccggaaccatcaagatcttcacagagaacttcttatgaatcaaaaaaggggtcttgctcctcagaacaaaccagaattgcagaaggtgatggaaaaaagaaaacgagaccaagtaataaagcagaaggaagaagaagcacagaagaagaaatctgacttggaaatagagctattaaaacggcagcagaagttggagca

SEQ ID NO: 6988 - DNA, 458 bp, Homo sapiens
  source 1..458: mol_type = unassigned DNA
aatgtgtgttagctgtggacttagaaaaaggaggccaccagaacaagctggaatcttggacagggagaatgcagttgaaactaattttgtggatagagaaactgttggaactgctttacaaagtattttaacagcccacctgaggatattgaccataaggactcatatctcattacaagaagcatcatggccgagccagactacatagaagatgacaatcctgaactcattaggcctcagaaactgatcaatcctgtaaaaacctcccggaaccatcaagatcttcacagagaacttcttatgaatcaaaaaaggggtcttgctcctcagaacaaaccagaattgcagaaggtgatggaaaaaagaaaacgagaccaagtaataaagcagaaggaagaagaagcacagaagaagaaatctgacttggaaatagagctattaaaacggcagcagaagtt

SEQ ID NO: 6989 - DNA, 549 bp, Homo sapiens
  source 1..549: mol_type = unassigned DNA
aactgtggctcttttgatatccagaaagagagttctttgtggggatggttaattcttgttttgggtgcttttcttcaccgctctaaggaactaccacagtcagaaggtgcattcttactgcgatctttttatttgctaccttgggcttaaggagcctgcctatatctactgaggagaatgcagttgaaactaattttgtggatagagaaactgttggaactgctttacaaagtattttaacagcccacctgaggatattgaccataaggactcatatctcattacaagaagcatcatggccgagccagactacatagaagatgacaatcctgaactcattaggcctcagaaactgatcaatcctgtaaaaacctcccggaaccatcaagatcttcacagagaacttcttatgaatcaaaaaaggggtcttgctcctcagaacaaaccagaattgcagaaggtgatggaaaaaagaaaacgagaccaagtaataaagcagaaggaagaagaagcacagaagaagaaatctgacttggaaatagagctatt

SEQ ID NO: 6990 - DNA, 475 bp, Homo sapiens
  source 1..475: mol_type = unassigned DNA
gtgcttttcttcaccgctctaaggaactaccacagtcagaaggagaatgcagttgaaactaattttgtggatagagaaactgttggaactgctttacaaagtattttactctttcaagatcaaatgaagacagaattgttcaaagcgtgggttgacctcccctactcagtttttggctccttttggaaatctgatgtctgcccttctaagcgtaagacagcccacctgaggatattgaccataaggactcatatctcattacaagaagcatcatggccgagccagactacatagaagatgacaatcctgaactcattaggcctcagaaactgatcaatcctgtaaaaacctcccggaaccatcaagatcttcacagagaacttcttatgaatcaaaaaaggggtcttgctcctcagaacaaaccagaattgcagaaggtgatggaaaaaagaaaacgagaccaagtaataaagca

SEQ ID NO: 6991 - DNA, 899 bp, Homo sapiens
  source 1..899: mol_type = unassigned DNA
cgcgggcgccgggagcgagctgggagggagccgcgcgcctttgtgcgcgcgccgagacagcccacctgaggatattgaccataaggactcatatctcattacaagaagcatcatggccgagccagactacatagaagatgacaatcctgaactcattaggcctcagaaactgatcaatcctgtaaaaacctcccggaaccatcaagatcttcacagagaacttcttatgaatcaaaaaagaaccgggttacccctccgtgaggcagatcccctgcaggtggccatcactgtggtggccagcagtgcttccagactcctgcagtcacgggttcccttctgaaatggatgtgtatttccaaattcggatggaagaggctggattaaagatagaagagaatgtcctaagtagaagagaaatatgttcttaaatttaaaatctctgaattttctccttacactggggaaggtgtaggaatcatgtaattgccgcctactccggcatttgtcagtagtggggagaagtctctagaaccatattagacttaatagataggacactcatgtttttgtttgtttgggggtagcattttaaaagattattatcatagtctttattattaattattttggaggacaggaaagcatttaccttctatctactttgcaaactccatctgtgccataaatcattatggatgttgggttgctatactctgctttttaaataatttgggcaggacaggagactaggagaactgaggatgaaaggctatttttttcaatttaagaactaggaagcttcatttaggattattttcagatctcgtaggactatagatgactcatttgcccactctttgctaagccctggtgaaaggtctcccactgaactgaaagat

SEQ ID NO: 6992 - DNA, 558 bp, Homo sapiens
  source 1..558: mol_type = unassigned DNA
agtcagaaggtgcattcttactgcgatctttttatttgctaccttgggcttaaggagcctgcctatatctactgaggagaatgcagttgaaactaattttgtggatagagaaactgttggaactgctttacaaagtattttaacagcccacctgaggatattgaccataaggactcatatctcattacaagaagcatcatggccgagccagactacatagaagatgacaatcctgaactcattaggcctcagaaactgatcaatcctgtaaaaacctcccggaaccatcaagatcttcacagagaacttcttatgaatcaaaaaagaaccgggttacccctccgtgaggcagatcccctgcaggtggccatcactgtggtggccagcagtgcttccagactcctgcagtcacgggttcccttctgaaatggatgtgtatttccaaattcggatggaagaggctggattaaagatagaagagaatgtcctaagtagaagagaaatatgttcttaaatttaaaatctctgaattttctccttacactggggaaggtgtag

SEQ ID NO: 6993 - DNA, 542 bp, Homo sapiens
  source 1..542: mol_type = unassigned DNA
attcagttgcatacagttcctgctttcagaagttgctagagtgtttctctttgaacttgaactgtggctcttttgatatccagaaagagagttctttgtggggatggttaattcttgttttgggtgcttttcttcaccgctctaaggaactaccacagtcagaaggtgcattcttactgcgatctttttatttgctaccttgggcttaaggagcctgcctatatctactgaggtgaggttaggtcagtctctgtaaccgttcgtcacttaggccttgatgggtgacatggatggggatgacttcctgggctaactcttctcttgctaaaggatgatttttcaccaccttgaatgcccatgattaaaacataaacaagaaaatagatatctgaggagaatgcagttgaaactaattttgtggatagagaaactgttggaactgctttacaaagtattttagtccaaggggtcaaaagaataggaacataaaccagacatgttctttgcagtgaagagaggataagatttatatccacattgct

SEQ ID NO: 6994 - DNA, 425 bp, Homo sapiens
  source 1..425: mol_type = unassigned DNA
gggagccgcgcgcctttgtgcgcgcgccgaggtttgcatataaccacctgtacagaagggagaagaaagaaacaggaaaaacaatgtaaatttccactttatttggaagaatgggctgacaaaaaagtttcatggactatatttttgaattcaggagtcatttgggattgacttttgtctttaaatgaaatctttaagctttaaaaatattttaaaggtaacattgtgttctgagattcataagaaatatgtgatggaaaggaattcttgtttgtggaacaaggaatagcagtgattgtacaaccgggtgcatgctggcttcttaaagaccttgcactgagaaagtaaaataagggttttcctgagaatcgtgagttgtgttgagtgtgtatgttcttttaaaataaaatcgttctttagccaca

SEQ ID NO: 6995 - DNA, 3510 bp, Homo sapiens
  source 1..3510: mol_type = unassigned DNA
attgtttgctctggcttctgtgccggatgaggtcattcagttgcatacagttcctgctttcagaagttgctagagtgtttctctttgaacttgaactgtggctcttttgatatccagaaagagagttctttgtggggatggttaattcttgttttgggtgcttttcttcaccgctctaaggaactaccacagtcagaaggtgcattcttactgcgatctttttatttgctaccttgggcttaaggagcctgcctatatctactgaggtgaggttaggtcagtctctgtaaccgttcgtcacttaggccttgatgggtgacatggatggggatgacttcctgggctaactcttctcttgctaaaggatgatttttcaccaccttgaatgcccatgattaaaacataaacaagaaaatagatatctgagacagcccacctgaggatattgaccataaggactcatatctcattacaagaagcatcatggccgagccagactacatagaagatgacaatcctgaactcattaggcctcagaaactgatcaatcctgtaaaaacctcccggaaccatcaagatcttcacagagaacttcttatgaatcaaaaaaggggtcttgctcctcagaacaaaccagaattgcagaaggtgatggaaaaaagaaaacgagaccaagtaataaagcagaaggaagaagaagcacagaagaagaaatctgacttggaaatagagctattaaaacggcagcagaagttggagcagcttgaacttgagaagcagaaattgcaagaagagcaagaaaatgcccccgagtttgtgaaggtgaaaggcaatctcaggagaacaggccaagaagtcgcccaagcccaggagtcctaggctgaggctgcaccaagacctcgtgtgtcaccccacagagctgtctgtgggtgccttctcaatctcagggcaaaagcccctggagaatatttcagccagcagagaattttgacttgcagtaggatttggtttgattttcctacgatctgggtggatgccttgcctgtgacagttgcagttcctattcgccaaatgaagggcagtgccccgcacgtaagttggaatgatggacctgtgttcagagacttaacagaaccaacaagcaaaacaagtgagaacaggaaaaaggaagaggacactggaatcaattcttgagagttgcactacttggtttttcttccattccaagtttcgtgggacccagagccttttttcttttaaaagctaaaaaacaagtgtttaattcctctttttgttatctgttagataattgagatcacctagaaatgcgtttaatctgttcactcactgtaaattttgaggacccagaattgtcttgtttaatttatactttcacccctgttgcagttaacaccagagaaggaacgtgaatgtcgagcacagccactacccttgttggcacttaatttagaaatagggtgagaagtttaaaagcccatcttgattttattttcattccttttggttctctgtgtaataatagcaggctacatagtgacattccagttccaagaaggtacatcctgtccattcattaattgctttgattactaggagggtttctgttcagttttgtttttaaatgtcttgctgatctagttctttcagatggaataaccttccagtcccttagagagtggaactagtccatataacccagcttcagtagcaaaagtagaagccgccacatcttttcatttctccaagaggagagtggggaaggttcccatgaccagctgggcagtcaggatttctctaggcattctaatgtgaaataagtgtagactgctgtcaaggaggcttcatcagaagatgtatagcatttgaatgtctaatgataatgcatatcattagaatccaagctttgaaaatttctgattaatgctcatgtatttctttatctttgtttttccttgtgaagaaagactttcaccactgtctgagtgatgatgctgttgataaggatgatgtcgatgactactatattgcatctctcaggaacagctgatgggaagggaggggctgctgagttcccttgttctagctagcagcacgctcctcagagagggggccgagttacagacagcagccgcattctcatgcaaaattagttttaaactgctagtgtgggcatcggtaccttttgcctgggtgataccgaagaattgttgaggatttagtatgctccgtagagacagttcagccagtcatttctgcattggagagacttctcatactttctttgaagactcatagaaagctggatctagagcttttgaatccttaattagcacagtagaaattagctttctatgggaatgctttagtgttagcagttgacaattaggcccatattcaatctgaatgggaacaaaagtaaatgcaatgataatatactgctagttagagaaacatgttagttgattatacctgaaatggattatttatctcatcagcaagtattatttgaataaaatgagaaatgcttaagaaaaattgttgctctacagtaatttggtttcgaagaatggaatggtaactattttttcccatcgttcttttgagagaaggaagtgtgatgactgatgatcttgaaaagcccatttctgattgcacgttgactggaattctttctttgtgtctgtggactagcgatgctgtttgtaaaatgaagattcgggactggctcatatctttttatctaactagatgtcagatcttgaaatctgtattctcgaagcaattctgccacttgatcgtattcacaggggccctggtaggctcctttagaaggaccatttctgttcctagagcttaactagaattcattcttcactgaaaaaaaaaaaagttacttaagaaagcatttctttcctaatctcactcaaatctgcagaattatttgtaattagtaatacaaaatctggccaaaaggagacttgtaaatagcgtaaagtggtgtcttatgctaaacggtggaatgtataggcagagaagctctttgaagttgtcagatgagctgggctcacaagcctgattcaaacaggctgtcggtctcctctcaccccttaatactgtgcagcccaaactcctaggactcttgaacatctgagcagttttgtgctttgagccactttttgacaaaaatggctccatttttccacagcgtggttttcttaaaatagtttaatgttttatagtctcatagtagtagtgttgctttctaagctataacagtcgactttattcttctactctgaaaaatcttgacttgtttgagtgtatataatatatataaagggagccttaatggattggttttcataatttaatattttttgtatttgctcttgtataattgtttttaacggaaagtattaaagaattgagggtggaattcttagaaccaaagttattcttaataaaaatcaccacatgcttggaccatgc

SEQ ID NO: 6996 - DNA, 567 bp, Homo sapiens
  source 1..567: mol_type = unassigned DNA
ggccgggcgtccccgcggcgctcctcgtggggcggggcgcaggcggggcggggccccctctccagccgcccgccctccggccgcgtccccgccggccctgcagacgtggcggggcgggacccgctgggcactcccgcgcgtactcggccgcctgagcgatactaaaatgtctgatgatgctggtgacaccttagccactggagacaaagcagaagttactgagatgcctaatagtgattctttacctgaggatgcagaagtgcattgtgattcagctgcagtttcacatgagccaacaccagctgaccccagaggggaggggcatgaaaatgcagctgtgcagggtgcaggggctgccgccattgggccccctgtgcagcctcaggatgccaacgccctggagccccctctcaatggagacgtgactgaggatacacttgctgaatgtattgattccgtcagccttgaggcagaacccagatccgaaatacccctgcaagaacagaattatctggctgtggattcccctccaagtggaggaggatgggcaggctggggatcctgggg

SEQ ID NO: 6997 - DNA, 1431 bp, Homo sapiens
  source 1..1431: mol_type = unassigned DNA
ctccggccgcgtccccgccggccctgcagacgtggcggggcgggacccgctgggcactcccgcgcgtactcggccgcctgagcggctgtggattcccctccaagtggaggaggatgggcaggctggggatcctggggcaaatctctgctgtcgtcagcatctgccacagtaggtcatggattgacggcagtcaaggaaaaagcaggagccactctacggattcatggtgtaaattctggatcttctgaaggagcccaaccaaatactgaaaacggagtccctgaaataacagatgcagccacagatcagggccctgcagaaagcccacccacttccccttcatcagcctctcggggtatgctgtctgccatcaccaatgtggttcaaaacacaggtaaaagtgtcttaactggaggccttgatgcgttggaattcatcggcaagaaaaccatgaatgtccttgcagaaagtgacccgggctttaagcggaccaagacgctcatggagagaactgtttccttgtctcagatgttaagggaagctaaggagaaggagaagcagagactggcacagcagctcacgatggagagaaccgcgcactacgggatgctgtttgatgaatatcaaggcttgtcacacctggaagccctggaaattctgtccaatgaaagcgaaagcaaggttcagtcatttttagcatcacttgatggagagaagctggaactcttaaaaaatgacctaatttccattaaagacatctttgcagccaaagaattagagaatgaagaaaatcaagaagaacaaggcttagaagaaaagggagaagaatttgctcgcatgcttacagagcttctctttgaattacatgtggcggccacacctgacaaactcaataaggccatgaagagggctcatgactgggtggaagaggatcaaaccgtggtgtcagtagatgtggcaaaagtgtccgaagaagaaacaaagaaggaagaaaaggaagagaaatctcaagaccctcaagaagacaaaaaggaggaaaagaaaactaagaccatagaggaagtatacatgtcgtccattgaaagtctggcggaggtaacagcgcgctgtattgagcagcttcataaagtagcagaattaattcttcatggacaagaagaggaaaaaccagctcaggaccaagcaaaagttctaataaaattaactactgcaatgtgcaatgaagtggcctctttatcaaagaagtttacgaattctttaaccactgttgggagcaacaagaaggccgaggtccttaaccccatgatcagtagtgtattgttagagggctgcaacagtacaacgtacatacaggatgccttccagctgctgctgcctgttctgcaggtctcacatatccagaccagttgtttgaaagcacagccgtgacct

SEQ ID NO: 6998 - DNA, 4050 bp, Homo sapiens
  source 1..4050: mol_type = unassigned DNA
gtactcggccgcctgagcgccgacccacgccctgcctgctcttccagtccagccaacactctaagcaggcaccgcctccactcgcagcccccgggatgggtcccactccctaccgcagatccccaggccccctccacccagtcggctagccctcgcctctgccatccgatactaaaatgtctgatgatgctggtgacaccttagccactggagacaaagcagaagttactgagatgcctaatagtgattctttacctgaggatgcagaagtgcattgtgattcagctgcagtttcacatgagccaacaccagctgaccccagaggggaggggcatgaaaatgcagctgtgcagggtgcaggggctgccgccattgggccccctgtgcagcctcaggatgccaacgccctggagccccctctcaatggagacgtgactgaggatacacttgctgaatgtattgattccgtcagccttgaggcagaacccagatccgaaatacccctgcaagaacagaattatctggctgtggattcccctccaagtggaggaggatgggcaggctggggatcctggggcaaatctctgctgtcgtcagcatctgccacagtaggtcatggattgacggcagtcaaggaaaaagcaggagccactctacggattcatggtgtaaattctggatcttctgaaggagcccaaccaaatactgaaaacggagtccctgaaataacagatgcagccacagatcagggccctgcagaaagcccacccacttccccttcatcagcctctcggggtatgctgtctgccatcaccaatgtggttcaaaacacaggtaaaagtgtcttaactggaggccttgatgcgttggaattcatcggcaagaaaaccatgaatgtccttgcagaaagtgacccgggctttaagcggaccaagacgctcatggagagaactgtttccttgtctcagatgttaagggaagctaaggagaaggagaagcagagactggcacagcagctcacgatggagagaaccgcgcactacgggatgctgtttgatgaatatcaaggcttgtcacacctggaagccctggaaattctgtccaatgaaagcgaaagcaaggttcagtcatttttagcatcacttgatggagagaagctggaactcttaaaaaatgacctaatttccattaaagacatctttgcagccaaagaattagagaatgaagaaaatcaagaagaacaaggcttagaagaaaagggagaagaatttgctcgcatgcttacagagcttctctttgaattacatgtggcggccacacctgacaaactcaataaggccatgaagagggctcatgactgggtggaagaggatcaaaccgtggtgtcagtagatgtggcaaaagtgtccgaagaagaaacaaagaaggaagaaaaggaagagaaatctcaagaccctcaagaagacaaaaaggaggaaaagaaaactaagaccatagaggaagtatacatgtcgtccattgaaagtctggcggaggtaacagcgcgctgtattgagcagcttcataaagtagcagaattaattcttcatggacaagaagaggaaaaaccagctcaggaccaagcaaaagttctaataaaattaactactgcaatgtgcaatgaagtggcctctttatcaaagaagtttacgaattctttaaccactgttgggagcaacaagaaggccgaggtccttaaccccatgatcagtagtgtattgttagagggctgcaacagtacaacgtacatacaggatgccttccagctgctgctgcctgttctgcaggtctcacatatccagaccagttgtttgaaagcacagccgtgacctggccagactccatctagttaaaggagacagctggccgccttgcctcaatatgtaccatttaaggggatgttctctgtgcgcctggccacagacatccatttgaggacactacaagcaattttgcacagacaatattgagaatgcaaatttagagagagttatcatttctctcaatgtgtataattgtttttacaaacaattgtgttttctttatgttaatttaaacttacacagcttatattgaaaatttcctttcatctgaaatttatttacaaatattcgtgttcattttcctggttaagcatgctatatttagaaactcatggggagaccttagacttttgtttaatcctttatgtttcaacctttaaatgttccattcttatagtattactttaaatcaattctaaaactgaactttgttttgttacataaatgtcgcaggcaaaaataacactacttatagattttacctattatggtaaaaaataggaacatattgtcattctttttttttttttttttttgagacagagtctcactctgtcgccaggctggagtgcgttggcacaatctcggctcactgcaacctccgcctcctgggttcaatcgattctcctgcctcagcctcctgagtagctgggactacaggtgtgtgccaccacgcccagccaattttttttgtatttttagtagagacagggtttcaccatgttggccaggatggtctcgatctcctgacctcgtgatctgcccgcctcagcctcccaaagtgctgggattacaggcttgagccaccgcgcccggccggtcattcattcttgcaacaagcatttattgagcacctactgtgtgctcacagtaaagaaacgtgatcttatcccagtagaggtagatattctgaaaaagaataattcttaaactgcttaaaacaggggtccccacccccaggccacagaccagtaccagtccgtggcactggttaggaaccaggccacacagcagggggtgagcggtgggtgagtgagcacagcttcatctgtatttacagctgctccccagagcttgcattactgcctgagctctgcctcccgtcaggtcagcagcagcattagagtctcatgggagtgcgaaccctgttgtgaactgcacatgcgagggatctaggttgtgcactccttatgagaatctaatgcctgatgaatctaatgcctcatgatctgaggttgaatagcttcgtgccgaaaccatcccccacccccatcccgctaccccgagtccgtgaaaaaattgtcttccatgaaaccggtccctggtaccagaaaggttggggaccactggcttaaaataccaataaatttttgaaccttaaaaactttgaagaacaaggtaaattggtgttttatttaatgtcctaccctttaatttgttgcattttcctatactctttacactattttatcccaaactatgtatatgaggtgaaaatatatatgaaaagggatactgaagaatatttagtttaaaattaatttcttacgatcacgagcacatggtggcataattacaaagcttggaagtattcaaatagaaaatcaaaggtgtttcaatacagtagaatcccaggactgcattttaaaatcgcctcacagatcacactcgctggtggcaaatatcatcatcgttgctaaaggacagaaaatactgatgtgtgttttaactaactggtatattgatccatgggaggctgcacagaagaccctgcggccaggaggggcattgtcagtggctgcttctcctgagctccacgccttcattgcagctgcatgttcgatacaatacacctgcttcacagccccatggacatccctacaggtactgtcatgtgaagccttgcctagtagttctctccagggcaaatgaagctcacagttttgcaaggtggaaacctcttattcacatttgctttgattccccgatggagtagactgcctttgttccatacaggcaaagtaaggatattttaatatcatcctacttcttattagcatttcatttgtctatgtactgtatttcatttgtatgtctcctgaaacatccaaatagagaacataagaacactttatgtacaatctggaaaaaaattacctgagaaatcaattaaagatttttccccttt

SEQ ID NO: 6999 - DNA, 621 bp, Homo sapiens
  source 1..621: mol_type = unassigned DNA
aaacgcctcagtggaaaccactgttaaagcttttggtgtgtttcttaacagtttattcccaggcattgaatttttgctttgttttgcctttcacataatgaacatgtaaaatgtgaagtaggatatgatgtaaaagttatcaataggatcaatcaaaaaaatcattttttagaaattctaaagtgaccagaatctccccctctccaacacaaaatcagtcctcccaacctcccccatgtcttacacaggaaacggtgcttttaaatgtacatccagagtacaaacattgtgtatttctgcagatgttaagggaagctaaggagaaggagaagcagagactggcacagcagctcacgatggagagaaccgcgcactacgggatgctgtttgatgaatatcaaggcttgtcacacctggaagccctggaaattctgtccaatgaaagcgaaagcaaggttcagtcatttttagcatcacttgatggagagaagctggaactcttaaaaaatgacctaatttccattaaagacatctttgcagccaaagaattagagaatgaagaaaatcaagaagaacaaggcttagaagaaaagggagaagaatttgctcgcatgcttacag

SEQ ID NO: 7000 - DNA, 1242 bp, Homo sapiens
  source 1..1242: mol_type = unassigned DNA
tcatctttgcccagcggctggcgggcaggctgctacaacctccacttagtctaccccagctgcaggctgtaatgttgggggagctgccacatcctgaaggatgaaaaataaatcacgcttcttctgtcgtgttctatttctaggcttagaagaaaagggagaagaatttgctcgcatgcttacagagcttctctttgaattacatgtggcggccacacctgacaaactcaataaggccatgaagagggctcatgactgggtggaagaggatcaaaccgtggtgtcagtagatgtggcaaaagtgtccgaagaagaaacaaagaaggaagaaaaggaagagaaatctcaagaccctcaagaagacaaaaaggaggaaaagaaaactaagaccatagaggaagtatacatgtcgtccattgaaagtctggcggaggtaacagcgcgctgtattgagcagcttcataaagtagcagaattaattcttcatggacaagaagaggaaaaaccagctcaggaccaagcaaaagttctaataaaattaactactgcaatgtgcaatgaagtggcctctttatcaaagaagtttacgaattctttaaccactgttgggagcaacaagaaggccgaggtccttaaccccatgatcagtagtgtattgttagagggctgcaacagtacaacgtacatacaggatgccttccagctgctgctgcctgttctgcaggtctcacatatccagaccagttgtttgaaagcacagccgtgacctggccagactccatctagttaaaggagacagctggccgccttgcctcaatatgtaccatttaaggggatgttctctgtgcgcctggccacagacatccatttgaggacactacaagcaattttgcacagacaatattgagaatgcaaatttagagagagttatcatttctctcaatgtgtataattgtttttacaaacaattgtgttttctttatgttaatttaaacttacacagcttatattgaaaatttcctttcatctgaaatttatttacaaatattcgtgttcattttcctggttaagcatgctatatttagaaactcatggggagaccttagacttttgtttaatcctttatgtttcaacctttaaatgttccattcttatagtattactttaaatcaattctaaaactgaactttgttttgttacataaatgtcgcaggcaaaaataacactacttatagattttac

SEQ ID NO: 7001 - DNA, 296 bp, Homo sapiens
  source 1..296: mol_type = unassigned DNA
tgtgcaatgaagtggcctctttatcaaagaagtttacgaattctttaaccactgttggggccttcagcaatagagcttcactgtatacaagcagaatgacaagggaggtggaagctcattgatatgataggctggacaaaatgcatttgcaccctcgtgtggtccaagttacctgatatccatggactttgatataaacactaggcttgcagagaggtgcgaggtcttaatcaagatggaatagccttagtgacaccggttcctaaggctctattgcaccctcttgttaccctttt

SEQ ID NO: 7002 - DNA, 2365 bp, Homo sapiens
  source 1..2365: mol_type = unassigned DNA
cagcagataagcagcggcctcgggggttggggggctgtgtgagtctcgcagtggggctgaggcaggcagccgggagagccatggcgggggccgcagcgggcggcagaggcggaggtgcctgggggccggggcgcggaggggccggggggctccggcggggctgctctcccccagcccccgccggctccccccgggctgggctgcagccgctcagggccacgatccccttccagctgcagcagccgcaccagcgccgggacgggggtggccgtgcagccagcgtcccatgctcggtggccccagaaaagtcagtgtgtaggcctcagccacttcaggtccggcgtacattctccctggacaccatcctcagctcctaccttctgggccagtggccacgagatgctgatggggccttcacctgctgcaccaatgacaaggccacccagacgcccctgtcctggcaagagctagaaggtgagcgtgccagttcctgtgcacacaagcgctcagcatcctggggcagcacagaccaccgaaaagagatttccaagttgaagcaacaactgcagaggacgaagctgagccgcagtgggaaagagaaggagcgaggttcaccactcctaggggaccacgcagtgcggggagcactgagggcgtcccctcccagcttcccctcagggtcccctgtcttgcgactcagcccctgcctgcacaggagcctggaagggctcaaccaagagctggaggaggtatttgtgaaggagcagggagaagaggagctgctgaggatccttgatatccctgatgggcaccgggccccagctcctccccagagtggcagctgtgatcatcccctcctcctcctggagcctggcaaccttgccagctctccttccatgtccttggcatctccccagccttgtggcctggccagtcatgaggaacatcggggtgccgccgaggagctggcatccacccccaacgacaaagcctcctctccaggacacccagcctttcttgaagatggcagcccatctccagtccttgcctttgctgcctcccctcgacctaatcatagctacatcttcaaacgggagcccccagaaggctgtgagaaagtgcgtgtgtttgaagaagccacgtctccaggtcctgacctggccttcctgacttcctgtcctgacaagaacaaagtccatttcaacccgactggctcagccttctgccccgtcaacctgatgaagcccctcttccccggcatgggcttcatcttccgtaactgcccctcaaacccgggatctccccttcccccggccagccccaggccaccacctcggaaggatccggaagcctccaaggcctccccactgccattcgagccatggcagcgcaccccaccatcagaagagcctgtgcttttccagagctccctgatggtctgagggtcccacccctgccccactttaccatagagaccagtgccttggtggcaggtccctccccaggtcccctgagatggggtatggaggggcccttccctctcggccttcgagcactttctttcacttactgtgtcaaagccctgggtcctctttttgatgggcaccggcccctctgaacgtgatgggacctgccttctccactagtagctgggcagctcacaattcacacctgtgtacctgccacatccctcacttggtggaaaacacccagaaggtcttgagtcccccacccctgggtgtcagtccaaatgactgtataggaggcccttatttttgtcacagagcaagctggccatgaacgaaggagagaagacgccacagatttccttccctctcctccaggagaccataagatagatcccccatcctctcagccctattcccatgcctccctctcattggaggagctgaccaaagcagccctaacgggccataacacttgaccaattcagctgctggcagagggaggaaacaagtgttttcccaagtggcattttcatctcgctttcaccctgactaaagattgtcttaagtagcagcccagcccgcccagccccaggtgggtagtggggaggagagctggcattcctccaggtggcaaatggcgactctatactctccgcccgccccagggctggatggattagaaaaatgcctatttttcttgtatcgatgtagagactctattttctcccaaagacactatttttgcagctgtttgaagtttgtatattttccgtactgcagagcttacacaaaattgaagaatgttaatgttcgagttttcttatcttgtgtttagaggttgttttttgcagatcttggtgttaatagaccaaataaataaataaatattcccagca

SEQ ID NO: 7003 - DNA, 1522 bp, Homo sapiens
  source 1..1522: mol_type = unassigned DNA
agttcgatccttttggtgaagctagtgggcgccattttgaagttgggcagaaagtgactccagtggtggaacccggagccaaccatttttagttacccagcgtcccatgctcggtggccccagaaaagtcagtgtgtaggcctcagccacttcaggtccggcgtacattctccctggacaccatcctcagctcctaccttctgggccagtggccacgagatgctgatggggccttcacctgctgcaccaatgacaaggccacccagacgcccctgtcctggcaagagctagaaggtgagcgtgccagttcctgtgcacacaagcgctcagcatcctggggcagcacagaccaccgaaaagagatttccaagttgaagcaacaactgcagaggacgaagctgagccgcagtgggaaagagaaggagcgaggttcaccactcctaggggaccacgcagtgcggggagcactgagggcgtcccctcccagcttcccctcagggtcccctgtcttgcgactcagcccctgcctgcacaggagcctggaagggctcaaccaagagctggaggaggtatttgtgaaggagcagggagaagaggagctgctgaggatccttgatatccctgatgggcaccgggccccagctcctccccagagtggcagctgtgatcatcccctcctcctcctggagcctggcaaccttgccagctctccttccatgtccttggcatctccccagccttgtggcctggccagtcatgaggaacatcggggtgccgccgaggagctggcatccacccccaacgacaaagcctcctctccaggacacccagcctttcttgaagatggcagcccatctccagtccttgcctttgctgcctcccctcgacctaatcatagctacatcttcaaacgggagcccccagaaggctgtgagaaagtgcgtgtgtttgaagaagccacgtctccaggtcctgacctggccttcctgacttcctgtcctgacaagaacaaagtccatttcaacccgactggctcagccttctgccccgtcaacctgatgaagcccctcttccccggcatgggcttcatcttccgtaactgcccctcaaacccgggatctccccttcccccggccagccccaggccaccacctcggaaggatccggaagcctccaaggcctccccactgccattcgagccatggcagcgcaccccaccatcagaagagcctgtgcttttccagagctccctgatggtctgagggtcccacccctgccccactttaccatagagaccagtgccttggtggcaggtccctccccaggtcccctgagatggggtatggaggggcccttccctctcggccttcgagcactttctttcacttactgtgtcaaagccctgggtcctctttttgatgggcaccggcccctctgaacgtgatgggacctgccttctccactagtagctgggcagctcacaattcacacctgtgtacctgccacatccctcacttggtgg

SEQ ID NO: 7004 - DNA, 776 bp, Homo sapiens
  source 1..776: mol_type = unassigned DNA
gcgtcccctcccagcttcccctcagggtcccctgtcttgcgactcagcccctgcctgcacaggagcctggaagggctcaaccaagagctggaggaggtatttgtgaaggagcagggagaagaggagctgctgaggagcccagggcacagaaggtccctgccctcatgaggcttatagtcttatggggacaacacattgatcaagccctacagatccttgatatccctgatgggcaccgggccccagctcctccccagagtggcagctgtgatcatcccctcctcctcctggagcctggcaaccttgccagctctccttccatgtccttggcatctccccagccttgtggcctggccagtcatgaggaacatcggggtgccgccgaggagctggcatccacccccaacgacaaagcctcctctccaggacacccagcctttcttgaagatggcagcccatctccagtccttgcctttgctgcctcccctcgacctaatcatagctacatcttcaaacgggagcccccagaaggctgtgagaaagtgcgtgtgtttgaagaagccacgtctccaggtcctgacctggccttcctgacttcctgtcctgacaagaacaaagtccatttcaacccgactggctcagccttctgccccgtcaacctgatgaagcccctcttccccggcatgggcttcatcttccgtaactgcccctcaaacccgggatctccccttcccccggccagccccaggccaccacctcggaaggatccggaagcc

SEQ ID NO: 7005 - DNA, 789 bp, Homo sapiens
  source 1..789: mol_type = unassigned DNA
ctagcctgcatttctctttccatcctctcgcatatcccagaagaaagaggtacttgaagagtttgcaagagatattagtagtacccgtggcggcctgaatgtggctgttttttcctctctgttaccacccacctacgcccctgtcctggcaagagctagaaggtgagcgtgccagttcctgtgcacacaagcgctcagcatcctggggcagcacagaccaccgaaaagagatttccaagttgaagcaacaactgcagaggacgaagctgagccgcagtgggaaagagaaggagcgaggttcaccactcctaggggaccacgcagtgcggggagcactgagggcgtcccctcccagcttcccctcagggtcccctgtcttgcgactcagcccctgcctgcacaggagcctggaagggctcaaccaagagctggaggaggtatttgtgaaggagcagggagaagaggagctgctgaggatccttgatatccctgatgggcaccgggccccagctcctccccagagtggcagctgtgatcatcccctcctcctcctggagcctggcaaccttgccagctctccttccatgtccttggcatctccccagccttgtggcctggccagtcatgaggaacatcggggtgccgccgaggagctggcatccacccccaacgacaaagcctcctctccaggacacccagcctttcttgaagatggcagcccatctccagtccttgcctttgctgcctcccctcgacctaatcatagctacatcttcaaacgggagcccc

SEQ ID NO: 7006 - DNA, 582 bp, Homo sapiens
  source 1..582: mol_type = unassigned DNA
ggtgaagctagtgggcgccattttgaagttgggcagaaagtgactccagtggtggaacccggagccaaccatttttagttacacgcccctgtcctggcaagagctagaaggtgagcgtgccagttcctgtgcacacaagcgctcagcatcctggggcagcacagaccaccgaaaagagatttccaagttgaagcaacaactgcagaggacgaagctgagccgcagtgggaaagagaaggagcgaggttcaccactcctaggggaccacgcagtgcggggagcactgagggcgtcccctcccagcttcccctcagggtcccctgtcttgcgactcagcccctgcctgcacaggagcctggaagggctcaaccaagagctggaggaggtatttgtgaaggagcagggagaagaggagctgctgaggatccttgatatccctgatgggcaccgggccccagctcctccccagagtggcagctgtgatcatcccctcctcctcctggagcctggcaaccttgccagctctccttccatgtccttggcatctccccagccttgtggcctggccagtcatgaggaaca

SEQ ID NO: 7007 - DNA, 1128 bp, Homo sapiens
  source 1..1128: mol_type = unassigned DNA
ggacagaagagagggtagctgaacaaggttcgggggagcggaaagttgggacccaagcactgtgaggcgtggccaactgcgtcacggtgctcaatcgactgtccttagaaacccgccatccctcctctcccgtttctcaccttccttcgcggcattgccggcggctgcggcccgacggttccgattcgggcagcggcggcagcagcaggaacggtggctccggcgggctccgtggcggcctctgtatcagtcccaatcctgcggacgatccctagtgcctcctgcctctcagcgtctggagcgttctgcgcaggcgccgcgggctgaagcgctttttccttcacttccggctgggtctcgcgtcacctgacgttacgggccagagagggtgctgggaagttcgatccttttggtgaagctagtgggcgccattttgaagttgggcagaaagtgactccagtggtggaacccggagccaaccatttttaccagcgtcccatgctcggtggccccagaaaagtcagtgtgtaggcctcagccacttcaggtccggcgtacattctccctggacaccatcctcagctcctaccttctgggccagtggccacgagatgctgatggggccttcacctgctgcaccaatgacaaggccacccagacgcccctgtcctggcaagagctagaaggtgagcgtgccagttcctgtgcacacaagcgctcagcatcctggggcagcacagaccaccgaaaagagatttccaagttgaagcaacaactgcagaggacgaagctgagccgcagtgggaaagagaaggagcgaggttcaccactcctaggggaccacgcagtgcggggagcactgagggcgtcccctcccagcttcccctcagggtcccctgtcttgcgactcagcccctgcctgcacaggagcctggaagggctcaaccaagagctggaggaggtatttgtgaaggagcagggagaagaggagctgctgaggatccttgatatccctgatgggcaccgggccccagctcctccccagagtggcagctgtgatcatcccctcctcctcctggagcctggcaaccttgccagctctccttccatgtccttggcatctcccca

SEQ ID NO: 7008 - DNA, 739 bp, Homo sapiens
  source 1..739: mol_type = unassigned DNA
agacaccgcccccgcacgcggggaggtgaccgttgagcccaaacaggcggcgtcaccagccaatcaatatgcttccagacgtttcagcgaccaattaataagaacgcctccgatccagccagcgtcccatgctcggtggccccagaaaagtcagtgtgtaggcctcagccacttcaggtccggcgtacattctccctggacaccatcctcagctcctaccttctgggccagtggccacgagatgctgatggggccttcacctgctgcaccaatgacaaggccacccagacgcccctgtcctggcaagagctagaaggtgagcgtgccagttcctgtgcacacaagcgctcagcatcctggggcagcacagaccaccgaaaagagatttccaagttgaagcaacaactgcagaggacgaagctgagccgcagtgggaaagagaaggagcgaggttcaccactcctaggggaccacgcagtgcggggagcactgagggcgtcccctcccagcttcccctcagggtcccctgtcttgcgactcagcccctgcctgcacaggagcctggaagggctcaaccaagagctggaggaggtatttgtgaaggagcagggagaagaggagctgctgaggatccttgatatccctgatgggcaccgggccccagctcctccccagagtggcagctgtgatcatcccctcctcctcctggagcctggcaaccttgccagctctccttcca

SEQ ID NO: 7009 - DNA, 714 bp, Homo sapiens
  source 1..714: mol_type = unassigned DNA
gtgtgagtctcgcagtggggctgaggcaggcagccgggagagccatggcgggggccgcagcgggcggcagaggcggaggtgcctgggggccggggcgcggaggggccggggggctccggcggggctgctctcccccagcccccgccggctccccccgggctgggctgcagccgctcagggccacgatccccttccagctgcagcagccgcaccagcgccgggacgggggtggccgtgcagccagcgtcccatgctcggtggccccagaaaagtcagtgtgtaggcctcagccacttcaggtccggcgtacattctccctggacaccatcctcagctcctaccttctgggccagtggccacgagatgctgatggggccttcacctgctgcaccaatgacaaggccacccagatttccaagttgaagcaacaactgcagaggacgaagctgagccgcagtgggaaagagaaggagcgaggttcaccactcctaggggaccacgcagtgcggggagcactgagggcgtcccctcccagcttcccctcagggtcccctgtcttgcgactcagcccctgcctgcacaggagcctggaagggctcaaccaagagctggaggaggtatttgtgaaggagcagggagaagaggagctgctgaggatccttgatatccctgatgggcaccgggccccagctcctccccagagtggcagctgtg

SEQ ID NO: 7010 - DNA, 624 bp, Homo sapiens
  source 1..624: mol_type = unassigned DNA
gtgctatttatattctcctgtgtggtagaggaggtgggagagatcatctgggagcccacaacacagctgtttgatcagcctagccagcgtcccatgctcggtggccccagaaaagtcagtgtgtaggcctcagccacttcaggtccggcgtacattctccctggacaccatcctcagctcctaccttctgggccagtggccacgagatgctgatggggccttcacctgctgcaccaatgacaaggccacccagacgcccctgtcctggcaagagctagaaggtgagcgtgccagttcctgtgcacacaagcgctcagcatcctggggcagcacagaccaccgaaaagagatttccaagttgaagcaacaactgcagaggacgaagctgagccgcagtgggaaagagaaggagcgaggttcaccactcctaggggaccacgcagtgcggggagcactgagggcgtcccctcccagcttcccctcagggtcccctgtcttgcgactcagcccctgcctgcacaggagcctggaagggctcaaccaagagctggaggaggtatttgtgaaggagcagggagaagaggagctgctgaggatccttgatatccctgatgggcaccgggc

SEQ ID NO: 7011 - DNA, 572 bp, Homo sapiens
  source 1..572: mol_type = unassigned DNA
acgcggggaggtgaccgttgagcccaaacaggcggcgtcaccagccaatcaatatgcttccagacgtttcagcgaccaattaataagaacgcctccgatccagccagcgtcccatgctcggtggccccagaaaagtcagtgtgtaggcctcagccacttcaggtccggcgtacattctccctggacaccatcctcagctcctaccttctgggccagtggccacgagatgctgatggggccttcacctgctgcaccaatgacaaggccacccaggctggagtgcagtggtgcgatcttggctcactgcaacctctgcctcccgggttcaagtgattctcgtgcctcatcctcccaagtggctgggattacagacgcccctgtcctggcaagagctagaaggtgagcgtgccagttcctgtgcacacaagcgctcagcatcctggggcagcacagaccaccgaaaagagatttccaagttgaagcaacaactgcagaggacgaagctgagccgcagtgggaaagagaaggagcgaggttcaccactcctaggggaccacgcagtgcggggagca

SEQ ID NO: 7012 - DNA, 528 bp, Homo sapiens
  source 1..528: mol_type = unassigned DNA
gaagctagtgggcgccattttgaagttgggcagaaagtgactccagtggtggaacccggagccaaccatttttagttactcttgctctgctgcccaggctggagtgcagtggtgtgatctcggctcactacaacttccgtctcccgggttcaagagattctcctgcctcagcctcctgagtagctgggattacagattgtcctcttcatggaaaagtagtacagcatttcttcaatcaattaaaaaaacagttcaaatgtcagatcttgaagtaaatccttcaaaactgcaagagtacactctttgcaaagaaaacctttcttcgccagcgtcccatgctcggtggccccagaaaagtcagtgtgtaggcctcagccacttcaggtccggcgtacattctccctggacaccatcctcagctcctaccttctgggccagtggccacgagatgctgatggggccttcacctgctgcaccaatgacaaggccacccagatttccaagttgaagcaacaactgcagaggacg

SEQ ID NO: 7013 - DNA, 480 bp, Homo sapiens
  source 1..480: mol_type = unassigned DNA
atggtataaattgtttcccatgataaaggctggctgagtaggtcaggaaaggtcttgtcagaccatatgtgctgtttcaggctgcttcaaattcttttaggacagtggtggatatgagtgaagacggggcaggcaggccacatctcttagaagaggaaggtgattgccacgtctccttcctccatgctgatggcaaggcgtgcgggctgtgttctcttgcagccagcgtcccatgctcggtggccccagaaaagtcagtgtgtaggcctcagccacttcaggtccggcgtacattctccctggacaccatcctcagctcctaccttctgggccagtggccacgagatgctgatggggccttcacctgctgcaccaatgacaaggccacccagacgcccctgtcctggcaagagctagaaggtgagcgtgccagttcctgtgcacacaagcgctcagcatcctggggcagcacagaccacc

SEQ ID NO: 7014 - DNA, 2063 bp, Homo sapiens
  source 1..2063: mol_type = unassigned DNA
ggggcgggacccaactgattgtcaaaggcggcagattgtagtttttgttttggccggaaaggcttaccatgagttgccagggctgagagagatggagaaggattcgcggcggtgacagattaaattccccagttacattatagacttggagacttgtccttgtgtggacgggagccggaaagccttgagaacttattcctcgacccggacatggcacaggagaaaatgaaactaggtttcaagtcgctgccgagttccactaccgcagacggcaacattctgagaagagtcaacagtgcccctttgatcaatggacttggttttaattcacaggtgttgcaagctgacatgttaagaattaggacaaacagaacaacatttaggaatcgacgctctctggaaattacttcacccacttctgttgaacagaagcccaaagacctcttctgaccttgagactatgccttctcccaaatcgcccctttgctttatctcctaagaactctgaagttgccatgcctgttcctttctctcccaccaggaattctggcacttctgctcaagccggatgtcactgcgtcacttctccatccccaccccctcctcttccaaaggaagcaggggaaatgtctcatcttcctaagagaaaaggttgtgcttttcttgagcaattcatctgttctaattttaggcctactgacatctgtctcattaggttttgcttttcctattggcaaccacaaaccccaaatctagtgtatggcccacaaagttgcaagcatgtaatacattcctgatcctgctttatgccctgcacatctagcccatgttcagttcatgttaagtagcattataaaccatcttaaatcatttctgaaactaggcagagacatttataaacacagtgtacaaccctttgtttaggattttctgagcattttatctctagttactatagtaggaaatggcttaaaaacagcaaacctaggaaaatgaaaaataatttttaaaaatcttaatgtctttacaatatgaattttctgtgatctctcttaaatggaactaagcttggtttttcctcctatcttaatcctttcactggagataattcttagtaattagcttcacccagcaccctccctaacctcccgctacttctactcccagccaccttcacaccatgacatcattccttggtgctgatactcttggttccttccaaggacttttctttcttcctggagtgtgagaaaaaggcacagtgggaaatttacacaaaagataccagtgatgtttattacatctcagtgaagtcattatttctattttaatactttgtttcatgtggaaaaattatctaaggtaattcctttgcaaacgccacttgtagtacttaatttggggagaattctcttccagaagccttgttttctgcaattaatttctcacattattactaaaagaatcagccaatacaagatttgatccacattttgtccaattaaaaaattcttgtagcttatgattctgtagctcaagttcaaatcctacctacctcagacatttcacactatctccctgctggtgtcatcaatttcagtctatcttctcatgatttcctggatgaagtttttcagtgggaaatcctaagcctttgcctgaacctaaattggttccttcccatcccttaggtataaattaaaaataatctcttctagggaagtctttcatcattattttatgaaggaaatttgccataccatgttttctcacttataagtcggagctaaatgataagaacttatgaacacaaggaaacaacagacactagggtctacttgagcggggaggatgtgaggagggaagcagaaaagataactattaggtactgggcttactacctgggtgatgaaatagtatgtacaacaggccaggcgcggtggctcacacctgtaatcccagcactttggaaggccaaggtgggcagatcacctgaggtcaggagtttgagatcagcctggtcaacatggtgaaaccccatctctactaaaaatacaaaaaaa

SEQ ID NO: 7015 - DNA, 1344 bp, Homo sapiens
  source 1..1344: mol_type = unassigned DNA
gcgggacccaactgattgtcaaaggcggcagattgtagtttttgttttggccggaaaggcttaccatgagttgccagggctgagagagatggagaaggattcgcggcggtgacagattaaattccccagttacattatagacttggaggtgggggatcttctcatcgttagaggccccgatcatgggagataggcggttcggagccagttctgcctaactttgtgttcactgatgttagggctgctagggctgcaaaggtgggcacccctactcgcctaagagctttctcctctcttctctttttcccctttgcctctctccttacatcacctgcccactaagtagacttgtccttgtgtggacgggagccggaaagccttgagaacttattcctcgacccggacatggcacaggagaaaatgaaactaggtttcaagtcgctgccgagttccactaccgcagacggcaacattctgagaagagtcaacagtgcccctttgatcaatggacttggttttaattcacaggtgttgcaagctgacatgttaagaattaggacaaacagaacaacatttaggaatcgacgctctctgttgttgccacctcctccctttcatggttccatcagccgccttcatcaaatcaaacaggaagaagccatggatttaataaatagagaaacaatgtctgaatggaagctacaaagtgagatacagataagtcactcttgggaagaaggcttgaaactgaatgacaatggcttacagaaatcatcctctctaaagtgcattgatttaactccagtatcctcaatggcttcttccatcaagaagactgggaagtctacttccagctacttttgatggaaacgacagcaatgctggatcttctggtaattcgtcagctgaaatcggcactgtcacaaactctcctgtgtcaccttctgatactggttctcatttgttctagtagacaaactttcaactaaatgattcacccatcccaagactttctcaccagtggagaaacacacacatcaagcaaaccaagtcagagcaatgagaattgtactgtataatttaaactatctcctatttatcttttttcctcaatttcctaaaattctatttatctacagaacttgcgtgtataattcttgtgtacatccttaaatttaatgtaataacatgttaaagatgttttccaaatcagaaccatgttgaagatacaagcgtaaattgttaggctgctattttctagaaaatgctgtaccttgactttttaaaataatcttatgaaacataattctgataaaatataattgttcaattaacaaagtaaaa

SEQ ID NO: 7016 - DNA, 665 bp, Homo sapiens
  source 1..665: mol_type = unassigned DNA
ggcggcagattgtagtttttgttttggccggaaaggcttaccatgagttgccagggctgagagagatggagaaggattcgcggcggtgacagattaaattccccagttacattatagacttggagacttgtccttgtgtggacgggagccggaaagccttgagaacttattcctcgacccggacatggcacaggagaaaatgaaactaggtttcaagtcgctgccgagttccactaccgcagacggcaacattctgagaagagtcaacagtgcccctttgatcaatggacttggacggagtctcactgtgtcgcccaggctggagtgcagtggcatgatctcggctcactgcaacctctgcctcccgggttcaagcgattctcctgcctcagactcccgagtagctgggacttcaggcacccgccaccacgcccacctaattttttgtatttttagtagagacggggtttcaccgtgttagccaggatggtcttgatctcctgaccttgtgatccgcccaccttggcctcccaaagtgttgggattacaggcgtgagccactgcgcctggcctaaatcttacttcttaaactagacttttaaaatgagatgttggatttcacatttcagtattataaggttttctagataccgtaaaaatgtctg

SEQ ID NO: 7017 - DNA, 2483 bp, Homo sapiens
  source 1..2483: mol_type = unassigned DNA
agattgtagtttttgttttggccggaaaggcttaccatgagttgccagggctgagagagatggagaaggattcgcggcggtgacagattaaattccccagttacattatagacttggaggtgggggatcttctcatcgttagaggccccgatcatgggagataggcggttcggagccagttctgcctaactttgtgttcactgatgttagggctgctagggctgcaaaggtgggcacccctactcgcctaagagctttctcctctcttctctttttcccctttgcctctctccttacatcacctgcccactaagtagacttgtccttgtgtggacgggagccggaaagccttgagaacttattcctcgacccggacatggcacaggagaaaatgaaactaggtttcaagtcgctgccgagttccactaccgcagacggcaacattctgagaagagtcaacagtgcccctttgatcaatggacttggacggagtctcactgtgtcgcccaggctggagtgcagtggcatgatctcggctcactgcaacctctgcctcccgggttcaagcgattctcctgcctcagactcccgagtagctgggacttcaggcacccgccaccacgcccacctaattttttgtatttttagtagagacggggtttcaccgtgttagccaggatggtcttgatctcctgaccttgtgatccgcccaccttggcctcccaaagtgttgggattacaggcgtgagccactgcgcctggcctaaatcttacttcttaaactagacttttaaaatgagatgttggatttcacatttcagtattataaggttttctagataccgtaaaaatgtctgaaaaatgcattcactacatatgttactaactttgctcttcaccttttgttgcatcatactaattgatagttgtaattcacagtaccatagactatcaggaagggattcagagaccagctttaccctccttgtttaacatatgaggaaactgaggcccataaatctccaaaatgacgtttagtggcagagccagtactaggaagctctgtttcctgactcctaaactactgttctggccactactaaccaatacctaagctgattaactctaaatgaatgcagcttttgggtcatttgaggtaggagagaatatattgttcacaaaatgaaaagcaaactaagattgaccaaaaaaaaatacattacctttttaaaataggcaggtagaaaaacatagaagggggactctgcatgttgtgctgagaacaagaacattttattcactcaggattttgctctaattctgttgtgggaaaaaggaattatgggacccactctactagtagaagagagcagtagggagaatgttggatttattgaagacaatataaaaagaagaaataggttgcaaatagacgatggaagatgtgtactggaaggaacctgtggatcctctttaatgtattaaatacaccagagaaggagtggacccttccctaatccttaaagccctggaaacagagagatctcagttatcccttcataccttgctttgttctgcaaaggatttttttgttttgtttgtttgttttttgcttatattagagcatagctacagtgttacattccatagcttaagatcctgatgcatgaagtaaaatttgtacagaaagataagggtcactagcatatttctgtagtaggagtttaaagatacagaaaccacaaagtggacggagtccagggactctagtctgtcagaaagaagtaacataggaatgatgtgtgacatccctgagattaggggacttgcccagatgatctgagggcatattttgtgctgttgtagaaaatgtagggcatagtcagagaagttattctgaagcaagaaaaatttagagtaggattacactgagccttagttgaattcattttcacctcagttctcatttgcatatgtatactgctcacttttctccctttttttttccttccttggccctctaatacttgagtacttcctctttctaaactatacctggccagtaaagcattcttttcagaaaggtgaaagtcactagcatatttctttagtaggaattaaagatatagaaaccacaaagtggacagagttcagagactccagtccctcagaaagaagtaacataggaatgatgtgtgacatgcctgaggtcagggaacttgcccaaatgatctgaggggatgttttgtgctgttgtagaaaatatttagcttgctaaacattgttgcacctctttcaagtaattttcgaactttgcttgatgtttcttctatataaagaccctcttgcaccagcatttgcagaattaaattccttaggtttgtttctttcatatcaactctttaatacagtattactgttttaaagaagtatctgcactgttttatgtatatcttgaactaataaaaattccaacgtcaaaa

SEQ ID NO: 7018 - DNA, 348 bp, Homo sapiens
  source 1..348: mol_type = unassigned DNA
tttggccggaaaggcttaccatgagttgccagggctgagagagatggagaaggattcgcggcggtgacagattaaattccccagttacattatagacttggagacttgtccttgtgtggacgggagccggaaagccttgagaacttattcctcgacccggacatggcacaggagaaaatgaaactaggtttcaagtcgctgccgagttccactaccgcagacggcaacattctgagaagagtcaacagtgcccctttgatcaatggacttggctgctttgtcacctctgaccttcacctccagccgcttgaatggaaatggttgtcaagcaaataagctttggacttt

SEQ ID NO: 7019 - DNA, 783 bp, Homo sapiens
  source 1..783: mol_type = unassigned DNA
cttaccatgagttgccagggctgagagagatggagaaggattcgcggcggtgacagattaaattccccagttacattatagacttggaggtgggggatcttctcatcgttagaggccccgatcatgggagataggcggttcggagccagttctgcctaactttgtgttcactgatgttagggctgctagggctgcaaaggtgggcacccctactcgcctaagagctttctcctctcttctctttttcccctttgcctctctccttacatcacctgcccactaagtagacttgtccttgtgtggacgggagccggaaagccttgagaacttattcctcgacccggacatggcacaggagaaaatgaaactaggtttcaagtcgctgccgagttccactaccgcagacggcaacattctgagaagagtcaacagtgcccctttgatcaatggacttggttttaattcacaggtgttgcaagctgacatgttaagaattaggacaaacagaacaacatttaggaatcgacgctctctgttgttgccacctcctccctttcatggttccatcagccgccttcatcaaatcaaacaggaagaagccatggatttaataaatagagaaacaatgtctgaatggaagctacaaagtgagatacagataagtcactcttgggaagaaggcttgaaactggtgaaatggcatttcaatatcaaccaaaaaagattttccaaggcacaaccaacatgctttcttctgatacttcccaactgtcagaaaataat

SEQ ID NO: 7020 - DNA, 749 bp, Homo sapiens
  source 1..749: mol_type = unassigned DNA
agcccctctgcctggctgcccagtctggaaagtgaggagcgtctctgcccggccgccatcccatctaggaagtgaggagcgcctcttcccggccgccatcccatctaggaagtgaggagcgtctctgccccgctgccccgtctgggatgtgaggagcgcctctgcccggccgcgaccccgtctgggaggtgaggagcatctctgcccggccgccccgtctgagaagtgaggagaccctccgcctggcaaccgccccgtctgagaagtgaggagcccctccgcccagcagccgccccgtctgagaagaagaagccatggatttaataaatagagaaacaatgtctgaatggaagctacaaagtgagatacagataagtcactcttgggaagaaggcttgaaactgaatgacaatggcttacagaaatcatcctctctaaagtgcattgatttaactccagtatcctcaatggcttcttccatcaagaagactgggaagaagaagtcaaaatcctaccaacattattagaccaagtatccttggaccattaaaaagaaaaggtgaaatggcatttcaatatcaaccaaaaaagattttccaaggcacaaccaacatgctttcttctgatacttcccaactgtcagaaaataatgtgtatctacttccagctacttttgatggaaacgacagcaatgctggatcttctggtaattcgtcagctgaaatcggcactgtcacaaactctcctgt

SEQ ID NO: 7021 - DNA, 620 bp, Homo sapiens
  source 1..620: mol_type = unassigned DNA
aaatagagaaacaatgtctgaatggaagctacaaagtgagatacagataagtcactcttgggaagaaggcttgaaactgaatgacaatggcttacagaaatcatcctctctaaagtgcattgatttaactccagtatcctcaatggcttcttccatcaagaagactgggaagcagtgtttctctccatcattacaaacttgtgtgagttgcactggttcgccttcaagtcctattcccagtcctatgcaacaatacatcataagaagtcaaaatcctaccaacattattagaccaagtatccttggaccattaaaaagaaaaggtgaaatggcatttcaatatcaaccaaaaaagattttccaaggcacaaccaacatgctttcttctgatacttcccaactgtcagaaaataatgtgtatctacttccagctacttttgatggaaacgacagcaatgctggatcttctggtaattcgtcagctgaaatcggcactgtcacaaactctcctgtgtcaccttctgatactggttctcatttgttctagtagacaaactttcaactaaatgattcacccatcccaagactttctcaccagtggagaaacacacacatcaagc

SEQ ID NO: 7022 - DNA, 2064 bp, Homo sapiens
  source 1..2064: mol_type = unassigned DNA
ttatcgcaggctctgaggggcgggacccaactgattgtcaaaggcggcagattgtagtttttgttttggccggaaaggcttaccatgagttgccagggctgagagagatggagaaggattcgcggcggtgacagattaaattccccagttacattatagacttggagacttgtccttgtgtggacgggagccggaaagccttgagaacttattcctcgacccggacatggcacaggagaaaatgaaactaggtttcaagtcgctgccgagttccactaccgcagacggcaacattctgagaagagtcaacagtgcccctttgatcaatggacttggttttaattcacaggtgttgcaagctgacatgttaagaattaggacaaacagaacaacatttaggaatcgacgctctctggaaattacttcacccacttctgttgaacagaagcccaaagacctcttctgaccttgagactatgccttctcccaaatcgcccctttgctttatctcctaagaactctgaagttgccatgcctgttcctttctctcccaccaggaattctggcacttctgctcaagccggatgtcactgcgtcacttctccatccccaccccctcctcttccaaaggaagcaggggaaatgtctcatcttcctaagagaaaaggttgtgcttttcttgagcaattcatctgttctaattttaggcctactgacatctgtctcattaggttttgcttttcctattggcaaccacaaaccccaaatctagtgtatggcccacaaagttgcaagcatgtaatacattcctgatcctgctttatgccctgcacatctagcccatgttcagttcatgttaagtagcattataaaccatcttaaatcatttctgaaactaggcagagacatttataaacacagtgtacaaccctttgtttaggattttctgagcattttatctctagttactatagtaggaaatggcttaaaaacagcaaacctaggaaaatgaaaaataatttttaaaaatcttaatgtctttacaatatgaattttctgtgatctctcttaaatggaactaagcttggtttttcctcctatcttaatcctttcactggagataattcttagtaattagcttcacccagcaccctccctaacctcccgctacttctactcccagccaccttcacaccatgacatcattccttggtgctgatactcttggttccttccaaggacttttctttcttcctggagtgtgagaaaaaggcacagtgggaaatttacacaaaagataccagtgatgtttattacatctcagtgaagtcattatttctattttaatactttgtttcatgtggaaaaattatctaaggtaattcctttgcaaacgccacttgtagtacttaatttggggagaattctcttccagaagccttgttttctgcaattaatttctcacattattactaaaagaatcagccaatacaagatttgatccacattttgtccaattaaaaaattcttgtagcttatgattctgtagctcaagttcaaatcctacctacctcagacatttcacactatctccctgctggtgtcatcaatttcagtctatcttctcatgatttcctggatgaagtttttcagtgggaaatcctaagcctttgcctgaacctaaattggttccttcccatcccttaggtataaattaaaaataatctcttctagggaagtctttcatcattattttatgaaggaaatttgccataccatgttttctcacttataagtcggagctaaatgataagaacttatgaacacaaggaaacaacagacactagggtctacttgagcggggaggatgtgaggagggaagcagaaaagataactattaggtactgggcttactacctgggtgatgaaatagtatgtacaacaggccaggcgcggtggctcacacctgtaatcccagcactttggaaggccaaggtgggcagatcacctgaggtcaggagtttgagatcagcctggtcaacatggtgaaaccccatctctact

SEQ ID NO: 7023 - DNA, 1368 bp, Homo sapiens
  source 1..1368: mol_type = unassigned DNA
ggcgggacccaactgattgtcaaaggcggcagattgtagtttttgttttggccggaaaggcttaccatgagttgccagggctgagagagatggagaaggattcgcggcggtgacagattaaattccccagttacattatagacttggaggtgggggatcttctcatcgttagaggccccgatcatgggagataggcggttcggagccagttctgcctaactttgtgttcactgatgttagggctgctagggctgcaaaggtgggcacccctactcgcctaagagctttctcctctcttctctttttcccctttgcctctctccttacatcacctgcccactaagtagacttgtccttgtgtggacgggagccggaaagccttgagaacttattcctcgacccggacatggcacaggagaaaatgaaactaggtttcaagtcgctgccgagttccactaccgcagacggcaacattctgagaagagtcaacagtgcccctttgatcaatggacttggttttaattcacaggtgttgcaagctgacatgttaagaattaggacaaacagaacaacatttaggaatcgacgctctctgttgttgccacctcctccctttcatggttccatcagccgccttcatcaaatcaaacaggaagaagccatggatttaataaatagagaaacaatgtctgaatggaagctacaaagtgagatacagataagtcactcttgggaagaaggcttgaaactggtgaaatggcatttcaatatcaaccaaaaaagattttccaaggcacaaccaacatgctttcttctgatacttcccaactgtcagaaaataatgtgtatctacttccagctacttttgatggaaacgacagcaatgctggatcttctggtaattcgtcagctgaaatcggcactgtcacaaactctcctgtgtcaccttctgatactggttctcatttgttctagtagacaaactttcaactaaatgattcacccatcccaagactttctcaccagtggagaaacacacacatcaagcaaaccaagtcagagcaatgagaattgtactgtataatttaaactatctcctatttatcttttttcctcaatttcctaaaattctatttatctacagaacttgcgtgtataattcttgtgtacatccttaaatttaatgtaataacatgttaaagatgttttccaaatcagaaccatgttgaagatacaagcgtaaattgttaggctgctattttctagaaaatgctgtaccttgactttttaaaataatcttatgaaacataattctgataaaatataattgttcaattaacaaagtaaaatgatgtttgacaattatgt

SEQ ID NO: 7024 - DNA, 2119 bp, Homo sapiens
  source 1..2119: mol_type = unassigned DNA
gaggaccacaagcggggccgggctacagatgctgcggctgcccgggcagcgctagcaccgaggacctgacagtcgggtgagggcctgggacagacgcagcagactgggatatgcaaagagaggagtagcctaattgtcaagtctagatctaacaaaagcagtgtcccaagatcatggcatatttccctggaactggaaggactgatcaagaaacacagctagacttgtccttgtgtggacgggagccggaaagccttgagaacttattcctcgacccggacatggcacaggagaaaatgaaactaggtttcaagtcgctgccgagttccactaccgcagacggcaacattctgagaagagtcaacagtgcccctttgatcaatggacttggttttaattcacaggtgttgcaagctgacatgttaagaattaggacaaacagaacaacatttaggaatcgacgctctctggaaattacttcacccacttctgttgaacagaagcccaaagacctcttctgaccttgagactatgccttctcccaaatcgcccctttgctttatctcctaagaactctgaagttgccatgcctgttcctttctctcccaccaggaattctggcacttctgctcaagccggatgtcactgcgtcacttctccatccccaccccctcctcttccaaaggaagcaggggaaatgtctcatcttcctaagagaaaaggttgtgcttttcttgagcaattcatctgttctaattttaggcctactgacatctgtctcattaggttttgcttttcctattggcaaccacaaaccccaaatctagtgtatggcccacaaagttgcaagcatgtaatacattcctgatcctgctttatgccctgcacatctagcccatgttcagttcatgttaagtagcattataaaccatcttaaatcatttctgaaactaggcagagacatttataaacacagtgtacaaccctttgtttaggattttctgagcattttatctctagttactatagtaggaaatggcttaaaaacagcaaacctaggaaaatgaaaaataatttttaaaaatcttaatgtctttacaatatgaattttctgtgatctctcttaaatggaactaagcttggtttttcctcctatcttaatcctttcactggagataattcttagtaattagcttcacccagcaccctccctaacctcccgctacttctactcccagccaccttcacaccatgacatcattccttggtgctgatactcttggttccttccaaggacttttctttcttcctggagtgtgagaaaaaggcacagtgggaaatttacacaaaagataccagtgatgtttattacatctcagtgaagtcattatttctattttaatactttgtttcatgtggaaaaattatctaaggtaattcctttgcaaacgccacttgtagtacttaatttggggagaattctcttccagaagccttgttttctgcaattaatttctcacattattactaaaagaatcagccaatacaagatttgatccacattttgtccaattaaaaaattcttgtagcttatgattctgtagctcaagttcaaatcctacctacctcagacatttcacactatctccctgctggtgtcatcaatttcagtctatcttctcatgatttcctggatgaagtttttcagtgggaaatcctaagcctttgcctgaacctaaattggttccttcccatcccttaggtataaattaaaaataatctcttctagggaagtctttcatcattattttatgaaggaaatttgccataccatgttttctcacttataagtcggagctaaatgataagaacttatgaacacaaggaaacaacagacactagggtctacttgagcggggaggatgtgaggagggaagcagaaaagataactattaggtactgggcttactacctgggtgatgaaatagtatgtacaacaggccaggcgcggtggctcacacctgtaatcccagcactttggaaggccaaggtgggcagatcacctgaggtcaggagtttgagatcagcctggtcaacatggtgaaaccccatctctact

SEQ ID NO: 7025 - DNA, 2383 bp, Homo sapiens
  source 1..2383: mol_type = unassigned DNA
gggagagggcgcggcgcggggttcgcggctggcgcttgagttgtttgccggctcccgggccgccagacgctcggagggagcccggccggctcggactgggcggccgggagggagggcgccccgggtcacgacggcgcccgcaagccgagcgcggccgggacgtgcaccatggacccaaaggcgggcggcggcggcgaggaggacgactgcgtggactcgggcgccgagaccggagggtccgactacagccacctgtcctccacgagcagtgagctttccgttgaagaggcgcaggaccctttcctggtcagcatccacataatcgcagacccaggggagtcccagcccctgcaggaggccatcgacaacgtcctggcgtggatccaccccgacctcccgctgttccgggtgtccgagaggcgggcgtcccggcggcggcggaagccccccaagggcgctcagccagcgctggctgtggtgctgttcctgcaggaggagtacggcgaagagcagatcctgcagctgcaccgcacactgcagcagccgccctggcgccaccaccacaccgagcaggtgcacggccggttcctgccctacctgccctgcagccaggacttcttcacgctggcccctgggacgccgctttgggccatccggcccgtgcactacggcaaggaaatcgtgcgcttcaccgtctactgtcgctacgacaactatgctgacagcctcaggttctaccagctgattctccggaggagccccagccagaagaaagcggacttctgcatcttccctattttttccaacctggatgtggacatccagttctccctgaaaagactgccctgtgaccagtgcccggtgcccaccgactcctccgtgctggagttccgagtgagggacataggcgagctcgtgcctctcctgcccaacccttgcagccccatcagcgaggggcgctggcagacggaggaccatgatgggaacaagatcctcctacaggtactggggggacgcctgtctgtctgtttaggggacctgagaaaccagttagctttgcctcaaacactatagtaccagtcacagagcaatgatcaaggaaggagagatcagtgaccctctgcccagctcctagtcgaagtcaaagtggccatacaggatcccaacaaaagagggggcaagaaagactcttcccattggttctcttcatttcactttcagcaaacatgttcccaattcttccagctgccccttctgtcctcccctattgggcatccactaaacacccatgactcctggggatttcaaatgagcttataagctagggaatttgctattaaagattcctgaatctatgcccatgtacttagagagtttttaccactggattcttccctcccacaaaggaacttcaggaaagcccatctatctggaaattttaaaatatatattgatgttcatagaggagatagctgttctcttccttcaggtgcctcccccaccttctactcttgcatccttctactgctgggcagcaggttgttgaaatcctgtgatcacttggaaaaggatgtcccgttaaacattttaaggagtaagtgatgccttgggagcttctggtttcactaagcttggaaggggtgaaggaattcattttaagtaggctgccctagtccttccatggtaaactctttagcttcatcatcagctccctttctcctctcatccttccaggggttgtcccagactcattagagataattagttatactcaattcaaaattcagcatgtatattacagaacatcctacatctggtcctacctgagaaatgctttccagacccaggctttcttgattttacaagtaaattagttccaggagtatagggccttgtttttctgaaaagcctctacctctgacgtctcaattttcacacttggctacccgaaaagagaaagttgatagtgaattgggggacattgccttaagaggcaaagattgtggttacttgaatcacaggtaaagtttcatcgtttttgttggttttggctttaagcaccagaactataatccacatatcatgaaatgaagtcagaatttggcacatgtcagataactggttcagactacagccaggcctcatttctcgtcagaaaggtcaccttgagatacttactatttataggaactagataattttgaaacttccttttgaactgtgcagataaggaactaagtaatgttttattattcaatatgctagcatttgctctataatcccttttgaaatgtgagaaaaattgtctctgtgtttgaagaatgccacatctttatgcaaaatataatacagttgcaccaagtaaaagttaatgaaatgcaaa

SEQ ID NO: 7026 - DNA, 4761 bp, Homo sapiens
  source 1..4761: mol_type = unassigned DNA; mol_type = unassigned DNA
gcttgagttgtttgccggctcccgggccgccagacgctcggagggagcccggccggctcggactgggcggccgggagggagggcgccccgggtcacgacggcgcccgcaagccgagcgcggccgggacgtgcaccatggacccaaaggcgggcggcggcggcgaggaggacgactgcgtggactcgggcgccgagaccggagggtccgactacagccacctgtcctccacgagcagtgagctttccgttgaagaggcgcaggaccctttcctggtcagcatccacataatcgcagacccaggggagtcccagcccctgcaggaggccatcgacaacgtcctggcgtggatccaccccgacctcccgctgttccgggtgtccgagaggcgggcgtcccggcggcggcggaagccccccaagggcgctcagccagcgctggctgtggtgctgttcctgcaggaggagtacggcgaagagcagatcctgcagctgcaccgcacactgcagcagccgccctggcgccaccaccacaccgagcaggtgcacggccggttcctgccctacctgccctgcagccaggacttcttcacgctggcccctgggacgccgctttgggccatccggcccgtgcactacggcaaggaaatcgtgcgcttcaccgtctactgtcgctacgacaactatgctgacagcctcaggttctaccagctgattctccggaggagccccagccagaagaaagcggacttctgcatcttccctattttttccaacctggatgtggacatccagttctccctgaaaagactgccctgtgaccagtgcccggtgcccaccgactcctccgtgctggagttccgagtgagggacataggcgagctcgtgcctctcctgcccaacccttgcagccccatcagcgaggggcgctggcagacggaggaccatgatgggaacaagatcctcctacaggcacaaagggtgcataagaagtttcctaaacctggcagagtacatcatgcctccgagaagaaacgtcattccactcctttgccgagcactgctgtaccaagccatacacctggcagcagccagcagtccccgctcaacagtcctcacccggggcccatccggacaggcctgcctcctgggcaccagcaggaatttgccggacgagccaacagcacccccaaccctccctggtctttccagagaagcaagtccttgttttgtttgcccacgggaggcccctccctggcctcctcagctgaaccacagtggttttcaaacacaggtgccccagggcacagggcatcagagtggaggcatggccacctcctctccatcgatgacctagagggggcccaggagacagacgtggacacaggcctgcggctgtcctcatcggacctgtctgtggtctctgcatattctgcacccagtaggttctgcagcacagtggagacacccctcccctccgaaagatgcagcagccactgggcagctcacaaggattccagggagggaccactgcccactgtcagcagggtgaccacagaggcctcctgggcttccctccctttcttcaccaaaaggtcttccagctcctcagcgacagctcgtgctgctcccccagctcccagcacctccaccctcacagactcctccccacagctcccatgcgatacccccaaagtcaagcagactgatggagacatgccaccacccccagggtcggctggccccggggataacgacatggaggaattctacatctgaatgccctctgctcttgttctcgaaacacacaaactcagagacacagactcaggccccactgcccctctggccactgagcacaccacattcttcatgatccatttcccaggagcccgtagcacatttgcctaccacccactcttagctggggggtggtatatctctagagacacagcagaaaaatactggcatttttatgcaaataaattctcaacaaacttgtcataaaatatattttttgaatattcagcatttgaggtatggtttagtgggtttatacaatttaaatggcttatataattatttgaaatgaaaagaaaacctagtcagccagaaccaatttggcaatttttccatggtatgaaggcaaatcaattaaggccaaaacgttgaatgtgggagagatagtaagtgacttgtatgagggattactgcataataacgtaacgcacaccttactggattctccatatatatttacattaccagagaacagtggccctagggatgtttaagcactgcttataatggaaaaagtcagcttgagaagtaaacgtatatcagactacaggtaattcctcatcttgaagccatgcaacacctgcaaatctggatttatacaaaagttgctaatgtgtttcataaagatttagcatgagtaacagactcttggtgcatttaaaatatgtgagttccagaaagtagatttgcatacaccttttcaacagcacatttcactggaatggatgaggggcttctgaagaccactccactacctgaatttatttggatcactgaggaagagcatttgttgggattacagaattataggccattagacatcatgggtaggtagtcttaagatccttcaactttcaaaaaccacagtctaaggactatattcaaatgacaagagccgcactgtatactgctttctgcagtgaccatgctgggtcacgcatcctatgtttctcatttttaaatgatttggaacattttagccagcattttgatcacacagattaataatgctgttctccccaaaacgggaaactttacctgaaacgctctcctgaacaaacaccagtgcactgccagcctcacatgattgcatgggagctttaattaacgctggagcccagcaaccttggcttttcctgcctgttatctgctactgtcacaccgtgaatggtatttgaatctcacctccctctcacctcagtaagagtatgtttgtttacagccccaacctcagcaatgccaaaggctggcatcgggggcagtgccaagctgtccctggatactatttacctttgaggaagaacagcatgggtttgccaagctcaattcccaggctggtgctccttgaattaatcatggcacagtgttcatctctctggaaatgcccacgccagcccagacacagcctcagagtcctttccaacacgaccctccaggcagcagttaccaaccatcagtcttcagctgaagcttcaagtctttgccatccttgtaatgacagccttaggccttgccccaagcattctggactctctaacactcagaattgtaatgtaatattctgctctaatttaaatttttaaaaatatagtctcctaattcaggataaggagtaagcaaactttctgaaaagggctagataataagtattttaggctttgccagtcatatggtctcttgcagctactcaactctgccactgtagtatgaaagcagccatgagtaatatgttaatgaatgggaatggctgagttccaataaagctttattttttttttatttgagacggggtcttgctctgttgcccaggctggagtgcaatggcgcaatctcagctcactgcaagctctgcctcctgggttcaagccattctcctgcctcagcctcccaagtagctgcgactacaggtgcgcaccacaatgcctggctaattttttgtatttttagtagagacagagtttcaccatgttggccaggttggtctcaaactcctgacttcgtgatccacccaccttggcctcccaaagcactgggattacaggcatgagccaccattcccagccaataaaactttatttacaagaacagctggtgggccagatttggcccaagggtcatagtttattatcccttgagctaggctgctgcctgaggttgattcaacatcccagctccagtcaacaacaaaaattctaagtctcccgcctaatgctgctgtggtgtgtcatgccaaaaaagtgggctactcaggttagaccaatgacttcagaaccacagggctcagaacaggaaggagcttctttctgcagagctgattcctggaaagccaccagcactccaccttctgcccagaaatgtgattcagtcaatagctgatgaggaaaagcaacctgcaaacattaggaagaaggagaaaaataattcagaggtgatgataccacctccaatgaacagggaagcaagttcatcagtaacaaaagtcagtgaggcaaaaaaaaaaaaaaaaaaaaaaaaaaaaggctaatggccgagggctggctccttctttctccctaatcagtgtccttatttcagtgtgctcacatgctcgcctaggactgctttagagtacaactctggacccgccctcatcacagtccaatctaccaaactgagtgaccctaaaggacatcatagacaacatttgaaagcaagaaatgcaaaatgttcccatagcatcaggtgagcagggagaggatgcccactgtagaccacatggaaatggcagtccctccacggagagggaatcacaggaacacatttaccaaagccttcccttccattcctggccattccagtagcatcttcctcatccagaagggcttccaatactctctggaggatcctgactcgtttggagtattatccttgtaaaagatgctggcacattgtaggtgctcaataaatgtgttcaattgaaaaata

SEQ ID NO: 7027 - DNA, 2104 bp, Homo sapiens
  source 1..2104: mol_type = unassigned DNA; mol_type = unassigned DNA
gagttgtttgccggctcccgggccgccagacgctcggagggagcccggccggctcggactgggcggccgggagggagggcgccccgggtcacgacggcgcccgcaagccgagcgcggccgggacgtgcaccatggacccaaaggcgggcggcggcggcgaggaggacgactgcgtggactcgggcgccgagaccggagggtccgactacagccacctgtcctccacgagcaatggattctccacctggcggatgccatgttgcctgttcctttactgtacacacggtgacaaagaaaagggaagatggagcctccaggttgaacatacctggccctcaggtgagctttccgttgaagaggcgcaggaccctttcctggtcagcatccacataatcgcagacccaggggagtcccagcccctgcaggaggccatcgacaacgtcctggcgtggatccaccccgacctcccgctgttccgggtgtccgagaggcgggcgtcccggcggcggcggaagccccccaagggcgctcagccagcgctggctgtggtgctgttcctgcaggaggagtacggcgaagagcagatcctgcagctgcaccgcacactgcagcagccgccctggcgccaccaccacaccgagcaggtgcacggccggttcctgccctacctgccctgcagccaggacttcttcacgctggcccctgggacgccgctttgggccatccggcccgtgcactacggcaaggaaatcgtgcgcttcaccgtctactgtcgctacgacaactatgctgacagcctcaggttctaccagctgattctccggaggagccccagccagaagaaagcggacttctgcatcttccctattttttccaacctggatgtggacatccagttctccctgaaaagactgccctgtgaccagtgcccggtgcccaccgactcctccgtgctggagttccgagtgagggacataggcgagctcgtgcctctcctgcccaacccttgcagccccatcagcgaggggcgctggcagacggaggaccatgatgggaacaagatcctcctacaggcacaaagggtgcataagaagtttcctaaacctggcagagtacatcatgcctccgagaagaaacgtcattccactcctttgccgagcactgctgtaccaagccatacacctggcagcagccagcagtccccgctcaacagtcctcacccggggcccatccggacaggcctgcctcctgggcaccagcaggaatttgccggacgagccaacagcacccccaaccctccctggtctttccagagaagcaagtccttgttttgtttgcccacgggaggcccctccctggcctcctcagctgaaccacagtggttttcaaacacaggtgccccagggcacagggcatcagagtggaggcatggccacctcctctccatcgatgacctagagggggcccaggagacagacgtggacacaggcctgcggctgtcctcatcggacctgtctgtggtctctgcatattctgcacccagtaggttctgcagcacagtggagacacccctcccctccgaaagatgcagcagccactgggcagctcacaaggattccagggagggaccactgcccactgtcagcagggtgaccacagaggcctcctgggcttccctccctttcttcaccaaaaggtcttccagctcctcagcgacagctcgtgctgctcccccagctcccagcacctccaccctcacagactcctccccacagctcccatgcgatacccccaaagtcaagcagactgatggagacatgccaccacccccagggtcggctggccccggggataacgacatggaggaattctacatctgaatgccctctgctcttgttctcgaaacacacaaactcagagacacagactcaggccccactgcccctctggccactgagcacaccacattcttcatgatccatttcccaggagcccgtagcacatttgcctaccacccactcttagctggggggtggtatatctctagagacacagcagaaaaatactggcatttttatgcaaataaattctcaacaaacttgtc

SEQ ID NO: 7028 - DNA, 612 bp, Homo sapiens
  source 1..612: mol_type = unassigned DNA; mol_type = unassigned DNA
tttgccggctcccgggccgccagacgctcggagggagcccggccggctcggactgggcggccgggagggagggcgccccgggtcacgacggcgcccgcaagccgagcgcggccgggacgtgcaccatggacccaaaggcgggcggcggcggcgaggaggacgactgcgtggactcgggcgccgagaccggaggattctcaaagtagctggtgatctattccaaaccaagtttgggcaagatatgagacatttcattttcaacacactgtgtctgaggtgttgcaagacatccaagtaaagatgatgaatcagcagttgggtatatctgtctggaactcagaagggaggtcttcatgatgacattgcatttgggtactatttacctaaaaatggcaatggaagctctgggagagactaaatcaactgaagatgaggaaatggagactcagagggcacatggctcgttagaggcatgaattgaagcctggatctccagtatgcttcccacctagtgaagttgcctctccaggagctgtctgatctgtaattaattcttgttttctgctcagacattttcttttgcttgaaatgctgctgctgctgtctcaccca

SEQ ID NO: 7029 - DNA, 1335 bp, Homo sapiens
  source 1..1335: mol_type = unassigned DNA; mol_type = unassigned DNA
gtcaccggcccggttccctctccggggagcggcggcggacgcgcggctcccacccctcccctctcacgggctctcccctccccagtgtggccgcgaccctaccctctgcaaggcgatggcccgcgccccgagcgcaggctagcgtgcctgggtgcccggccatgggctgtatcggctctcggagcccggcgggtcaggcatttctggggaccaacagctggccgaggctcagggatagagacggctgctccagctaaagtgtcctcggaccccgcttgggctgtggagtggatcgaacttcctcggggtctctctctatcctctttgggatctgctcgaaccctccgaggctggagcaggtcctcccgcccttcctcggtggacagtcaggacttgccagaggtgaatgttggagacacagtcgcgatgctgcccaagtcccggcgagccctaactatccaggagatcgctgcgctggccaggtcctccctgcatggtatttcccaggtggtgaaggaccacgtgaccaagcctaccgccatggcccagggccgagtggctcacctcattgagtggaagggctggagcaagccgagtgactcacctgctgccctggaatcagccttttcctcctattcagacctcagcgagggcgaacaagaggctcgctttgcagcaggagtggctgagcagtttgccatcgcggaagccaagctccgagcatggtcttcggtggatggcgaggactccactgatgactcctatgatgaggactttgctgggggaatggacacagacatggctgggcagctgcccctggggccgcacctccaggacctgttcaccggccaccggttctcccggcctgtgcgccagggctccgtggagcctgagagcgactgctcacagaccgtgtccccagacaccctgtgctctagtctgtgcagcctggaggatgggttgttgggctccccggcccggctggcctcccagctgctgggcgatgagctgcttctcgccaaactgccccccagccgggaaagtgccttccgcagcctgggcccactggaggcccaggactcactctacaactcgcccctcacagagtcctgcctttcccccgcggaggaggagccagccccctgcaaggactgccagccactctgcccaccactaacgggcagctgggaacggcagcggcaagcctctgacctggcctcttctggggtggtgtccttagatgaggatgaggcagagccagaggaacagtgacccacatcatgcctggcagtggcatgcatcccccggctgctgccaggggcagagcctctgtgc

SEQ ID NO: 7030 - DNA, 1664 bp, Homo sapiens
  source 1..1664: mol_type = unassigned DNA; mol_type = unassigned DNA
accggcccggttccctctccggggagcggcggcggacgcgcggctcccacccctcccctctcacgggctctcccctccccagtgtggccgcgaccctaccctctgcaaggcgatggcccgcgccccgagcgcaggctagcgtgcctgggtgcccggccatgggctgtatcggctctcggagcccggcgggtcaggcatttctggggaccaacagctggccgaggctcagggatagagacggctgctccagctaaaggtatttcccaggtggtgaaggaccacgtgaccaagcctaccgccatggcccagggccgagtggctcacctcattgagtggaagggctggagcaagccgagtgactcacctgctgccctggaatcagccttttcctcctattcagacctcagcgagggcgaacaagaggctcgctttgcagcaggagtggctgagcagtttgccatcgcggaagccaagctccgagcatggtcttcggtggatggcgaggactccactgatgactcctatgatgaggactttgctgggggaatggacacagacatggctgggcagctgcccctggggccgcacctccaggacctgttcaccggccaccggttctcccggcctgtgcgccagggctccgtggagcctgagagcgactgctcacagaccgtgtccccagacaccctgtgctctagtctgtgcagcctggaggatgggttgttgggctccccggcccggctggcctcccagctgctgggcgatgagctgcttctcgccaaactgccccccagccgggaaagtgccttccgcagcctgggcccactggaggcccaggactcactctacaactcgcccctcacagagggctggctcctgccctcccggagcctatgggttgagccgtccctcaagggcccctgcccagctgggctcgtgctgtgcttcattcacctctccatcgtctctaaatcttcctcttttttcctaaagacagaaggtttttggtctgttttttcagtcggatcttctcttctctgggaggctttggaatgatgaaagcatgtaccctccacccttttcctggccccctaatggggcctgggccctttcccaacccctcctaggatgtgcgggcagtgtgctggcgcctcacagccagccgggctgcccattcacgcagagctctctgagcgggaggtggaagaaaggatggctctggttgccacagagctgggacttcatgttcttctagagagggccacaagagggccacaggggtggccgggagttgtcagctgatgcctgctgagaggcaggaattgtgccagtgagtgacagtcatgagggagtgtctcttcttggggaggaaagaaggtagagcctttctgtctgaatgaaaggccaaggctacagtacagggccccaccccagccagggtgttaatgcccacgtagtggaggcctctggcagatcctgcattccaaggtcactggactgtacgtttttatggttgtgggaagggtgggtggctttagaattaagggccttgtaggctttggcaggtaagagggcccaaggtaagaacgagagccaacgggcacaagcattctatatataagtggctcattaggtgtttattttgttctatttaagaatttgtt

SEQ ID NO: 7031 - DNA, 2421 bp, Homo sapiens
  source 1..2421: mol_type = unassigned DNA; mol_type = unassigned DNA
ggttccctctccggggagcggcggcggacgcgcggctcccacccctcccctctcacgggctctcccctccccagtgtggccgcgaccctaccctctgcaaggcgatggcccgcgccccgagcgcaggctagcgtgcctgggtgcccggccatgggctgtatcggctctcggagcccggcgggtcaggcatttctggggaccaacagctggccgaggctcagggatagagacggctgctccagctaaaggtgaatgttggagacacagtcgcgatgctgcccaagtcccggcgagccctaactatccaggagatcgctgcgctggccaggtcctccctgcatggtatttcccaggtggtgaaggaccacgtgaccaagcctaccgccatggcccagggccgagtggctcacctcattgagtggaagggctggagcaagccgagtgactcacctgctgccctggaatcagccttttcctcctattcagacctcagcgagggcgaacaagaggctcgctttgcagcaggagtggctgagcagtttgccatcgcggaagccaagctccgagcatggtcttcggtggatggcgaggactccactgatgactcctatgatgaggactttgctgggggaatggacacagacatggctgggcagctgcccctggggccgcacctccaggacctgttcaccggccaccggttctcccggcctgtgcgccagggctccgtggagcctgagagcgactgctcacagaccgtgtccccagacaccctgtgctctagtctgtgcagcctggaggatgggttgttgggctccccggcccggctggcctcccagctgctgggcgatgagctgcttctcgccaaactgccccccagccgggaaagtgccttccgcagcctgggcccactggaggcccaggactcactctacaactcgcccctcacagagtcctgcctttcccccgcggaggaggagccagccccctgcaaggactgccagccactctgcccaccactaacgggcagctgggaacggcagcggcaagcctctgacctggcctcttctggggtggtgtccttagatgaggatgaggcagagccagaggaacagtgacccacatcatgcctggcagtggcatgcatcccccggctgctgccaggggcagagcctctgtgcccaagtgtgggctcaaggctcccagcagagctccacagcctagagggctcctgggagcgctcgcttctccgttgtgtgttttgcatgaaagtgtttggagaggaggcaggggctgggctgggggcgcatgtcctgcccccactcccggggcttgccgggggttgcccggggcctctggggcatggctacagctgtggcagacagtgatgttcatgttcttaaaatgccacacacacatttcctcctcggataatgtgaaccactaagggggttgtgactgggctgtgtgagggtggggtgggagggggcccagcaaccccccaccctccccatgcctctctcttctctgcttttcttctcacttccgagtccatgtgcagtgcttgatagaatcacccccacctggaggggctggctcctgccctcccggagcctatgggttgagccgtccctcaagggcccctgcccagctgggctcgtgctgtgcttcattcacctctccatcgtctctaaatcttcctcttttttcctaaagacagaaggtttttggtctgttttttcagtcggatcttctcttctctgggaggctttggaatgatgaaagcatgtaccctccacccttttcctggccccctaatggggcctgggccctttcccaacccctcctaggatgtgcgggcagtgtgctggcgcctcacagccagccgggctgcccattcacgcagagctctctgagcgggaggtggaagaaaggatggctctggttgccacagagctgggacttcatgttcttctagagagggccacaagagggccacaggggtggccgggagttgtcagctgatgcctgctgagaggcaggaattgtgccagtgagtgacagtcatgagggagtgtctcttcttggggaggaaagaaggtagagcctttctgtctgaatgaaaggccaaggctacagtacagggccccaccccagccagggtgttaatgcccacgtagtggaggcctctggcagatcctgcattccaaggtcactggactgtacgtttttatggttgtgggaagggtgggtggctttagaattaagggccttgtaggctttggcaggtaagagggcccaaggtaagaacgagagccaacgggcacaagcattctatatataagtggctcattaggtgtttattttgttctatttaagaatttgttttattaaattaatataaaaatctttgtaaatctc

SEQ ID NO: 7032 - DNA, 573 bp, Homo sapiens
  source 1..573: mol_type = unassigned DNA; mol_type = unassigned DNA
ctccggggagcggcggcggacgcgcggctcccacccctcccctctcacgggctctcccctccccagtgtggccgcgaccctaccctctgcaaggcgatggcccgcgccccgagcgcaggctagcgtgcctgggtgcccggccatgggctgtatcggctctcggagcccggcgggtcagggtgaatgttggagacacagtcgcgatgctgcccaagtcccggcgagccctaactatccaggagatcgctgcgctggccaggtcctccctgcatggtatttcccaggtggtgaaggaccacgtgaccaagcctaccgccatggcccagggccgagtggctcacctcattgagtggaagggctggagcaagccgagtgactcacctgctgccctggaatcagccttttcctcctattcagacctcagcgagggcgaacaagaggctcgctttgcagcaggagtggctgagcagtttgccatcgcggaagccaagctccgagcatggtcttcggtggatggcgaggactccactgatgactcctatgatgaggactttgctgggggaatggacacag

SEQ ID NO: 7033 - DNA, 812 bp, Homo sapiens
  source 1..812: mol_type = unassigned DNA; mol_type = unassigned DNA
gttcaggaagtcatcaccttctcttgtcagggcatttctggggaccaacagctggccgaggctcagggatagagacggctgctccagctaaaggtgaatgttggagacacagtcgcgatgctgcccaagtcccggcgagccctaactatccaggagatcgctgcgctggccaggtcctccctgcatggtatttcccaggtggtgaaggaccacgtgaccaagcctaccgccatggcccagggccgagtggctcacctcattgagtggaagggctggagcaagccgagtgactcacctgctgccctggaatcagccttttcctcctattcagacctcagcgagggcgaacaagaggctcgctttgcagcaggagtggctgagcagtttgccatcgcggaagccaagctccgagcatggtcttcggtggatggcgaggactccactgatgactcctatgatgaggactttgctgggggaatggacacagacatggctgggcagctgcccctggggccgcacctccaggacctgttcaccggccaccggttctcccggcctgtgcgccagggctccgtggagcctgagagcgactgctcacagaccgtgtccccagacaccctgtgctctagtctgtgcagcctggaggatgggttgttgggctccccggcccggctggcctcccagctgctgggcgatgagctgcttctcgccaaactgccccccagccgggaaagtgccttccgcagcctgggcccactggaggcccaggactcactctacaactcgcccctcacagagtcctgcctttcccc

SEQ ID NO: 7034 - DNA, 4450 bp, Homo sapiens
  source 1..4450: mol_type = unassigned DNA; mol_type = unassigned DNA
aggggtgagtttggctgacctcaggactggcctcgagagccctggttaggtaccagttgggggccagggatggcctgtaacctcctgttttccttctggttggtagcatttctggggaccaacagctggccgaggctcagggatagagacggctgctccagctaaaggtcagttgtgatgtacattgcctgttggcactgtctagggaatgggcctcagctccccgagtcccagagagcttggctgagccctggtgttcccacctcctcagagccatgaggcaggaatgttctccttatgtgactaggcacaggttccaaatggggaggggactggctcagcatccggagccaaaacaggaatagaactgggagctgagcctggagcggttctgggcttttggttctctgcatcaacacagccagcatgcctatgatttctgtgctgggcaaaatgtttctgtggcagcgtgaagggcctggaggacgatggacttgtcagacaagtcgcagagtgtcctcggaccccgcttgggctgtggagtggatcgaacttcctcggggtctctctctatcctctttgggatctgctcgaaccctccgaggctggagcaggtcctcccgcccttcctcggtggacagtcaggacttgccagaggtgaatgttggagacacagtcgcgatgctgcccaagtcccggcgagccctaactatccaggagatcgctgcgctggccaggtcctccctgcatggtatttcccaggtggtgaaggaccacgtgaccaagcctaccgccatggcccagggccgagtggctcacctcattgagtggaagggctggagcaagccgagtgactcacctgctgccctggaatcagccttttcctcctattcagacctcagcgagggcgaacaagaggctcgctttgcagcaggagtggctgagcagtttgccatcgcggaagccaagctccgagcatggtcttcggtggatggcgaggactccactgatgactcctatgatgaggactttgctgggggaatggacacagacatggctgggcagctgcccctggggccgcacctccaggacctgttcaccggccaccggttctcccggcctgtgcgccagggctccgtggagcctgagagcgactgctcacagaccgtgtccccagacaccctgtgctctagtctgtgcagcctggaggatgggttgttgggctccccggcccggctggcctcccagctgctgggcgatgagctgcttctcgccaaactgccccccagccgggaaagtgccttccgcagcctgggcccactggaggcccaggactcactctacaactcgcccctcacagagtcctgcctttcccccgcggaggaggagccagccccctgcaaggactgccagccactctgcccaccactaacgggcagctgggaacggcagcggcaagcctctgacctggggctggctcctgccctcccggagcctatgggttgagccgtccctcaagggcccctgcccagctgggctcgtgctgtgcttcattcacctctccatcgtctctaaatcttcctcttttttcctaaagacagaaggtttttggtctgttttttcagtcggatcttctcttctctgggaggctttggaatgatgaaagcatgtaccctccacccttttcctggccccctaatggggcctgggccctttcccaacccctcctaggatgtgcgggcagtgtgctggcgcctcacagccagccgggctgcccattcacgcagagctctctgagcgggaggtggaagaaaggatggctctggttgccacagagctgggacttcatgttcttctagagagggccacaagagggccacaggggtggccgggagttgtcagctgatgcctgctgagaggcaggaattgtgccagtgagtgacagtcatgagggagtgtctcttcttggggaggaaagaaggtagagcctttctgtctgaatgaaaggccaaggctacagtacagggccccaccccagccagggtgttaatgcccacgtagtggaggcctctggcagatcctgcattccaaggtcactggactgtacgtttttatggttgtgggaagggtgggtggctttagaattaagggccttgtaggctttggcaggtaagagggcccaaggtaagaacgagagccaacgggcacaagcattctatatataagtggctcattaggtgtttattttgttctatttaagaatttgttttattaaattaatataaaaatctttgtaaatctctatatacatctggtcattggaggttccagttataaacccatcttagttccacccctttcccctcaaagggggagcaggggtcaagtgaccccaacccatcctgccagggcagggcctatcttcctgcctctggaagacttgttgcaggtgggtagtgggtcagattccaggtaggatgaactgggagaagctggcaccccaggtctggagggggctggggtgcagcctccagctgtagctgcctcctgccttccgaaggcagaaggaatgaaagatgcacattctgggctgacgggcatggctagcaccatcctaggccacccacgaggggctcattggcatttgtcgtcgctgtcggaagggctgccctcccgggggaggccatgacgggagtggggcccccagagtgcatgcacctcagtggtctccgtgtcactgctgctggtggcactgtctcggaagctggcgaggggcggccggactttcacaccctgtgctgtgacagagccctcgatggccttccggagctggaaaggtgagagggacagatgtctggacccagatgtcagactcctccccgccttcctccccaggtgagctggacataagcctccatgactttttggaagtggagcagctttggaggccaccatcacctcacctcctttagagtaacgattccaatgagtctgccaatactggtgacataagcatggtccactcccagcagtgagaagatagtgtgagtctgcagtgtggggagaaaagcgattggacttgatggacgaggggcagctctaaatgacaggccacaggggcccaggacaaggttggtgtggaataggaggggtgccccagattgggagggaaggagacaggactgctggagggaaaataataacaatcgtaataataatgagaatgtttctgtgtccaggcctcaggaacttgatactcaaaatccttatattgcttacactgacggagaaataggatgggggagtaattcttagtcccatgttagaaagggggacgtgggacagaacaactgttcacacgtgaaatctagtgattggccaggctccgtgctaggtcttacattatcatttaattccagtactgtcctgagaactaagcattaggagaagcagcatggggctcaacagtgaagtgacttgttccaggcgggtcctcaggagtggctgtgcagccccagtcacttttcatcacaccggagagggacgcacaaccccagtcctgtttagttgcagatataccgagaagggagagcccacaccgaccttaagggcacttgggccctgaatcctatgcctctcgttccactgcttctcagttgccctcctacctggctggccaggtttggagtctctctcccctgctctggcattccagtcttggcctgaagcacgctatgcctctcatacagtctgccttttctagggtccaagcagcatcccaagttctgttgagatgcagcttgcagtccaggaggacaacggtcacccccatcttcccatgtttttcttgctttaagccctcccctaagctttcacatataatcaccaggggttcagaaattgtcagccagttctccttatgctttaagtagattttcttggggccagatgtcttgaaaaacgctctcctgactcagcagttcctggaatttttggcctatcatttatctcactgttctgagtttacttgtaagcctcttcgcttaatgtttgaatcaagatgagcagtaataacagcttcttgtgtaccaattactcagaactcacttaaattgccttaacactttttaaatgttcttacacatttgaaattctttagggagggatttccagaactttcctaaatttctccacccatggcatgacagtacttagaggggcaagaagttcaattttagaataagctcttctgggcgcgatggctcatgcctgtaatcctagcactctgggaggccaaggcgggtagaatgcttgagcccaggagtttgagactagcctgcaatatgcgaaaccctgtctccacaaaaagccagacatagtggtgcatgcctgcagtcccagctacttgggggcgctgagttgtgaggatcacctgagcccaggaggcaga

SEQ ID NO: 7035 - DNA, 1483 bp, Homo sapiens
  source 1..1483: mol_type = unassigned DNA; mol_type = unassigned DNA
gccctggtgttcccacctcctcagagccatgaggcaggaatgttctccttatgtgactaggcacaggttccaaatggggaggggactggctcagcatccggagccaaaacaggaatagaactgggagctgagcctggagcggttctgggcttttggttctctgcatcaacacagccagcatgcctatgatttctgtgctgggcaaaatgtttctgtggcagcgtgaagggcctggaggacgatggacttgtcagacaagtcgcagagtgtcctcggaccccgcttgggctgtggagtggatcgaacttcctcggggtctctctctatcctctttgggatctgctcgaaccctccgaggctggagcaggtcctcccgcccttcctcggtggacagtcaggacttgccagaggtgaatgttggagacacagtcgcgatgctgcccaagtcccggcgagccctaactatccaggagatcgctgcgctggccaggtcctccctgcatggtatttcccaggtggtgaaggaccacgtgaccaagcctaccgccatggcccagggccgagtggctcacctcattgagtggaagggctggagcaagccgagtgactcacctgctgccctggaatcagccttttcctcctattcagacctcagcgagggcgaacaagaggctcgctttgcagcaggagtggctgagcagtttgccatcgcggaagccaagctccgagcatggtcttcggtggatggcgaggactccactgatgactcctatgatgaggactttgctgggggaatggacacagacatggctgggcagctgcccctggggccgcacctccaggacctgttcaccggccaccggttctcccggcctgtgcgccagggctccgtggagcctgagagcgactgctcacagaccgtgtccccagacaccctgtgctctagtctgtgcagcctggaggatgggttgttgggctccccggcccggctggcctcccagctgctgggcgatgagctgcttctcgccaaactgccccccagccgggaaagtgccttccgcagcctgggcccactggaggcccaggactcactctacaactcgcccctcacagagtcctgcctttcccccgcggaggaggagccagccccctgcaaggactgccagccactctgcccaccactaacgggcagctgggaacggcagcggcaagcctctgacctggcctcttctggggtggtgtccttagatgaggatgaggcagagccagaggaacagtgacccacatcatgcctggcagtggcatgcatcccccggctgctgccaggggcagagcctctgtgcccaagtgtgggctcaaggctcccagcagagctccacagcctagagggctcctgggagcgctcgcttctccgttgtgtgttttgcatgaaagtgtttggagaggaggcaggggctgggctgggggcgcatgtcctgccccc

SEQ ID NO: 7036 - DNA, 3228 bp, Homo sapiens
  source 1..3228: mol_type = unassigned DNA; mol_type = unassigned DNA
aatagaactgggagctgagcctggagcggttctgggcttttggttctctgcatcaacacagccagcatgcctatgatttctgtgctgggcaaaatgtttctgtggcagcgtgaagggcctggaggacgatggacttgtcagacaagtcgcagagtgtcctcggaccccgcttgggctgtggagtggatcgaacttcctcggggtctctctctatcctctttgggatctgctcgaaccctccgaggctggagcaggtcctcccgcccttcctcggtggacagtcaggacttgccagaggtgctgggcccctggtggtggggggaaggaggacgtcatccatataaaggggatctgcagcccccacccacgcctggccagccagcttctggctcccttttccggcgggcggaggcgctatccggcggcgggccgggaggccgcccccgtgccggtctgctctgctcggcgctgtgccagcaggcggagagctcgcgccttccgcgctgacgtcagcgcatcccgggccgtatcccgggagaccctgttgcgtggtgatgggttgccagggagacatacaccttttctctgggcctgggccgcagctgcgcggagcgccgggcacggatggcggcggctgaggggagcgaagcgagggagggagagcaagctaagaaacacccagcaggtgctcccccgcctaggcctggctggaggctactggcgccaccctgggggccctgtcagccaggtacccaaggggagggatcgagggtgggcctcaggtcaaggggcagtgttggctgcccttgtgagggacgggaacgtgatagaagagagctgggcaatgccggggagggatgtgtgcctccaacttcattaagtgagggaaacatttgctggggcttgtcagggagccctgagccaggtacagggtggagttaggaacttacgtgcatcagacttaggccttgccatcctgagctccctcgggagacagacaagggcaatgatgggggcggggtgtgtcagagaaaagaagaggctgtcggctgaaagcattatttgcaggtgacacttgagatgggccttaagtgatggcaagcattttttcacgtaaggatggcattcttggcccagaggaaagctgagttccttttcctggaggcaggcgggctgcttgctgacagggattggtggagaagggtttttgttttttgttatttatttttatgtatttatttatttgagacggagtttcgctcttgttgcccaggctggaatgcaatggtgcgatctcggctcaccgcagcctctgcctctggggttcaagcgattatcctgcctcagcctccagagtagctgggattacaggcatgcgctgccacgcccggctgattttgtatttttagtagaggcggggtttcaccatgttggccaggctggtctccaactcccgacctcaggtgatccgcctgcttcggcctcccaaaatgctgggattacaggcgtgagccactgcgcccggcctgagaaggggggttttattgggcagaggagatcagcagtggattcaaaggaggcttggaaggaggcaagggtgtcacagagtgggatccttcagggcctgggtatgatgcctgcactaacctcactggacagtagcgtaggctagacaagattttagagatgtgttgtgaccagctgcactccaggaaaactgtttacattatatcttacctcattcatccagcctttgcatttttgtttgcttgtttttgagacagagtctttttctgtcgcccaggctggagtgcagtggcacaatcttggctcactgcaatctccgcctcctgggttcaagcaattctcctgcctcagcctcctgagtagctgggataacaggcacccgccaccatgccctgcccattttttaaattatttttagtggagatggggtttcaccatgttggcctggctggtctcaaactcctgacctcagatgatctacccaccttggccccttggcctcccaaagtgctggaattacaggcgtgagccaccacgcctggcccagcctatgcattttttttttttttttttttttttgagatggagtcttgcaccgtagcctaagctggagtgcagtggtgcgatctcggctcaccgcaacctccgcctcccgggtcctggttcaagcaattttcttgcctcagcctcctgagtagctgggattacaggaacgtgccaccatgcccagctaatttttgtatttttagtagagacggggtttcaccatgttggccaggctggtcttgaactcgtgacctcatgatccgctcacctcggcctcccaaagtgctgggattacaggcatgagccactgacgcctggccagcctatgcatttttaagaaattattctgtattaggtgctgtgctaaacattgggcactacagtgaccaaaacagactgaattccccaagagccaaagaccagtgagggagaccaacaagaaacaggaaatgcaaaagagaccattattactcactatgactaagggccacaaatggggtacgttgatggagagtgatttgttaagagactacagagggaggacagactaccaagaggggggccaggaaagctcctctgacgaggtggtatttcagcccaaactggaagaatgagaaagagctagccagccatcagaatagtccagaagagatggggagcactacactcactacactttggcctgagaaaatagcatgggattggaggaggctgggggaacaccacttctgccgacctgggcaggaggcattgagggcttgagaaagggcaatggcagtagcagtagaaaggacagggtaggagcagggactttgcaggtggaatcattaggtcttatcaacagatatgggcaagcaaagccaggggagaattgatggtaatgctgaggtttggagccaggctagatgggacagtggtgggtgatgcaaaggaaagaggtcaggaagcagggccagacgtggggagaaggtgtgggggtttggtttccatcttgccgagtctgccggaatgtggatgggaagaccaagaggaggagcaaggggcagaggggaagggaatcttaaagaagtcctggatgccacactcttcttccttcctcctcttccctctcctcagaggtctcactcgtggttcttcatttcctgccctgcctcc

SEQ ID NO: 7037 - DNA, 1038 bp, Homo sapiens
  source 1..1038: mol_type = unassigned DNA; mol_type = unassigned DNA
ccgcagctgcgcggagcgccgggcacggatggcggcggctgaggggagcgaagcgagggagggagagcaagctaagaaacacccagcaggtgctcccccgcctaggcctggctggaggctactggcgccaccctgggggccctgtcagccaggtgaatgttggagacacagtcgcgatgctgcccaagtcccggcgagccctaactatccaggagatcgctgcgctggccaggtcctccctgcatggtatttcccaggtggtgaaggaccacgtgaccaagcctaccgccatggcccagggccgagtggctcacctcattgagtggaagggctggagcaagccgagtgactcacctgctgccctggaatcagccttttcctcctattcagacctcagcgagggcgaacaagaggctcgctttgcagcaggagtggctgagcagtttgccatcgcggaagccaagctccgagcatggtcttcggtggatggcgaggactccactgatgactcctatgatgaggactttgctgggggaatggacacagacatggctgggcagctgcccctggggccgcacctccaggacctgttcaccggccaccggttctcccggcctgtgcgccagggctccgtggagcctgagagcgactgctcacagaccgtgtccccagacaccctgtgctctagtctgtgcagcctggaggatgggttgttgggctccccggcccggctggcctcccagctgctgggcgatgagctgcttctcgccaaactgccccccagccgggaaagtgccttccgcagcctgggcccactggaggcccaggactcactctacaactcgcccctcacagagtcctgcctttcccccgcggaggaggagccagccccctgcaaggactgccagccactctgcccaccactaacgggcagctgggaacggcagcggcaagcctctgacctggcctcttctggggtggtgtccttagatgaggatgaggcagagccagaggaacagtgacccacatcatgcctgg

SEQ ID NO: 7038 - DNA, 3677 bp, Homo sapiens
  source 1..3677: mol_type = unassigned DNA; mol_type = unassigned DNA
gaacgtgccaccatgcccagctaatttttgtatttttagtagagacggggtttcaccatgttggccaggctggtcttgaactcgtgacctcatgatccgctcacctcggcctcccaaagtgctgggattacaggcatgagccactgacgcctggccagcctatgcatttttaagaaattattctgtattaggtgctgtgctaaacattgggcactacagtgaccaaaacagactgaattccccaagagccaaagaccagtgagggagaccaacaagaaacaggaaatgcaaaagagaccattattactcactatgactaagggccacaaatggggtacgttgatggagagtgatttgttaagagactacagagggaggacagactaccaagaggggggccaggaaagctcctctgacgaggtggtatttcagcccaaactggaagaatgagaaagagctagccagccatcagaatagtccagaagagatggggagcactacactcactacactttggcctgagaaaatagcatgggattggaggaggctgggggaacaccacttctgccgacctgggcaggaggcattgagggcttgagaaagggcaatggcagtagcagtagaaaggacagggtaggagcagggactttgcaggtggaatcattaggtcttatcaacagatatgggcaagcaaagccaggggagaattgatggtaatgctgaggtttggagccaggctagatgggacagtggtgggtgatgcaaaggaaagaggtcaggaagcagggccagacgtggggagaaggtgtgggggtttggtttccatcttgccgagtctgccggaatgtggatgggaagaccaagaggaggagcaaggggcagaggggaagggaatcttaaagaagtcctggatgccacactcttcttccttcctcctcttccctctcctcagaggtctcactcgtggttcttcatttcctgccctgcctccatctcctctgggtgctgggaaagtggaggattagctgaagttttgcttctcggggcctgtctgaatctccattgctttctgggaggacataattcacctgtcctagcttcttatcatcttacatttccctgtagccactgggacatatgtggtgttccttcctagctcctgtctcctcctcatgcctttgctgggtatgggcatgttagggggaaggtcattgctgtcagaggggcactgactttctaatggtgttacccaaggtgaatgttggagacacagtcgcgatgctgcccaagtcccggcgagccctaactatccaggagatcgctgcgctggccaggtcctccctgcatggtatgcagcccctcccatgtttctggccactttgtcctttctcctcccgtttgcacatccctttggaactgtttcctgtgagtacatgctggggtctcccctttcttcccttgctcaggtgaatctcagccccttctcccacccaaaggttcacatggatcctaactactgccacccttccacctccctgcacctgtgctccctggcctggtcctttaccaggcttctccaccctcccctatctccaggtatttcccaggtggtgaaggaccacgtgaccaagcctaccgccatggcccagggccgagtggctcacctcattgagtggaagggctggagcaagccgagtgactcacctgctgccctggaatcagccttttcctcctattcagacctcagcgagggcgaacaagaggctcgctttgcagcaggagtggctgagcagtttgccatcgcggaagccaagctccgagcatggtcttcggtggatggcgaggactccactgatgactcctatgatgaggactttgctgggggaatggacacagacatggctgggcagctgcccctggggccgcacctccaggacctgttcaccggccaccggttctcccggcctgtgcgccagggctccgtggagcctgagagcgactgctcacagaccgtgtccccagacaccctgtgctctagtctgtgcagcctggaggatgggttgttgggctccccggcccggctggcctcccagctgctgggcgatgagctgcttctcgccaaactgccccccagccgggaaagtgccttccgcagcctgggcccactggaggcccaggactcactctacaactcgcccctcacagagtcctgcctttcccccgcggaggaggagccagccccctgcaaggactgccagccactctgcccaccactaacgggcagctgggaacggcagcggcaagcctctgacctggcctcttctggggtggtgtccttagatgaggatgaggcagagccagaggaacagtgacccacatcatgcctggcagtggcatgcatcccccggctgctgccaggggcagagcctctgtgcccaagtgtgggctcaaggctcccagcagagctccacagcctagagggctcctgggagcgctcgcttctccgttgtgtgttttgcatgaaagtgtttggagaggaggcaggggctgggctgggggcgcatgtcctgcccccactcccggggcttgccgggggttgcccggggcctctggggcatggctacagctgtggcagacagtgatgttcatgttcttaaaatgccacacacacatttcctcctcggataatgtgaaccactaagggggttgtgactgggctgtgtgagggtggggtgggagggggcccagcaaccccccaccctccccatgcctctctcttctctgcttttcttctcacttccgagtccatgtgcagtgcttgatagaatcacccccacctggaggggctggctcctgccctcccggagcctatgggttgagccgtccctcaagggcccctgcccagctgggctcgtgctgtgcttcattcacctctccatcgtctctaaatcttcctcttttttcctaaagacagaaggtttttggtctgttttttcagtcggatcttctcttctctgggaggctttggaatgatgaaagcatgtaccctccacccttttcctggccccctaatggggcctgggccctttcccaacccctcctaggatgtgcgggcagtgtgctggcgcctcacagccagccgggctgcccattcacgcagagctctctgagcgggaggtggaagaaaggatggctctggttgccacagagctgggacttcatgttcttctagagagggccacaagagggccacaggggtggccgggagttgtcagctgatgcctgctgagaggcaggaattgtgccagtgagtgacagtcatgagggagtgtctcttcttggggaggaaagaaggtagagcctttctgtctgaatgaaaggccaaggctacagtacagggccccaccccagccagggtgttaatgcccacgtagtggaggcctctggcagatcctgcattccaaggtcactggactgtacgtttttatggttgtgggaagggtgggtggctttagaattaagggccttgtaggctttggcaggtaagagggcccaaggtaagaacgagagccaacgggcacaagcattctatatataagtggctcattaggtgtttattttgttctatttaagaatttgttttattaaattaatataaaaatctttgtaaatctcta

SEQ ID NO: 7039 - DNA, 523 bp, Homo sapiens
  source 1..523: mol_type = unassigned DNA; mol_type = unassigned DNA
cgagtggctcacctcattgagtggaagggctggagcaagccgagtgactcacctgctgccctggaatcagccttttcctcctattcagacctcagcgagggcgaacaagaggctcgctttgcagcaggagtggctgagcagtttgccatcgcggaagccaagctccgagcatggtcttcggtggatggcgaggactccactgatgactcctatgatgaggactttgctgggggaatggacacaggtgagggacatcctgggctagggctgtggtggacccacctgatagaccttggcattctttcagagccacatccagaacactctcagcctttgcaaggggagggagagggacagactcagtccaggcaggcctggacactccagggacaggaaggctgtccacactcatgggtgggaaatgagcagacagaaatggattcgttcctttcccacaggtgctgaggcttctctgcctgtctgcacagttgtgccttgcagtcctcaaaaaaaaaaaaaaaaa

SEQ ID NO: 7040 - DNA, 1054 bp, Homo sapiens
  source 1..1054: mol_type = unassigned DNA; mol_type = unassigned DNA
gtgaattagacttttcagctctttgtcctaagattagcctcacggttgctgccaaagagttatctgtgtctgacacagacgtctcagaggtatcctggactgataatgggaccttcaacctttcagaaggatacactccacagacagacacttctgatgatcttgaccgacccagtgaggaagttttctctagagatctttcagattttccatctctagaaaatggcatgggaacaaatgatgaagatgaattaagccttggtttgcccactgagctcaagagaaagaaggaacagttggacagtggtcacagaccaagcaaagagacgcaatcagcagctggtctcacccttcctctgaacagtgaccaaacctttcacctgatgagcaacctggctggggatgttatcacagctgcagtgactgcagctatcaaagaccagttagagggtgtgcagcaagcactttctcaggctgcccccatcccagaagaggacacagacactgaagaaggtgatgactttgaactacttgaccagtcagagctggatcaaattgagagtgaattgggacttacacaagaccaggaagcagaagcacagcaaaataagaagtcttcaggtttcctttcaaatctgctgggaggccattaatctaggaatcagcttgcaacagagcacaaaaaacaccaaaaaaatttcaaacaagaaaaaaaaaaaaaaaaggaaaagaaaaaaattgaactgtattaaaatatctggactgagttttgccaaatgttaaagggagaagagttactgaagactttgaacacttgctttttgtgattgcttatgtcattagtgcctcatgactgtgtttgatgtcctttattgatacaaagtgagcctgtgccttcattatcttgcccattttaatacaaatggaaacctggtgtttgaaaatctctgaactgtgtgggttttggaggaatatacctgaattttattcaataacagtttctggacaggaagaaaaatacagttacatatttataaaatagtcgttatcagta

SEQ ID NO: 7041 - DNA, 3145 bp, Homo sapiens
  source 1..3145: mol_type = unassigned DNA; mol_type = unassigned DNA
atccaatgaaggttactggctgagcggggacaccttctcacaggactggagagagaatgcggggcagctgggcagggctcacttccagccgcctgtcacagtactgggagtaagaggtgacctatttatttttagaagggggcagtgataataacccagctcctagcttcattcaagggaggcaggcgctttggaagtttgtaaacaccaactttctgagtaagggaggagcactttttttccaaaaaggaaagaacgtctctactgggtttttttcctcctgatattcagcattagagtagaaaagaaactattgtttggccacattagccgtggttagcaggtgctgcagcctttgccactgttattatttttaaagggcagaaatgcctgaaggtgaagactttggaccaggcaaaagctgggaagttatcaattccaaaccagatgaaagacccaggctcagccactgtattgcagaatcatggatgaatttcagcatatttcttcaagaaatgtctctttttaaacagcagagccctggcaagttttgtctcctggtctgtagtgtgtgcacattttttacgatcttgggaagttacattcctggggttatactcagctatctactgttactgtgtgcatttttgtgtccattgtttaaatgtaatgatattggacaaaaaatttacagcaaaattaagtcagttctgctgaaactggattttggaattggagaatatattaatcagaagaaacgtgagagatctgaagcagacaaagaaaaaagtcacaaagatgacagtgaattagacttttcagctctttgtcctaagattagcctcacggttgctgccaaagagttatctgtgtctgacacagacgtctcagaggtatcctggactgataatgggaccttcaacctttcagaaggatacactccacagacagacacttctgatgatcttgaccgacccagtgaggaagttttctctagagatctttcagattttccatctctagaaaatggcatgggaacaaatgatgaagatgaattaagccttggtttgcccactgagctcaagagaaagaaggaacagttggacagtggtcacagaccaagcaaagagacgcaatcagcagctggtctcacccttcctctgaacagtgaccaaacctttcacctgatgagcaacctggctggggatgttatcacagctgcagtgactgcagctatcaaagaccagttagagggtgtgcagcaagcactttctcaggctgcccccatcccagaagaggacacagacactgaagaaggtgatgactttgaactacttgaccagtcagagctggatcaaattgagagtgaattgggacttacacaagaccaggaagcagaagcacagcaaaataagaagtcttcaggtttcctttcaaatctgctgggaggccattaatctaggaatcagcttgcaacagagcacaaaaaacaccaaaaaaatttcaaacaagaaaaaaaaaaaaaaaaggaaaagaaaaaaattgaactgtaagctttaatgattactttagatttgttttattttccctcctgcagtgaattaattggatatatatcagctgacactgatagattgatatttctgatcgttatttttgtgtaataagcatggaaatgaactttatacacaccactgtgttgtcagagataaatattaggggttgtttttaaagcaaaaagaaaaaaacaaaaaccaaactattaaaatcctcctataaatattctttttctttacagtttttcaagcatgcaaaacagtttattgtaacttactgaaaaatattaacaattaattgtgaatacatgctgttaccagcttccttattcctaatacctggaaaatttttttttcaacggatagattttgatgtaaaaaagaccgaaattatcaaggtatcttagttgaaggacttgggaaatactatcaaaattaatttcttaggaaaaaatttaaaagtatatttaagtactctggatagactgaaacgtttccatgttatttctgcagttgtagacttaggcttatttgtaaagaagcatgctccattgactgccatctctagtcttgcagtgggtggtattaacccatagaaagcaagcagttgtgtatcacatagacaatggttatgatgtaaacagattcagttgttttgttgttcattcgtcatatgtttgtgatagggatgttgggagcacagctctattctgcctgctcagacttaagttagacccttatcttttatattatgtcatgaaaaaagtctcctaaaattgtgaaactagttcttgatgagtgatgtgatcatcagcaataaagatataataactctgttttcttagcctgtatagaggagaggaacttgcttggctttaaaatatatttatttgccatttaagtataaatatggaatctgtttcttattgggaagatagaatatatatattttcctttaaactttttaaggtcacttttaaataaccaaatttgatttatggtttttaacaaaggactaaagagctgaaaccaacctagttttgtttttgtgatataaactttaagtgtcgagggaccatgccagcaactaccaaaaatctcttaaatcttcaggtacagctggcattttggcagatgcatagagacatctgagaccctcagaaaggaaggataatccaagaatataggaaatctgtgttctcttcctttcattttatcccttatatttctaaagactaattataagtaatctgacattttaatgtagctactcttatttattttttctttctgaggtattaaaatatctggactgagttttgccaaatgttaaagggagaagagttactgaagactttgaacacttgctttttgtgattgcttatgtcattagtgcctcatgactgtgtttgatgtcctttattgatacaaagtgagcctgtgccttcattatcttgcccattttaatacaaatggaaacctggtgtttgaaaatctctgaactgtgtgggttttggaggaatatacctgaattttattcaataacagtttctggacaggaagaaaaatacagttacatatttataaaa

SEQ ID NO: 7042 - DNA, 3268 bp, Homo sapiens
  source 1..3268: mol_type = unassigned DNA
accgccgccccgccctcggcggcacccacacccaggcgcgcccgcgcgcgcgcccggccccgtccctgtctggaagcacagctgaagatggcgagcccggcgcctccggagcacgccgaggagggatgcccggctcctgccgccgaggagcaggcgccgccgtcgccgccaccgccccaggcatcccccgcagagcggcagcagcaggaggaggaagcgcaggaagctggggcggcggagggcgcggggttgcaggtggaggaggccgcgggccgggcggcggccgcggtaacctggctgctcggggagccggtgctgtggctgggctgccgcgccgacgagctgctgagctggaagaggccgctgcggagcctgctcggcttcgtcgctgccaacctgctgttctggttccttgcattgactccatggagagtatatcacctgatttccgtcatgatacttgggcgtgttattatgcaaataataaaggatatggttttgtctagaacaagaggtgcacagttgtggagaagcctcagtgaaagctgggaagttatcaattccaaaccagatgaaagacccaggctcagccactgtattgcagaatcatggatgaatttcagcatatttcttcaagaaatgtctctttttaaacagcagagccctggcaagttttgtctcctggtctgtagtgtgtgcacattttttacgatcttgggaagttacattcctggggttatactcagctatctactgttactgtgtgcatttttgtgtccattgtttaaatgtaatgatattggacaaaaaatttacagcaaaattaagtcagttctgctgaaactggattttggaattggagaatatattaatcagaagaaacgtgagagatctgaagcagacaaagaaaaaagtcacaaagatgacagtgaattagacttttcagctctttgtcctaagattagcctcacggttgctgccaaagagttatctgtgtctgacacagacgtctcagaggtatcctggactgataatgggaccttcaacctttcagaaggatacactccacagacagacacttctgatgatcttgaccgacccagtgaggaagttttctctagagatctttcagattttccatctctagaaaatggcatgggaacaaatgatgaagatgaattaagccttggtttgcccactgagctcaagagaaagaaggaacagttggacagtggtcacagaccaagcaaagagacgcaatcagcagctggtctcacccttcctctgaacagtgaccaaacctttcacctgatgagcaacctggctggggatgttatcacagctgcagtgactgcagctatcaaagaccagttagagggtgtgcagcaagcactttctcaggctgcccccatcccagaagaggacacagacactgaagaaggtgatgactttgaactacttgaccagtcagagctggatcaaattgagagtgaattgggacttacacaagaccaggaagcagaagcacagcaaaataagaagtcttcaggtttcctttcaaatctgctgggaggccattaatctaggaatcagcttgcaacagagcacaaaaaacaccaaaaaaatttcaaacaagaaaaaaaaaaaaaaaaggaaaagaaaaaaattgaactgtaagctttaatgattactttagatttgttttattttccctcctgcagtgaattaattggatatatatcagctgacactgatagattgatatttctgatcgttatttttgtgtaataagcatggaaatgaactttatacacaccactgtgttgtcagagataaatattaggggttgtttttaaagcaaaaagaaaaaaacaaaaaccaaactattaaaatcctcctataaatattctttttctttacagtttttcaagcatgcaaaacagtttattgtaacttactgaaaaatattaacaattaattgtgaatacatgctgttaccagcttccttattcctaatacctggaaaatttttttttcaacggatagattttgatgtaaaaaagaccgaaattatcaaggtatcttagttgaaggacttgggaaatactatcaaaattaatttcttaggaaaaaatttaaaagtatatttaagtactctggatagactgaaacgtttccatgttatttctgcagttgtagacttaggcttatttgtaaagaagcatgctccattgactgccatctctagtcttgcagtgggtggtattaacccatagaaagcaagcagttgtgtatcacatagacaatggttatgatgtaaacagattcagttgttttgttgttcattcgtcatatgtttgtgatagggatgttgggagcacagctctattctgcctgctcagacttaagttagacccttatcttttatattatgtcatgaaaaaagtctcctaaaattgtgaaactagttcttgatgagtgatgtgatcatcagcaataaagatataataactctgttttcttagcctgtatagaggagaggaacttgcttggctttaaaatatatttatttgccatttaagtataaatatggaatctgtttcttattgggaagatagaatatatatattttcctttaaactttttaaggtcacttttaaataaccaaatttgatttatggtttttaacaaaggactaaagagctgaaaccaacctagttttgtttttgtgatataaactttaagtgtcgagggaccatgccagcaactaccaaaaatctcttaaatcttcaggtacagctggcattttggcagatgcatagagacatctgagaccctcagaaaggaaggataatccaagaatataggaaatctgtgttctcttcctttcattttatcccttatatttctaaagactaattataagtaatctgacattttaatgtagctactcttatttattttttctttctgaggtattaaaatatctggactgagttttgccaaatgttaaagggagaagagttactgaagactttgaacacttgctttttgtgattgcttatgtcattagtgcctcatgactgtgtttgatgtcctttattgatacaaagtgagcctgtgccttcattatcttgcccattttaatacaaatggaaacctggtgtttgaaaatctctgaactgtgtgggttttggaggaatatacctgaattttattcaataacagtttctggacaggaagaaaaatacagttacatatttataaa

SEQ ID NO: 7043 - DNA, 640 bp, Homo sapiens
  source 1..640: mol_type = unassigned DNA
agtgtcaggctgcccctaaggacagggaagtcctggggagaaagcgttttgcccagatgaacacgtgaactcaacattcgtgtgcatgcttccgctgggaagttatcaattccaaaccagatgaaagacccaggctcagccactgtattgcagaatcatggatgaatttcagcatatttcttcaagaaatgtctctttttaaacagcagagccctggcaagttttgtctcctggtctgtagtgtgtgcacattttttacgatcttgggaagttacattcctggggttatactcagctatctactgttactgtgtgcatttttgtgtccattgtttaaatgtaatgatattggacaaaaaatttacagcaaaattaagtcagttctgctgaaactggattttggaattggagaatatattaatcagaagaaacgtgagagatctgaagcagacaaagaaaaaagtcacaaagatgacagtgaattagacttttcagctctttgtcctaagattagcctcacggttgctgccaaagagttatctgtgtctgacacagacgtctcagaggtatcctggactgataatgggaccttcaacctttcagaaggatacactccacagacagacacttctgatgatct

SEQ ID NO: 7044 - DNA, 585 bp, Homo sapiens
  source 1..585: mol_type = unassigned DNA; mol_type = unassigned DNA
attgtttggccacattagccgtggttagcaggtgctgcagcctttgccactgttattatttttaaagggcagaaatgcctgaaggtgaagactttggaccaggcaaaagctgggaagttatcaattccaaaccagatgaaagacccaggctcagccactgtattgcagaatcatggatgaatttcagcatatttcttcaagaaatgtctctttttaaacagcagagccctggcaaggcaagttttccagtaaaggagtatgttttaaaatgttcagttacttggaaacaaatgaactaacctattttatcagcttgtcagatttctccaattttaaatataatatactaagaacatatgccataaaagctggtatcagcaaggttcagatgtgtgagtgtgcgaacactagataatcctcagcctcacattgtgaaattggattggttttacattttatatatatttatctagctcattagctaaaatgaatggtgattggtcttatcagcaagactagggagaaaacagtcttaagaatttcagttatcgtatttagcctggtgctgaagtcaaagggagatga

SEQ ID NO: 7045 - DNA, 807 bp, Homo sapiens
  source 1..807: mol_type = unassigned DNA; mol_type = unassigned DNA
ggcacccacacccaggcgcgcccgcgcgcgcgcccggccccgtccctgtctggaagcacagctgaagatggcgagcccggcgcctccggagcacgccgaggagggatgcccggctcctgccgccgaggagcaggcgccgccgtcgccgccaccgccccaggcatcccccgcagagcggcagcagcaggaggaggaagcgcaggaagctggggcggcggagggcgcggggttgcaggtggaggaggccgcgggccgggcggcggccgcggtaacctggctgctcggggagccggtgctgtggctgggctgccgcgccgacgagctgctgagctggaagaggccgctgcggagcctgctcggcttcgtcgctgccaacctgctgttctggtagacactcaccgcaactttcctccggacgcacgtccctgtgagcagttgtcgttctccgtgtgcggatccagcctcagatgcgaggtggtcggccgaccctcaggcacctgcacctacaggtgttcccatcgtgcttgaaaacttcgcccctgctttctaaaactctgaggtcttgacctgctcgcccaagcttgccggagcaaacgtgcttgaacgtgtcttggttcttgcagccccagcaggcatatctggaccagattaggtacccgttcaaaacggtgccgcattcatcagtcacctgagatgggccctgaatgatttgttttttccttcccctggagcgttaggtttactgtgtttactccctgatgagaaaacgggaggcaaacaagcaggtggagtatgcccagcacccac

SEQ ID NO: 7046 - DNA, 6962 bp, Homo sapiens
  source 1..6962: mol_type = unassigned DNA; mol_type = unassigned DNA
aacaccagctcgcaggtgctgcggactccccagtccgcccgccgccgccgccgccgcaactgttggcggccagagacggcgaaagaggagagagagggacccaggagcgcggcccccgggggagagagaggggagccctgcagtggagacaggtaatgagccaaaaagatcatgtctgaaatacaaggaacggttgagttttcggtagagctacataaattttataatgtggatctctttcagagagggtattaccagatccgagtgaccttgaaggtgtcttcaaggatcccccacagactgagtgcctccatcgctgggcagacagagagcagcagcctgcattcagcctgtgtccatgacagcaccgtgcacagccgggtctttcagatcttataccggaatgaagaggtacccataaatgatgctgtggtcttccgagttcatttactcttgggtggtgaaaggatggaagacgcactgagtgaagtagattttcaactcaaggtggatctgcactttacggacagtgaacagcagttgagggatgtggctggggcaccgatggtcagcagccgaacgcttggcctgcacttccacccccggaatggtctgcaccaccaggtcccggtcatgttcgactatttccacctgtctgtgatctcggtgaccgtccatgctgccctggtggctctgcagcagccattgatcagttttactcgtccaggaagaggctcctggcttggtaaaggtggcccagacaccggacaagaacagtctatcatttctctggaaaacttggtctttggagctgggtactgcaagccgacttcctcagagggaagcttctacatcacctctgagaactgcatgcagcacgcacacaagtggcaccgagacctgtgcctgttgctcctccacgcttaccggggtctccgtctccacttcctggtgatcatgcgggacatcccagagctgccacacacggagctggaggcccttgctgttgaagaaacactttctcagctgtgctcagagctacagatgttgaacaatccagagaagatcgctgagcagataagcaaggatctggcctggctcacgtcccacatgatgactctgtggacccagttcctggacacagtcactctgcactcccaagtgaccacttatctcacccaggaacaccacaccctgagggtccgaaggttttctgaggccttcttttacatggagcaccaaaaacttgcagtcctgacatttcaggagaatctgatacagacgcacagccagctgtccctggatatccggaactcggagtacctcactagcatgcccccgctgcctgcagagtgcctggacatcgacggcgattggaacaccctgccggtgatctttgaggacagatacgtggactgccctgcgacagggcataacttgagtgtttatcctaattttgatgttccagtgacaagtcctacaataatgaatctgaaagacaaggaagataactgtatggtaaatagcaatttatcttttagggaagaccttgtcttgtctaccataaaaccatcccaaatggattctgatgaagaagttataaggtgtccagagccaggtgagaatgtggccacacaaaatcatatggacatgtgctctgaatctcaggtgtatatatcaattggtgaatttcaaaacaaagcaggtgtgcctgaagatgaatgttggactggccaaacatctgatgctgggacatatccagtggcagatgtggatacttctagaaggagtccaggtccagaggatggacaggccccagtgctgacctacattgacgtaaaatctagcaataagaacccctccagagctgaacccctggtggccttcaatgctcagcatgagagtaggagctctagagataagtatggattagacaggactgggctaagcaaagtggtagtaggtggaagccaccaaaatgccatctcttcagacaaaacaactctccatgaattaagtactctaggaaagggaatagatcaagaggggaagatggtgctgctaagcttgaaactcaccccctctgagccctgtgatccactaagttctaccctgagggagcccttagatattaggtcttccctaaaggactctcacacagaagagcaggaggaactctcagtgctatccggggtcatcaagagatcttcatccatcatatctgattcaggcattgagagtgagccaagctccgtcgcctggtcagaggcccgaagcagggctctggagttgcccagtgatcgggaagtcttgcacccgtttgttcgaagacatgccctccaccggaactccctagagggtggacacacagaaagtaacacaagtttgccaagcggcatccaggcttctctcacctccattagctctttaccttttgaggaggatgagcgggaggtggcactcactaagttaaccaagtctgtatctgctccccacatcagtagcccagaggaggctgctgaagatgcggacaccaagcagcaagatggaggttttgctgaaccttcagatatgcacagcaagagccaaggttccccaggatcttgctctcaactttgtggtgactctggaacagatgctggagcagaccatcccctggtggagatagttttagatgctgacaaccagcagggccccggatacatagacatccccaaagggaaagggaagcagtttgatgctcaaggacactgtcttcctgatggcaggactgagaacactccaggtgttgaaaccaaaggtcttaatttaaaaataccacgcgtcatagcacttgaaaaccccaggaccagatctcttcatagagcacttgaggaaaccccaaagggcatgcctaaagacttgaatgtgggtcagcaagctctttccaacagtggcatctcagaggttgagggtctctctcaacatcaggtgcctgaattgagctgtacgtcagctgctgatgccatcaacaggaactcaacaggccagcaaagccaaagcggttcaccttgcattatggatgacacagcatttaatagaggagtgaatgccttcccggaggctaaacataaagcaggcactgtgtgccccactgtgacccattccgttcattcccaggttttgaaaaaccaagagctgaaggcaggcacttccatcatggggtcccatctgacttctgcagagacctttactctggacagcctgaaggctgtggaggttgtgaacttatctgtgtcttgcactgccacctgtctccctttctcatctgtgcccaaggagacccctgccagggctggattctcttccaaacagaccctgtttcccatcacccatcagcctttgggatcctttggagttgtttctacccattccagcacgttggatgaggaagtcagtgagaggatgtttagtttttatcaggccaaagaaaaatttaaaaaagaactgaagattgaaggatttctgtacagtgacttaactgtactagcttctgatataccatatttcccaccagaggaagaggaagaaaatttggaagatggaattcacctggttgtctgtgtccatggcctggatgggaacagtgcagacctccggctggtaaagactttcatagaactggggctccctggaggaaaactggacttcctaatgtctgaaaagaatcagatggacacatttgcagattttgatactatgacggatcggttattggatgaaatcattcaacacattcagttgtacaacctctccatatcccgaattagcttcattggccattctcttggcaacatcatcatccgatcggtcctcacacggccccggttccggtattacctcaacaaactccacacgttcctgtcactctctgggcctcacctgggaaccctgtacaacaacagcaccctggttagtacaggcttatggctcatgcagaaactgaagaaatccgggtctctactgcagctgaccttcagggataatgctgatttgcgcaaatgtttcctctaccaactaagccaaaaaacagggctgcagtattttaaaaacgtcgtgctggttgcttctccccaagaccgttatgtgccatttcattcagccaggattgaaatgtgtaaaactgccctcaaagacagacacacagggccagtttatgcagaaatgatcaacaacctcctgggccctctggttgaagccaaggactgcactttaatccgacacaacgtgttccacgccctgcccaacactgccaacaccctgatcggccgagccgctcacatcgctgtgctggattcagaactcttcctggagaagtttttcttggtggcaggactcaactacttcaagtagtggctttgagggagcaggtctttggtaatgcttacgatcggtggagagctttagctgagacctgcttttacagacctcaccatttcagaatgaagcttcaacagcattgggggacggaggctcgggtggaacctgacatgagaggtgcttttgttttggagattcgagaaagctgagcaaatagactaaatgacaacaaactttgcttgaatttgtatagttacctggagtgtcattcaagatgttttctaggaaaaatatgagagaataaacagaatacttgggagttggtgagctccccttgctagccactactggcttactgagagattactccaatttaactagacttgccgaatatgttactagcttatagctttatcatttctgattaagtgcacacaagcatttcagaactcaggttaatctctgtgcagcagtggaacatatttgtgtaaatagaatcctcaatagattcaaatgtgtcagttgttcaagaaaatgtgatgcccatattcatattctctcctcatgttttctaaacaagggagcaaggaatgtgttacaaatcccagttctatttcataacagcagtgagcagggtgacttaaggtaaagagggataaaggtgacactattggtaaatacaagtttgttacaaagaaacatgactctagggacatactgaactatgaatagttgctccacctacttccccagaattcttctatgcagagccctgatccacaaattattttagtgattgcttacatctttgtctgtagtagggaacactgagtgagactaacctagcagaagggggcactgagatgaatgcacacacgtgtgaagctcctgctgatacacttccaaagacatgctatgttagcatttgatgcaattgcaaaaaattaaatccattaaagtggccagctgcttctcctctccatggaaggaggaaaacatctaaatggaggagtgctggattaaaacctcaggggagctctaagaagggtgctggctatctttcaatagaaatgtcttcttgccttaggaaaataaagggctaggaaaggtcactgcgttgataaaaaccaatagacgacagggacaaaagtgagatcagataggaggagaacaaccagactgaagactcaacataagctgttattggtaagtgactcaaaggggagttttgaaaattaccaggatgtttaatagtcaggtctcaaagactgagtatgttgtatgggctaaagtaagcctaaagaatcatttcgttgtatggaagagatgaatgaacctggacagtagggataagtaagacaggagcctaatcttttggagatgaaagctcctgcttctgcaaaaatcccttctgaagtgtggaaacgcatctaggaccagggttctcaatacctagaccatgactctaggtcactgatgccatggtaacaaaaccaagtaaatctaagctcatttgagaattttagatcctcttatgttaacaatgtgactttgaaaaataaaagcagaccatgggaatgagtccagatgggcagctttgcaggagtgtagacatgtggtattcttttgaagaaagagagggtcgttgagggagagttgaatgtcttgcaaaggcagagttccacacaatggatttagggtttctcagtgagtcctttctaaatgcttgttatatcctggtcataatgcatatgggttcactgagtcctctggtcactttccactggggatttttatctgagctcccgagtcagagctgggcatagactctggttcttcatgaggagtgctgtatttgctctgtaacctgggagacatttgttccctagtcgtgcagcacatggtattgtgtttcctgacctaggcaagtgcccatgctcagtacagaaccataagttggtagcagcttctcctttctggccaaatgatgggccctgtccctctgatgagtgcatttcatgttgtgtttccaattttcatcagcaatgttcgtcattccctggtcctttgaaagactgtgtagcccgcggttatggagccgggatgaatctgatgatcatcatcttctccaataaccagatgccatttttaacttcaatatgctgtctggacatagtgagaactaatggcaataaacgtccagctgcatggtgcacctcttttttataggggtgctctgctgtctttgtaaaccctctctggcctctgagcatctattataattgtgtagaaagtacatctctatattgtaaataagagtgtcgagtgttgcgtgtcatgcctcatttgaaaaggcttttttatgtctctttctattgaaatatagatatcgaatatataaatatatatacataaaatatatataaatatatattatgtaaaacagggacattctattattgattgtaaaaattataaacaaaatgcctgccaagataatggtcttgtatgtcttcattctctgcgtaatttttgtttttgtttttatgatttgttgtttcccaaaatgagttagaaataaaaatgcccaatattgagattaa

SEQ ID NO: 7047 - DNA, 4734 bp, Homo sapiens
  source 1..4734: mol_type = unassigned DNA; mol_type = unassigned DNA
ggagctcttcacccagtgtagggtatggtttgtgaaggtatccctagagaaggtgactctgcggctgagcttgaaggaagagaattggtaggtgacaaagaagaggtaatgagccaaaaagatcatgtctgaaatacaaggaacggttgagttttcggtagagctacataaattttataatgtggatctctttcagagagggatgcagtctgaatttggcatttcacgtgcaggtgatatcagtaaatcctcatgatagacttacctccaaggctcattgtattaccagatccgagtgaccttgaaggtgtcttcaaggatcccccacagactgagtgcctccatcgctgggcagacagagagcagcagcctgcattcagcctgtgtccatgacagcaccgtgcacagccgggtctttcagatcttataccggaatgaagaggtacccataaatgatgctgtggtcttccgagttcatttactcttgggtggtgaaaggatggaagacgcactgagtgaagtagattttcaactcaaggtggatctgcactttacggacagtgaacagcagttgagggatgtggctggggcaccgatggtcagcagccgaacgcttggcctgcacttccacccccggaatggtctgcaccaccaggtcccggtcatgttcgactatttccacctgtctgtgatctcggtgaccgtccatgctgccctggtggctctgcagcagccattgatcagttttactcgtccaggaagaggctcctggcttggtaaaggtggcccagacaccggacaagaacagtctatcatttctctggaaaacttggtctttggagctgggtactgcaagccgacttcctcagagggaagcttctacatcacctctgagaactgcatgcagcacgcacacaagtggcaccgagacctgtgcctgttgctcctccacgcttaccggggtctccgtctccacttcctggtgatcatgcgggacatcccagagctgccacacacggagctggaggcccttgctgttgaagaaacactttctcagctgtgctcagagctacagatgttgaacaatccagagaagatcgctgagcagataagcaaggatctggcctggctcacgtcccacatgatgactctgtggacccagttcctggacacagtcactctgcactcccaagtgaccacttatctcacccaggaacaccacaccctgagggtccgaaggttttctgaggccttcttttacatggagcaccaaaaacttgcagtcctgacatttcaggagaatctgatacagacgcacagccagctgtccctggatatccggaactcggagtacctcactagcatgcccccgctgcctgcagagtgcctggacatcgacggcgattggaacaccctgccggtgatctttgaggacagatacgtggactgccctgcgacagggcataacttgagtgtttatcctaattttgatgttccagtgacaagtcctacaataatgaatctgaaagacaaggaagataactgtatggtaaatagcaatttatcttttagggaagaccttgtcttgtctaccataaaaccatcccaaatggattctgatgaagaagttataaggtgtccagagccaggtgagaatgtggccacacaaaatcatatggacatgtgctctgaatctcaggtgtatatatcaattggtgaatttcaaaacaaagcaggtgtgcctgaagatgaatgttggactggccaaacatctgatgctgggacatatccagtggcagatgtggatacttctagaaggagtccaggtccagaggatggacaggccccagtgctgacctacattgacgtaaaatctagcaataagaacccctccagagctgaacccctggtggccttcaatgctcagcatgagagtaggagctctagagataagtatggattagacaggactgggctaagcaaagtggtagtaggtggaagccaccaaaatgccatctcttcagacaaaacaactctccatgaattaagtactctaggaaagggaatagatcaagaggggaagatggtgctgctaagcttgaaactcaccccctctgagccctgtgatccactaagttctaccctgagggagcccttagatattaggtcttccctaaaggactctcacacagaagagcaggaggaactctcagtgctatccggggtcatcaagagatcttcatccatcatatctgattcaggcattgagagtgagccaagctccgtcgcctggtcagaggcccgaagcagggctctggagttgcccagtgatcgggaagtcttgcacccgtttgttcgaagacatgccctccaccggaactccctagagggtggacacacagaaagtaacacaagtttgccaagcggcatccaggcttctctcacctccattagctctttaccttttgaggaggatgagcgggaggtggcactcactaagttaaccaagtctgtatctgctccccacatcagtagcccagaggaggctgctgaagatgcggacaccaagcagcaagatggaggttttgctgaaccttcagatatgcacagcaagagccaaggttccccaggatcttgctctcaactttgtggtgactctggaacagatgctggagcagaccatcccctggtggagatagttttagatgctgacaaccagcagggccccggatacatagacatccccaaagggaaagggaagcagtttgatgctcaaggacactgtcttcctgatggcaggactgagaacactccaggtgttgaaaccaaaggtcttaatttaaaaataccacgcgtcatagcacttgaaaaccccaggaccagatctcttcatagagcacttgaggaaaccccaaagggcatgcctaaagacttgaatgtgggtcagcaagctctttccaacagtggcatctcagaggttgagggtctctctcaacatcaggtgcctgaattgagctgtacgtcagctgctgatgccatcaacaggaactcaacaggccagcaaagccaaagcggttcaccttgcattatggatgacacagcatttaatagaggagtgaatgccttcccggaggctaaacataaagcaggcactgtgtgccccactgtgacccattccgttcattcccaggttttgaaaaaccaagagctgaaggcaggcacttccatcatggggtcccatctgacttctgcagagacctttactctggacagcctgaaggctgtggaggttgtgaacttatctgtgtcttgcactgccacctgtctccctttctcatctgtgcccaaggagacccctgccagggctggattctcttccaaacagaccctgtttcccatcacccatcagcctttgggatcctttggagttgtttctacccattccagcacgttggatgaggaagtcagtgagaggatgtttagtttttatcaggccaaagaaaaatttaaaaaagaactgaagattgaaggatttctgtacagtgacttaactgtactagcttctgatataccatatttcccaccagaggaagaggaagaaaatttggaagatggaattcacctggttgtctgtgtccatggcctggatgggaacagtgcagacctccggctggtaaagactttcatagaactggggctccctggaggaaaactggacttcctaatgtctgaaaagaatcagatggacacatttgcagattttgatactatgacggatcggttattggatgaaatcattcaacacattcagttgtacaacctctccatatcccgaattagcttcattggccattctcttggcaacatcatcatccgatcggtcctcacacggccccggttccggtattacctcaacaaactccacacgttcctgtcactctctgggcctcacctgggaaccctgtacaacaacagcaccctggttagtacaggcttatggctcatgcagaaactgaagaaatccgggtctctactgcagctgaccttcagggataatgctgatttgcgcaaatgtttcctctaccaactaagccaaaaaacagggctgcagtattttaaaaacgtcgtgctggttgcttctccccaagaccgttatgtgccatttcattcagccaggattgaaatgtgtaaaactgccctcaaagacagacacacagggccagtttatgcagaaatgatcaacaacctcctgggccctctggttgaagccaaggactgcactttaatccgacacaacgtgttccacgccctgcccaacactgccaacaccctgatcggccgagccgctcacatcgctgtgctggattcagaactcttcctggagaagtttttcttggtggcaggactcaactacttcaagtagtggctttgagggagcaggtctttggtaatgcttacgatcggtggagagctttagctgagacctgcttttacagacctcaccatttcagaatgaagcttcaacagcattgggggacggaggctcgggtggaacctgacatgagaggtgcttttgttttggagattcgagaaagctgagcaaatagactaaatgacaacaaactttgcttgaatttgtatagttacctggagtgtcattcaagatgttttctaggaaaaatatgagagaataaacagaatacttgggagttggtgagctccccttgctagcca

SEQ ID NO: 7048 - DNA, 4288 bp, Homo sapiens
  source 1..4288: mol_type = unassigned DNA; mol_type = unassigned DNA
aacaccagctcgcaggtgctgcggactccccagtccgcccgccgccgccgccgccgcaactgttggcggccagagacggcgaaagaggagagagagggacccaggagcgcggcccccgggggagagagaggggagccctgcagtggagacaggtaatgagccaaaaagatcatgtctgaaatacaaggaacggttgagttttcggtagagctacataaattttataatgtggatctctttcagagagggtattaccagatccgagtgaccttgaaggtgtcttcaaggatcccccacagactgagtgcctccatcgctgggcagacagagagcagcagcctgcattcagcctgtgtccatgacagcaccgtgcacagccgggtctttcagatcttataccggaatgaagaggtacccataaatgatgctgtggtcttccgagttcatttactcttgggtggtgaaaggatggaagacgcactgagtgaagtagattttcaactcaaggtggatctgcactttacggacagtgaacagcagttgagggatgtggctggggcaccgatggtcagcagccgaacgcttggcctgcacttccacccccggaatggtctgcaccaccaggtcccggtcatgttcgactatttccacctgtctgtgatctcggtgaccgtccatgctgccctggtggctctgcagcagccattgatcagttttactcgtccaggaagaggctcctggcttggtaaaggtggcccagacaccggacaagaacagtctatcatttctctggaaaacttggtctttggagctgggtactgcaagccgacttcctcagagggaagcttctacatcacctctgagaactgcatgcagcacgcacacaagtggcaccgagacctgtgcctgttgctcctccacgcttaccggggtctccgtctccacttcctggtgatcatgcgggacatcccagagctgccacacacggagctggaggcccttgctgttgaagaaacactttctcagctgtgctcagagctacagatgttgaacaatccagagaagatcgctgagcagataagcaaggatctggcctggctcacgtcccacatgatgactctgtggacccagttcctggacacagtcactctgcactcccaagtgaccacttatctcacccaggaacaccacaccctgagggtccgaaggttttctgaggccttcttttacatggagcaccaaaaacttgcagtcctgacatttcaggagaatctgatacagacgcacagccagctgtccctggatatccggaactcggagtacctcactagcatgcccccgctgcctgcagagtgcctggacatcgacggcgattggaacaccctgccggtgatctttgaggacagatacgtggactgccctgcgacagggcataacttgagtgtttatcctaattttgatgttccagtgacaagtcctacaataatgaatctgaaagacaaggaagataactgtatggtaaatagcaatttatcttttagggaagaccttgtcttgtctaccataaaaccatcccaaatggattctgatgaagaagttataaggtgtccagagccaggtgagaatgtggccacacaaaatcatatggacatgtgctctgaatctcaggtgtatatatcaattggtgaatttcaaaacaaagcaggtgtgcctgaagatgaatgttggactggccaaacatctgatgctgggacatatccagtggcagatgtggatacttctagaaggagtccaggtccagaggatggacaggccccagtgctgacctacattgacgtaaaatctagcaataagaacccctccagagctgaacccctggtggccttcaatgctcagcatgagagtaggagctctagagataagtatggattagacaggactgggctaagcaaagtggtagtaggtggaagccaccaaaatgccatctcttcagacaaaacaactctccatgaattaagtactctaggaaagggaatagatcaagaggggaagatggtgctgctaagcttgaaactcaccccctctgagccctgtgatccactaagttctaccctgagggagcccttagatattaggtcttccctaaaggactctcacacagaagagcaggaggaactctcagtgctatccggggtcatcaagagatcttcatccatcatatctgattcaggcattgagagtgagccaagctccgtcgcctggtcagaggcccgaagcagggctctggagttgcccagtgatcgggaagtcttgcacccgtttgttcgaagacatgccctccaccggaactccctagagggtggacacacagaaagtaacacaagtttgccaagcggcatccaggcttctctcacctccattagctctttaccttttgaggaggatgagcgggaggtggcactcactaagttaaccaagtctgtatctgctccccacatcagtagcccagaggaggctgctgaagatgcggacaccaagcagcaagatggaggttttgctgaaccttcagatatgcacagcaagagccaaggttccccaggatcttgctctcaactttgtggtgactctggaacagatgctggagcagaccatcccctggtggagatagttttagatgctgacaaccagcagggccccggatacatagacatccccaaagggaaagggaagcagtttgatgctcaaggacactgtcttcctgatggcaggactgagaacactccaggtgttgaaaccaaaggtcttaatttaaaaataccacgcgtcatagcacttgaaaaccccaggaccagatctcttcatagagcacttgaggaaaccccaaagggcatgcctaaagacttgaatgtgggtcagcaagctctttccaacagtggcatctcagaggttgagggtctctctcaacatcaggtgcctgaattgagctgtacgtcagctgctgatgccatcaacaggaactcaacaggccagcaaagccaaagcggttcaccttgcattatggatgacacagcatttaatagaggagtgaatgccttcccggaggctaaacataaagcaggcactgtgtgccccactgtgacccattccgttcattcccaggttttgaaaaaccaagagctgaaggcaggcacttccatcatggggtcccatctgacttctgcagagacctttactctggacagcctgaaggctgtggaggttgtgaacttatctgtgtcttgcactgccacctgtctccctttctcatctgtgcccaaggagacccctgccagggctggattctcttccaaacagaccctgtttcccatcacccatcagcctttgggatcctttggagttgtttctacccattccagcacgttggatgaggaagtcagtgagaggatgtttagaggaagaggaagaaaatttggaagatggaattcacctggttgtctgtgtccatggcctggatgggaacagtgcagacctccggctggtaaagactttcatagaactggggctccctggaggaaaactggacttcctaatgtctgaaaagaatcagatggacacatttgcagattttgatactatgacggatcggttattggatgaaatcattcaacacattcagttgtacaacctctccatatcccgaattagcttcattggccattctcttggcaacatcatcatccgatcggtcctcacacggccccggttccggtattacctcaacaaactccacacgttcctgtcactctctgggcctcacctgggaaccctgtacaacaacagcaccctggttagtacaggcttatggctcatgcagaaactgaagaaatccgggtctctactgcagctgaccttcagggataatgctgatttgcgcaaatgtttcctctaccaactaagccaaaaaacagggctgcagtattttaaaaacgtcgtgctggttgcttctccccaagaccgttatgtgccatttcattcagccaggattgaaatgtgtaaaactgccctcaaagacagacacacagggccagtttatgcagaaatgatcaacaacctcctgggccctctggttgaagccaaggactgcactttaatccgacacaacgtgttccacgccctgcccaacactgccaacaccctgatcggccgagccgctcacatcgctgtgctggattcagaactcttcctggagaagtttttcttggtggcaggactcaactacttcaagtag

SEQ ID NO: 7049 - DNA, 1616 bp, Homo sapiens
  source 1..1616: mol_type = unassigned DNA; mol_type = unassigned DNA
gagccaagctccgtcgcctggtcagaggcccgaagcagggctctggagttgcccagtgatcgggaagtcttgcacccgtttgttcgaagacatgccctccaccggaactccctagagggtggacacacagaaagtaacacaagtttgccaagcggcatccaggcttctctcacctccattagctctttaccttttgaggaggatgagcgggaggtggcactcactaagttaaccaagtctgtatctgctccccacatcagtagcccagaggaggctgctgaagatgcggacaccaagcagcaagatggaggttttgctgaaccttcagatatgcacagcaagagccaaggttccccaggatcttgctctcaactttgtggtgactctggaacagatgctggagcagaccatcccctggtggagatagttttagatgctgacaaccagcagggccccggatacatagacatccccaaagggaaagggaagcagtttgatgctcaaggacactgtcttcctgatggcaggactgagaacactccaggtgttgaaaccaaaggtcttaatttaaaaataccacgcgtcatagcacttgaaaaccccaggaccagatctcttcatagagcacttgaggaaaccccaaagggcatgcctaaagacttgaatgtgggtcagcaagctctttccaacagtggcatctcagaggttgagggtctctctcaacatcaggtgcctgaattgagctgtacgtcagctgctgatgccatcaacaggaactcaacaggccagcaaagccaaagcggttcaccttgcattatggatgacacagcatttaatagaggagtgaatgccttcccggaggctaaacataaagcaggcactgtgtgccccactgtgacccattccgttcattcccaggttttgaaaaaccaagagctgaaggcaggcacttccatcatggggtcccatctgacttctgcagagacctttactctggacagcctgaaggctgtggaggttgtgaacttatctgtgtcttgcactgccacctgtctccctttctcatctgtgcccaaggagacccctgccagggctggattctcttccaaacagaccctgtttcccatcacccatcagcctttgggatcctttggagttgtttctacccattccagcacgttggatgaggaagtcagtgagaggatgtttagaggaagaggaagaaaatttggaagatggaattcacctggttgtctgtgtccatggcctggatgggaacagtgcagacctccggctggtaaagactttcatagaactggggctccctggaggaaaactggacttcctaatgtctgaaaagaatcagatggacacatttgcagattttgatactatgacggatcggttattggatgaaatcattcaacacattcagttgtacaacctctccatatcccgaattaggtaaaaggaaaccacaggtagttaatgctgggggaagaggggggacatttttgagtgtttgctgtataaaagcaataatatgatgccttctgtataccactgagctaagctaacttgtgacttttaataaattacttttaaagcagaagtaa

SEQ ID NO: 7050 - DNA, 585 bp, Homo sapiens
  source 1..585: mol_type = unassigned DNA; mol_type = unassigned DNA
agcatgttccctgggggctcaagtcagctttgccactcagcaggcactttgcttgtgggtgctcagcccttctacataccagcccagctcatttcctgttcaacatgaagtacacagcttggcttgtgattaattagtgtattctccagtttttatcaggccaaagaaaaatttaaaaaagaactgaagattgaaggatttctgtacagtgacttaactgtactagcttctgatataccatatttcccaccagaggaagaggaagaaaatttggaagatggaattcacctggttgtctgtgtccatggcctggatgggaacagtgcagacctccggctggtaaagactttcatagaactggggctccctggaggaaaactggacttcctaatgtctgaaaagaatcaggctggagtgcaatggtgcgatctcagctcactgcgacctccacctcctgggttcaggcgattctcctgcctcagcctcctgaactacagatggacacatttgcagattttgatactatgacggatcggttattggatgaaatcattcaacacattcagttgtacaacctctccatat

SEQ ID NO: 7051 - DNA, 558 bp, Homo sapiens
  source 1..558: mol_type = unassigned DNA; mol_type = unassigned DNA
agaggtgctttctctctggacagttttatgaatacataaggaggttctgtccccactcccttcgcaaccgcatcttattggtaatgagccaaaaagatcatgtctgaaatacaaggaacggttgagttttcggtagagctacataaattttataatgtggatctctttcagagagggtattaccagatccgagtgaccttgaaggtgtcttcaaggatcccccacagactgagtgcctccatcgctgggcagacagagagcagcagcctgcattcagcctgtgtccatgacagcaccgtgcacagccgggtctttcagatcttataccggaatgaagaggtacccataaatgatgctgtggtcttccgagttcatttactcttgggtggtgaaaggatggaagacgcactgagtgaagtagattttcaactcaaggtggatctgcactttacggacagtgaacagcagttgagggatgtggctggggcaccgatggtcagcagccgaacgcttggcctgcacttccacccccggaatggtctgcaccaccaggtcccg

SEQ ID NO: 7052 - DNA, 547 bp, Homo sapiens
  source 1..547: mol_type = unassigned DNA; mol_type = unassigned DNA
gatttgggagccaaaggaaggagctcttcacccagtgtagggtatggtttgtgaaggtatccctagagaaggtgactctgcggctgagcttgaaggaagagaattggtaggtgacaaagaagaggtaatgagccaaaaagatcatgtctgaaatacaaggaacggttgagttttcggtagagctacataaattttataatgtggatctctttcagagaggaatctattaaatgtccatgaggtgatatttgtaaagcacctagtaaaatagaggcccaggttttacagtacaagccaagaggacccaagccctctatggactactccattgattgtaattgagactctgaaccaaacatcctcagctggtcagtgccagggctagaacagactgtcgatctggtcaagctctgaatgtatgttcctctctacattttatgcaggtattaccagatccgagtgaccttgaaggtgtcttcaaggatcccccacagactgagtgcctccatcgctgggcagacagagagcagcagcctgcattcagcct

SEQ ID NO: 7053 - DNA, 684 bp, Homo sapiens
  source 1..684: mol_type = unassigned DNA; mol_type = unassigned DNA
attgaatcaatacagcctgtgtttctcatgatcgcctggtccttgagactgttgataaggcattagagagcttcatggttgttgataatctgaggaacgccctctctagtgacagactgtcacggacatggaggattttttgaagtgccttttcaattttatgagttgaggatcctgcagccctggagatttataattgtccctgccactgctgctttgtgccttcttctagtttctgccttgtttatctggttttcttcccccatagtattttggcaattgtgaaaagtggttctggagaagtaccaacaaatgctcttactgcccgagaactgacacttttggaggctactgatgtttacggcaaaatagcctgagtcctttaatgtccttctttgattgttctaccagctacgattcctgcaaatccctgtcattcttcatcacaaagttatagaggtaatgagccaaaaagatcatgtctgaaatacaaggaacggttgagttttcggtagagctacataaattttataatgtggatctctttcagagagggtattaccagatccgagtgaccttgaaggtgtcttcaaggatcccccacagactgagtgcctccatcgctgggcagacagaggttctaaatatacatatgtcagaacaagaaccagcacaaggtaagta

SEQ ID NO: 7054 - DNA, 378 bp, Homo sapiens
  source 1..378: mol_type = unassigned DNA; mol_type = unassigned DNA
gtagggtatggtttgtgaaggtatccctagagaaggtgactctgcggctgagcttgaaggaagagaattggtaggtgacaaagaagaggaatataacacattcctgtcattaagagaagctgctgacttgaaatgggagttcagtaatggcagtgagaggagatgaagtaacaccgttggaggaggtcagagcacagggtgccttaaaaacaagccacagcatttggactttattctccttatttatgccatcctgtttatcagtattgatctgcagcactccaaggtccaagggacaaaggcaaggaaatctccaacctctcagaatatgagaagatactatagtaaatatgtcaataaattttattctacaacagc

SEQ ID NO: 7055 - DNA, 5067 bp, Homo sapiens
  source 1..5067: mol_type = unassigned DNA; mol_type = unassigned DNA
aagagggatctgtggtgatttgggagccaaaggaaggagctcttcacccagtgtagggtatggtttgtgaaggtatccctagagaaggtgactctgcggctgagcttgaaggaagagaattggtaggtgacaaagaagaggtccactcatatgatcgaatttgaatcaaggtctcaagctaatctaaggaaaaaaaaaaagcagagaagctatatggcagaaagcagagaattggaagggaagtcacaaaagaagagaacatacttgcaggcattgtttcaggtagtgagtgaaatctgcaaacaaacagaaattctttctctcgtggaatgtatgtactaactggagaaagcattgtttaaaaaataagcaaataggatgtcaggctgtgttcaagagagtgtatttagttcttcacacaatagtgatgctgatggataaagatttccagtttggtctcaatccaataaaacacccccattcaaagtgtcattgtcccactctttccaactgatgccctaaagctcacagaagagacttgttgggtgtgcaaatttggctttcctcataattctgcaacctgcataagaaagttttagttctgattttcagccttatcttccctgtgactacatgaaataagagattattttagggctaccccagaaacaaacttgttctctcatcagagctgagttgatagacagtctgaaggctagatcttgttattttcctctgtttactctccagtgctgtaaaaaatatccatcccagcatgcttgtattcatcattaacattgtagccacgtggagcagccactcggtcatccaaggcacttgctagagtgagcacttcctccactgaggctggagggtctacgatgacttcactcacatgtgtgggggtcttggtgcaggcgctaactgttcctctctttctttaaggtctgtgtttagtattctagtgtaggctttgttacatagtggcaggaacactccaaaatagcaaagtagaaggctcaggaactcacacagtttcacttctgcatattcagttaccacccagaccaaggggcatggaaattggctctacctcttgagttgcatgtcatgaaatatcatagccactttttcaatcaattagaggaagcctacagtatgagtatatctcagaaatgtgatagattttaaattgatcttgcctttctaaagatgtttcccatctatactctgtgagagacacctctaaaatatctcatgtcaaaaaagtattgggtaaggtgtccagtaacctaggtttgtggtctggctctggaactgatttatgttatcttgtaatgatagcaatgatgatgattttggtgatgacggtgatggtgattttattagatatgatttagacaatgcagttagtactttcatgtgcattattataaatatttaaattctaattttaccttttttggacttttgtatgtattatctgttaaatataaagcccatattttacttttgtcctagatatttgtcactatcttgcacccatttctccctcctaatagcacccagacattcctctagatgaattgtctcttgaatgtatgctcttggttgaaagtaaccccagaaatatgccttcttctggggtggcttaagggttcctgagacatttatttgcaagagcatagccaaaagctggggcgatgaccttaatatggccaggaagctacctctcacctggaactttaagtcttaactgagatgagtcaacacaaaagaaaacattatagttcctgcagcccagtggtgggaacctggtgagcttgtcaagttctcactgatgagactggcaagaacaccctgatagctcttagttcttagccttgttcatcacactatcttccctatgatcctcgcacctgcactccagttctccagtgggtccattcttgcacaggtaagccaggattagtgttggcatcccaggaaccatgactgcttcagttatctattgaattactttagaagtacctggagtgatggaaagtgcttggccaaagtttacaaagccctgtagccaataactggttccaaatttcaggtctgccttttctgctcacatttcaacattggacagtcaaactttctaagcacgaatttcttcagttgtaacatgggacacaataatacatccctagcagaggggttaggattaaattagagagcagctgtgaagcacctgggagagcttctggcacacagtaacagtggaaagttctggcactacagtagaaagttctttccctttctgttaatgttaatgcttcatccccattcacagagactggagtatcccttgactactccagtcaaagggaaacccaacatgacatgttccctccccctaggaaatgtcctcctctgatgttatgaggtcggcctatgaagctttaccttggagtttgaagatgagactggtgtttgtaacccatgaggactactgaggtcacatggtgtagtggaatgagaatgggatttgggatcaggcaggtctgaattcatacctaatgatgacatatgtgattagctgcttaatcttgaacgtcatttattgtcctatgtgctatgattctctcatattgaccacacagggccattatgaaatgataattggtaatttacatgcaggttctttgtaacctagaagaatattatctttgtactggagcctcctcaaagattttcaggtatatacacaccagaaactttgccttgtacagctcctggtggataaatgaaggccttcaaatgggcaggaaataatccaatttccatgaaagttaattgagctctgtgttttctaaaggctaatagcctggtgagagatgtcctgagtcaagctaatgtgatgacccacttgtttttttaggtaccagttatggaacagaagccacatctgtcactgataacctgtttgtatagtgacctcttccaccccacccacaaggttgccatggcaattttaggtcaagaagatcatcccattgaaagacaggaaatgctaaggagtaaaatgcagtccccaggaaacctggttttagtccttgctacatattattaaatggctggtccagtatctggttgggactactgtgccaggcatcatcctcaggtgatgtctgatcatcctggcctgtctttggcaagaatccagttcagtgggttttgccagaatccttttacttctgaggttttctcttagttgttttccatcctctgatccctctcttgttccttggttatatatttccccttgcttgtgctgtattcaaaattgaacccagttttatattgaagcatcttttctcctgtttcaataatccagaatagagtctgtttctaccactttaactactgcctagctctgtttttttctttgatagagctcagaagtgcaattcaaatttgatttgtagatgtagcagcaatcaagatttagctggtatttgaagacactcatattatcactctttctactaccctttattatattttttgattctgccccacattatttttgctaaggaaggagagttccaggaactctcatggagtacttgagacatggctcttcaatagccacccggcaccttctcttagataagaggtgtgaaattataggagctccttctcgcttgagagccccttgagtaataattatttaaaaaaagctgttataataaaactttgcatttaaattgcctcttattcttaggatgtcaaagtgctttacaaacatgaattgctagaaaccttttaggttaattaaaatgagcaggtttcccagacaaagaaggtgactgtttttgtactctcgggtgtttttacaggtgagcgaattgaagcacaaataagttctttgactaatcaaatagagatgttctgagaacaggtgatttcagcattagcacatcaaccatgctaccaaatttcattgcccttcggaattataatgacaataatgtagtgattcctgaattctggtattcttaataagaatatttgtgctactatttactgaatggctgcagtaagccatgcattatgcctggcactgggtttgtggtagtgtgttgtgttctcacaatgccactgtgaaataagtcttatcttcactttatgctgctgtaagataggatttatcctcactttacagccctggacactcagtttgaaagcagctgagccacttgtcacgggtcctgcagctaggaaatggcagagtgtattagtccatattcacactgctatgaagaactgcctgagacggggtaatttataaagaaaataagtttaattgattcacagttcagcatggctggggaggcctcaggaagcttacaatcatgacataaggggaaggagaaacaaggcaccttcttcacaaggcggcaggaaggagaggtatcgagtgaagggggaagagccccttataaaaccatcagatcccatgagaactcactcattaccacaagaacagcatgagagtaactgcccccatgatccaattacctcccaccaggttccttccatgacaggtggggattatggggattataattcaagatgagttttgggtagggacacaaagcctaactatatcacagagctagggttttaacccatgtttgtttgattgctgtgtctatattcttcttctctaccaatatcattaccaaacgttattactttattcttctctatttctaaacccctgaggaatataacacattcctgtcattaagagaagctgctgacttgaaatgggagttcagtaatggcagtgagaggagatgaagtaacaccgttggaggaggtcagagcacagggtgccttaaaaacaagccacagcatttggactttattctccttatttatgccatcctgtttatcagtattgatctgcagcactccaaggtccaagggacaaaggcaaggaaatctccaacctctcagaatatgagaagatactatagtaaatatgtcaataaattttattctacaaca

SEQ ID NO: 7056 - DNA, 427 bp, Homo sapiens
  source 1..427: mol_type = unassigned DNA; mol_type = unassigned DNA
aaaggaaggagctcttcacccagtgtagggtatggtttgtgaaggtatccctagagaaggtgactctgcggctgagcttgaaggaagagaattggtaggtgacaaagaagagattgaagacgactgattgacagagcctgagtcaaatgctaatgagcccttgctgagtaaggaatgagaaggatgtttggtgtcccaaagaccataaaactcaacaataagaaaataaccaaccacattaaaaagtgagccagaaattataacagacacttcaccaaagaaaatgtagatggcaaataaccatatgaaaagaagctccatatcatagtttatcagataaatgtaaatgaaaacagcaatgagataccaccacacacctatcagaatgaccaaaatccagaacatcaacaccaccaaatgctggcaa

SEQ ID NO: 7057 - DNA, 4094 bp, Homo sapiens
  source 1..4094: mol_type = unassigned DNA; mol_type = unassigned DNA
aaaggagcagcgccgagaattcaccggagctcggggaggcgaggcgggagccctgagctgaggccgggcagcgcggacccgcgcaggaggaggcggcggggacaccggcgagtccccagcagggcccctgggctcccggaagggtctccagccacctgcccttcccgagaagagagagctctgggccttcttcctgccagtctggtcttcgagtgcgttcaggacagatagaccttggcacaggctgccccgagattcctgcgacgctgtctgttcctgccttctgtggagcatggcacccacaggcttccaggacggatcatagacccgagcctccaggagggcgccctgtgcggctcactgcgcggtccctctcagctcccctgccacccagcctctgaggccggctcctgtcccggaaatgccctcgggcacctggatgaggccatcccagagcgggacccaactgtgccacccaccaagcctccccctgcgccccccgtgccctcgcatgtccggctgccagggcagactgtagaatgtctgtgccccagatccacgtggaagaagtgggtgcagaagagggggcgggagcagccgcaccacccgatgaccacctccggagcctgaaggccctcaccgagaaactgaggctggagacccgcaggccctcctacctggaatggcaggccaggctggaggagcatacctggcccttcccgaggccggctgcggagccacaggcgagcttggaggagggggagcgtggggggcaggagcccttgctccccctgagagaggctgggcagcaccccccttctgccaggagtgccagccaaggtgccagacccctgtccactggcaagctggaaggctttcagagcatcgatgaagctatagcctggctcaggaaggaactgacggagatgcggctgcaggaccagcaactggccagacagctcatgcgcctgcgtggcgacatcaacaagctgaaaatcgaacacacctgccgcctccacaggaggatgctcaacgatgccacctacgagctggaggagcgggatgagctggccgacctcttctgtgactcccctcttgcctcctccttcagcctctccacaccactcaagcttattggcgtgaccaagatgaacatcaactctcggaggttctctctctgctgaggagccctcagactgggcggaggggctggagcggagggcttgggctggaggggtgtcagaggaagctgaggccaagttactccagtgggtctcccggaggcaggggtccctgggactggcgactcaagggccccaggacctattcagtggtgctctcccacccaggggccctgggtgtggatgccagtgtctctgtgactggctcttgcttactacccaaagagctctgcagaagggccgctccaaccaagatgttaaaggagacctgggttcccaccataatccatccctccacggtcacgttcctgtttcctggaatcactggtgctatgaactgggattcccaaagggaggccccccaacaaagctgtcatttttgcagaaggctgtcccgcaagggccttgggggaaattaggcatgtcagatgtgcctgtctcacgtgctgttgctgtcctctaagtattgtctcaaattcaccctaagtacatgactcagcaacattgacagggagctactaggaagggaaaatcgaaaggcatgacaaatgggcacttggggacgcagccccagtggctggcagccagtgtctctggtgagcctgacactataaggctgtgtaaattgtaaattctggcgtgtgctgggacatgtgatgggggcactagcgtagcttgggtgcaacaagcacagatgtccccattgtctcccctggccacatgcatctccaaagagcctcttcactgccacccacaccccagggtgacagcctgggagaccactggtgactgaaccaggcaggtcctgaaagcattttccataactgaattctcctgcaggggcgtgaccggggcctcctggtggattctggtggtgtcaccttactgccctctctggaaagacaatctagggagcccagaggcccatcctgagcctcctctgagattttgtgcctgacctaaacaactagttttaataagactgttactgatgtgttgttcacttgttagtaactgatttttgtccaaatgcggaagccacttgtgtaggtcaactacagtgcgtaggatttgattttaagagtttctccctcccaacaggcttgaggatcagcaagttaagaccccagcaggttagggaggtcagtctggggtcatacggcatggcaggggtccctcggccagacccgtagaatcctgagataaggagtgtttctgacctttggtgtcatctagtcgagtcctctcattagtaaaggagcaaagtgaaacctgggggaggagaaggacttccctcaggttgcacagctgtttaggctatagaatattgatgtgtgaaaccattattgataatgcctagtagatcacatgtcaatgaacttgaaccccaaagatggtcgtgatgctttgccaaacccgcacactgccaacccctctactctccacctcagcccccacccacatctcccagagtattgcaattcagaacatttgggtcaaggtggagcaaggcactgacagtggccccacagggcatgtgtcactaatcactgtcccatggtctacgcacggcatctggctgctctgtctactgtgacttcttcctgtgtaatctcagtggggcccgtgtccacccacacatcgtgacccacataggggagaggttgcttttcttttgtgggctgagagtaggacaatgcaaatgaatgatctctagtagacagaaaagaacttggtctcttttttaaaatttcaaagagccagaagttctatgcctccttcaaagtaggcagaacaacgcagccaagatctactgtctgccatgctctgtgcaatgaagtctgcaggcctgaggaccatgtactgctgtccttcctcagagctctgcacaaacactgccaagtcctgaagacgcattcctttcctgccaacctctttccagataagcccttgaggtctcgggctgacctacacacacacacacacacacacacacacacacccccacacacacacacacgacagagaacatgccataaacatccttgaacccatgcaggaaagcccatcccatattctgaaaaaatgccaaattaggtttttctttctttttggaaatcagtcattacagtaaccgaaaccattgggttcagcgaaaatggaaagatttagctgaatgtagtcagtccaattaagttggatgcaactgagtgatttagttgcttgggtaacccagtgcttgcttgctttcttcattctctgggtggaaactaagatcaagacacatgtttggggataagttaaatgtctgagctattttgctcggtttatcctaagagaactttattatgggatgaggaggtgacccaagatgagaagtggagggggacagcgatgttttctaaacatcgtccagtgttgactggcttccttactttgcacagtgaacacaactaaccacattaattcagctttgtgaagtccctgctctctgtgggtctatgagtcagcagcaacattggcctaacctccgtcccagcctcctggctcaccacatgtgtacagtgctgtttgcagttgtactcattatccatccatctctctgccatccccaagcatcgctgggtgtaaaacgcaaactctccaccgacactgccatgcgtggtcatgtcttgatgccttcaggggctcagtagctatcaaagaggcctggagggcctgggcaggcttgacgatgcctgaccgagttcaagacccacaccctgtagcaataccaagtgctattacataatcaatggacgatttatacttttattttttatgattatttgtttctatattgctgttagaaaaagtgaaataaaaatacttcaaaagaagatatccatataaaaataaaaggagagaaaaatg

SEQ ID NO: 7058 - DNA, 1325 bp, Homo sapiens
  source 1..1325: mol_type = unassigned DNA; mol_type = unassigned DNA
ctgcccctccctctgtgctggaacctccccaccctgctgtccaccccagctgcctgccactccggggaccactcttctgcacacggagatgcggctgcaggaccagcaactggccagacagctcatgcgcctgcgtggcgacatcaacaagctgaaaatcgaacacacctgccgcctccacaggaggatgctcaacgatgccacctacgagctggaggagcgggatgagctggccgacctcttctgtgactcccctcttgcctcctccttcagcctctccacaccactcaagcttattggcgtgaccaagatgaacatcaactctcggaggttctctctctgctgaggagccctcagactgggcggaggggctggagcggagggcttgggctggaggggtgtcagaggaagctgaggccaagttactccagtgggtctcccggaggcaggggtccctgggactggcgactcaagggccccaggacctattcagtggtgctctcccacccaggggccctgggtgtggatgccagtgtctctgtgactggctcttgcttactacccaaagagctctgcagaagggccgctccaaccaagatgttaaaggagacctgggttcccaccataatccatccctccacggtcacgttcctgtttcctggaatcactggtgctatgaactgggattcccaaagggaggccccccaacaaagctgtcatttttgcagaaggctgtcccgcaagggccttgggggaaattaggcatgtcagatgtgcctgtctcacgtgctgttgctgtcctctaagtattgtctcaaattcaccctaagtacatgactcagcaacattgacagggagctactaggaagggaaaatcgaaaggcatgacaaatgggcacttggggacgcagccccagtggctggcagccagtgtctctggtgagcctgacactataaggctgtgtaaattgtaaattctggcgtgtgctgggacatgtgatgggggcactagcgtagcttgggtgcaacaagcacagatgtccccattgtctcccctggccacatgcatctccaaagagcctcttcactgccacccacaccccagggtgacagcctgggagaccactggtgactgaaccaggcaggtcctgaaagcattttccataactgaattctcctgcaggggcgtgaccggggcctcctggtggattctggtggtgtcaccttactgccctctctggaaagacaatctagggagcccagaggcccatcctgagcctcctctgagattttgtgcctgacctaaacaactagttttaataaga

SEQ ID NO: 7059 - DNA, 1642 bp, Homo sapiens
  source 1..1642: mol_type = unassigned DNA; mol_type = unassigned DNA
ctcctgtggagtggacgtgcccgcctctgagtggcagggcagggatcgggactgatgcggttctcatccctcccacagggtctccagccacctgcccttcccgagaagagagagctctgggccttcttcctgccagtctggtcttcgagtgcgttcaggacagatagaccttggcacaggctgccccgagattcctgcgacgctgtctgttcctgccttctgtggagcatggcacccacaggcttccaggacggatcatagacccgagcctccaggagggcgccctgtgcggctcactgcgcggtccctctcagctcccctgccacccagcctctgaggccggctcctgtcccggaaatgccctcgggcacctggatgaggccatcccagagcgggacccaactgtgccacccaccaagcctccccctgcgccccccgtgccctcgcatgtccggctgccagggcagactgtagaatgtctgtgccccagatccacgtggaagaagtgggtgcagaagagggggcgggagcagccgcaccacccgatgaccacctccggagcctgaaggccctcaccgagaaactgaggctggagacccgcaggccctcctacctggaatggcaggccaggctggaggagcatacctggcccttcccgaggccggctgcggagccacaggcgagcttggaggagggggagcgtggggggcaggagcccttgctccccctgagagaggctgggcagcaccccccttctgccaggagtgccagccaaggtgccagacccctgtccactggcaagctggaaggctttcagagcatcgatgaagctatagcctggctcaggaaggaactgacggagatgcggctgcaggaccagcaactggccagacagctcatgcgcctgcgtggcgacatcaacaagctgaaaatcgaacacacctgccgcctccacaggaggatgctcaacgatgccacctacgagctggaggagcgggatgagctggccgacctcttctgtgactcccctcttgcctcctccttcagcctctccacaccactcaagcttattggcgtgaccaagatgaacatcaactctcggaggttctctctctgctgaggagccctcagactgggcggaggggctggagcggagggcttgggctggaggggtgtcagaggaagctgaggccaagttactccagtgggtctcccggaggcaggggtccctgggactggcgactcaagggccccaggacctattcagtggtgctctcccacccaggggccctgggtgtggatgccagtgtctctgtgactggctcttgcttactacccaaagagctctgcagaagggccgctccaaccaagatgttaaaggagacctgggttcccaccataatccatccctccacggtcacgttcctgtttcctggaatcactggtgctatgaactgggattcccaaagggaggccccccaacaaagctgtcatttttgcagaaggctgtcccgcaagggccttgggggaaattaggcatgtcagatgtgcctgtctcacgtgctgttgctgtcctctaagtattgtctcaaattcaccctaagtacatgactcagcaacattgacagggagctactaggaa

SEQ ID NO: 7060 - DNA, 801 bp, Homo sapiens
  source 1..801: mol_type = unassigned DNA; mol_type = unassigned DNA
tttgatcagaccatgaaacatcagtgggttcttgcagaagtgatttctctgtgtgttcatcagtctgtcctctgcactgtggcttctcgcatcttccaggaccctagacggagatgcggctgcaggaccagcaactggccagacagctcatgcgcctgcgtggcgacatcaacaagctgaaaatcgaacacacctgccgcctccacaggaggatgctcaacgatgccacctacgagctggaggagcgggatgagctggccgacctcttctgtgactcccctcttgcctcctccttcagcctctccacaccactcaagcttattggcgtgaccaagatgaacatcaactctcggaggttctctctctgctgaggagccctcagactgggcggaggggctggagcggagggcttgggctggaggggtgtcagaggaagctgaggccaagttactccagtgggtctcccggaggcaggggtccctgggactggcgactcaagggccccaggacctattcagtggtgctctcccacccaggggccctgggtgtggatgccagtgtctctgtgactggctcttgcttactacccaaagagctctgcagaagggccgctccaaccaagatgttaaaggagacctgggttcccaccataatccatccctccacggtcacgttcctgtttcctggaatcactggtgctatgaactgggattcccaaagggaggccccccaacaaagctgtcatttttgcagaaggctgtcccgcaagggccttgggggaaattaggcatgtcagatgtg

SEQ ID NO: 7061 - DNA, 1620 bp, Homo sapiens
  source 1..1620: mol_type = unassigned DNA; mol_type = unassigned DNA
gatgtagaaacggctgctggaggacaggacctgtggtgggtggaggtggtgagggggcagtggcacctggacggagcagacccaccttagcctgtgtggggtgcggtttccctgctggctggctctggggaccccccggctgttgccacagagaggaaagacctgtggcctcagattcagacagcctgagcttgtccccacaacttattgctgggagatctcgggtctccagccacctgcccttcccgagaagagagagctctgggccttcttcctgccagtctggtcttcgagtgcgttcaggacagatagaccttggcacaggctgccccgagattcctgcgacgctgtctgttcctgccttctgtggagcatggcacccacaggcttccaggacggatcatagacccgagcctccaggagggcgccctgtgcggctcactgcgcggtccctctcagctcccctgccacccagcctctgaggccggctcctgtcccggaaatgccctcgggcacctggatgaggccatcccagagcgggacccaactgtgccacccaccaagcctccccctgcgccccccgtgccctcgcatgtccggctgccagggcagactgtagaatgtctgtgccccagatccacgtggaagaagtgggtgcagaagagggggcgggagcagccgcaccacccgatgaccacctccggagcctgaaggccctcaccgagaaactgaggctggagacccgcaggccctcctacctggaatggcaggccaggctggaggagcatacctggcccttcccgaggccggctgcggagccacaggcgagcttggaggagggggagcgtggggggcaggagcccttgctccccctgagagaggctgggcagcaccccccttctgccaggagtgccagccaaggtgccagacccctgtccactggcaagctggaaggctttcagagcatcgatgaagctatagcctggctcaggaaggaactgacggagatgcggctgcaggaccagcaactggccagacagctcatgcgcctgcgtggcgacatcaacaagctgaaaatcgaacacacctgccgcctccacaggaggatgctcaacgatgccacctacgagctggaggagcgggatgagctggccgacctcttctgtgactcccctcttgcctcctccttcagcctctccacaccactcaagcttattggcgtgaccaagatgaacatcaactctcggaggttctctctctgctgaggagccctcagactgggcggaggggctggagcggagggcttgggctggaggggtgtcagaggaagctgaggccaagttactccagtgggtctcccggaggcaggggtccctgggactggcgactcaagggccccaggacctattcagtggtgctctcccacccaggggccctgggtgtggatgccagtgtctctgtgactggctcttgcttactacccaaagagctctgcagaagggccgctccaaccaagatgttaaaggagacctgggttcccaccataatccatccctccacggtcacgttcctgtttcctggaatcactggtgctatgaactgggattcccaaagggaggc

SEQ ID NO: 7062 - DNA, 1120 bp, Homo sapiens
  source 1..1120: mol_type = unassigned DNA; mol_type = unassigned DNA
gtgagaatggcagactggagccctttgaaagacgcttccagccccgggcatctaggaaaggtgcttgatgaggtctgggatgaagaaaatgagacttagcaagcctgacaagacgtagagctaggccatctgatcccaactctagtgtctgcatctggagacagtggttctccaccccggctgcacactcggatcatcgggggagctgaacactgctgtctaagtcccatctctcgaccaattgaatcagaatccagttcctcagggggattctcgcttgctccaagcagagctggaggtgctgccatgcgggcacttaggtgaacacgagaagcctcgttctagaacaatgagtcacagcctgcttgtttagccatccagcccaggtgccaccgccttcttccctccacagctgcaggtttatttgcttctgtctctgaagaggtgagggtctccagccacctgcccttcccgagaagagagagctctgggccttcttcctgccagtctggtcttcgagtgcgttcaggacagatagaccttggcacaggctgccccgagattcctgcgacgctgtctgttcctgccttctgtggagcatggcacccacaggcttccaggacggatcatagacccgagcctccaggagggcgccctgtgcggctcactgcgcggtccctctcagctcccctgccacccagcctctgaggccggctcctgtcccggaaatgccctcgggcacctggatgaggccatcccagagcgggacccaactgtgccacccaccaagcctccccctgcgccccccgtgccctcgcatgtccggctgccagggcagactgtagaatgtctgtgccccagatccacgtggaagaagtgggtgcagaagagggggcgggagcagccgcaccacccgatgaccacctccggagcctgaaggccctcaccgagaaactgaggctggagacccgcaggccctcctacctggaatggcaggccaggctggaggagcatacctggcccttcccgaggccggctgcggagccacaggcgagcttggaggagggggagcgtggggggcaggagcccttgctccccctgagagaggctgggcagcacc

SEQ ID NO: 7063 - DNA, 712 bp, Homo sapiens
  source 1..712: mol_type = unassigned DNA; mol_type = unassigned DNA
ggggaggcgaggcgggagccctgagctgaggccgggcagcgcggacccgcgcaggaggaggcggcggggacaccggcgagtccccagcagggcccctgggctcccggaagatgaagaaaatgagacttagcaagcctgacaagacgtagagctaggccatctgatcccaactctagtgtctgcatctggagacagtggttctccaccccggctgcacactcggatcatcgggggagctgaacactgctgtctaagtcccatctctcgaccaattgaatcagaatccagttcctcagggggattctcgcttgctccaagcagagctggaggtgctgccatgcgggcacttaggtgaacacgagaagcctcgttctagaacaatgagtcacagcctgcttgtttagccatccagcccaggtgccaccgccttcttccctccacagctgcaggtttatttgcttctgtctctgaagaggtgagggtctccagccacctgcccttcccgagaagagagagctctgggccttcttcctgccagtctggtcttcgagtgcgttcaggacagatagaccttggcacaggctgccccgagattcctgcgacgctgtctgttcctgccttctgtggagcatggcacccacaggcttccaggacggatcatagacccgagcctccaggagggcgccctgtgcggctcactgcgcggtccctc

SEQ ID NO: 7064 - DNA, 5826 bp, Homo sapiens
  source 1..5826: mol_type = unassigned DNA; mol_type = unassigned DNA
acatgcgcgaggatgcgaactccccttccctcctcctccgccccctccgcctcccgggcctcttcctcctgccggtgagggagtgcttggcagattgcgcgagggggagcgagcgagcgggcgctgccaggagcccgcagccctggcgcccgccgccgcccggagccccgcaatatgccgccgcggccctctggctctaggccatggcgaggctctgccggcgtgtcccctgcaccctgcttctcggcctggccgtggtgctgctgaaagcgcggctggtccccgcggccgccagagcggaactcagccgctccgacctcagcctcatccaacagcagcagcagcagcagcaacaacaacaacaacagcaaaagcagctggaggaggctgaggaggagaggacagaggtgcctggggcaacctccaccttgacggttccagtgtctgtatttatgttgaaagtccaggtgaatgacatcatcagtcgtcagtacctgagccaagcagttgtagaagtgtttgtaaactacacgaagacaaattccacagtaactaaaagcaatggagcagtgctgataaaagtaccctacaaattaggacttagtttaactattattgcttacaaagatggctacgtgttgacccctctgccttggaaaaccagaagaatgccaatatattcatcagttacactttcactgttcccgcaaagccaagcaaatatatggctatttgaagacactgttttaattactggaaaattagctgatgccaagtctcaaccaagtgttcagttttcaaaagccttaattaaacttcctgacaaccatcatattagcaacgttactggctatcttacagttctacaacagtttttgaaagtggacaattttctgcatacaactggaattactctcaataaaccaggttttgaaaacattgaattgactcctcttgctgcaatatgtgtgaaaatatattctggaggaaaagaactaaaggtcaatggctctattcaagtttctcttcctcttctacgtctgaatgatataagtgcaggggatcgcatacctgcttggacatttgatatgaacacaggtgcttgggtaaatcatggtcggggaatggtcaaggaacataacaatcatttaatctggacatatgatgcaccacatttggggtactggatagcagctccacttccaggaactagaggttcaggtataaatgaagattccaaggacataactgcctaccacacagtgtttcttacagccatattaggaggaacaatagtcattgtcattggattttttgctgtactactttgttattgcagggacaagtgtggtactccacagaaaagagaaagaaatatcactaaacttgaggtcctcaagagagaccagacaacttcaacaacacacataaatcatatcagtacagttaaagttgcattaaaagctgaggacaagtcgcagttattcaatgccaaaaactcctcatatagtcctcagaaaaaggaaccatcaaaggcagaaacagaagaaagagtttccatggtaaaaactcgggacgattttaaaatctacaatgaagatgtttcatttctatcagtcaatcaaaataattactcaagaaacccaacacagtctttggagcccaatgtagggtccaaacaacctaaacatattaacaacaatctatcttcatctctaggtgatgctcaagatgaaaagaggtatctcacaggtaatgaggaggcgtatgggcgttcccatattcctgaacagcttatgcatatttacagccaacccattgccatccttcaaacatctgaccttttctccacaccggaacaattacatactgctaagtcagctactttgccaagaaagggacagttagtctatggccaattgatggaaccagtaaatcgagagaactttacgcagaccttgcccaaaatgccaattcattctcatgcacagcccccagatgccagggaagaggatatcatacttgaaggtcaacagagcctgccatcccaggcttcagattggagccgatactcaagcagcttactggaatccgtctctgttcctggaacactaaatgaggctgttgtaatgactccattttcatcggaacttcaaggaatttcagaacagaccctcctggagctgtccaaaggaaagccctccccgcatcccagagcctggtttgtgtctcttgatggaaagccagttgcacaagtgaggcactcctttatagacctgaaaaagggcaagagaacccagagcaatgacaccagtctggactctggggtggacatgaatgagcttcactcaagtagaaagctcgagagggagaaaacattcatcaaaagcatgcatcagcccaagatcctttacttagaagatttagacctaagcagcagtgagagtggaaccaccgtctgttcccctgaggacccagctttaaggcacatcctagatggagggagtggagtgatcatggagcaccctggagaagagtcgccaggaaggaaaagcactgttgaagattttgaagctaatacatcccccactaaaagaaggggcagaccaccactagccaaaagagatagcaagactaacatctggaagaagcgagaggaacgcccactgattcccataaattaactccaatggggattgtgtgtctgctgtctcgtgctgtttattcttgcttcttgttgtaaattgcagtacgaacttaagaaaatgagactgagcaatctcatggttcttggacatgtctcaagcagagtaaatggtaattcagtaatcagagagaaagataccaaggaatgctttttctggcctattcatttatttttgggtgatgaatttacagtatctaagttttcaaaatgtaaaatagcttcaagatgttagttatctgaaaatgttgctcagccagccagtttggccttgactctcttaagaataacagtgaaatatatactcctcaagttgcctccaaaaatgttgcctctaccatggtgactaccccatggaacatttagaaacaaaactgacttcaggcatcatattattttaaatgttactattacgtcttcttctgcctatacttaaaaataacttgataaatgacttggactgatgttactctggagttatcacaaagaaaatgttgtttggtctttaaagagcatgtgtattgtatcatcccaaacgtaaatcctacatttatataagatgggcaagaagctacttggtcattagagagggagacaccagctctttggttgtttttggatataactttacaaaataagtaagatgttaatttagaaatttgagaaattaatgctctaatactgagtttttatttaaaaattattttttcttcccctcaacaatgaagcaagcttagctgtcaagggaaactttttacaaatctgaaaaaaacaatctatgactttggtttaaggctcactgatacttttaggctaaattggttttaatatatttcttctattctaaaaacctgaactcagtcacttaaaggctatgaaatttaaaaaaaaagtcgatgtgaaagtttcttttgaacactaaaataaaatatgtgcagataaaatatacattgatttgtttttcttaaatgttgatgagaagaaaaagagatgccattttcctgaggctcaaaaataccttcaggatagttgtatatccagttattgattttcttaaaagatgtgtaaggaaaacagtttcaatttcaggggaaaagtaaaagtttttccctaagtcacttaaagcctttgcaacttcttttttcagttttgtaagtaatatatctatgttcttttcattatagcaagcattcaatgtgaacaactttttaattaactctgaattaccattcatacatcctaaaaataaaagctcgttattcattaaaatcaactgatcccatttttcttaaaatttccctgaaggcaaatgtctgaagcacctttcccttgtgggggtaaaaatcctaaattgctttatttttcattccctcctattcaacatgggagcagcatagagacccaaaccatgtaaacaagttcagtgaaccaaaacagccacattagcttcagtaaaattatagctagatgtgcaattttttcctccaacttctaacgtgtcaaataaccttcctactgttctgtgttaactgaaagaacataaagaccctaggcaaatatttgctatatattaccccaatccatagaagaaataatgttttgggtaatacctaggcttcctttttttttttttttttttttttttagtgataaggctcataacaattaattagagaaggcttcttattggtcttacacagaaagatacatcaaaagcagcatgactcaaaatgatttggaaaaggttaaagttagtgctctgctgaagtgcctttgatatagacttgcattattagaaggatataacatcttttttaagtgtgcattttctttcagttaaccaaattaaacagatgtgcagttttattaaaaatatagacctagtgtttcatgttggaacaataaatattgcatgtgagtagtatttcttgttttttgaatacagtatatattgataaattgtttatgttggaatgaagttagaaactatatagcaaaacattatattttaagtgtttatttttcccacctttaaataaaaatgtttcatctcagcttggtaatgaaatacacatattggtataagggtataccattcaggtatgccacttattttattcatttttgtgtaagggaaatgagatgatgtatcccaagggcttttctagaactacttgtttgctttcagaataaaaccttattattttttacactgcacatgctgttctcaattggtaattataggcaatttatcttttctaatgatcaaaagagtgtgacttctcatttgtgagtagttcacaaatttcctgttaaaaagctgaaaccatctactttttcttaacccaagtgataataaacaatattcacaactttcttaaatttttaaattgaaaaccaaggttttttcaaatataaacctagatgattttggtcacaaattgttaacatttgtcgatcctttgtatatactttggatatatattaaaggcaaaactatctcttgactaactgatggattcatttactaaagcacagctgtatgtatttttgaatacatattatgatcttgagactttataaatcaatttttatgactttatgcagttgtatagggattatgccctttcagttctatagggattatgcccttttataatacataatataccacagagattacaaatgttgaggaatgaaagcacttctttgctttggcaatcattttcagaccactatgtgtttgaatcctctggtatcaatacgtattatagggttttagagatctgtgggtcaaatgatgtccctcaaaacttcctaaaaaggtgaagctcaaagtcacacattcttataaggcgcatgagtttctcattttcccatgtacgagcattgtaaaggaattcagctgtattaatttctatttcagatctagaattgacattttgccttcttgtttccaggtgtttctattttttgtattctttcagagaaatctcatatttcggtgtatttattgctgttactactatatttactgctgaaaactgtaacaacctgaagatttgtaaaatgttaaacatagttcattaaaaataataaaataaatctaaaatgtacttgga

SEQ ID NO: 7065 - DNA, 940 bp, Homo sapiens
  source 1..940: mol_type = unassigned DNA; mol_type = unassigned DNA
cgagcgagcgggcgctgccaggagcccgcagccctggcgcccgccgccgcccggagccccgcaatatgccgccgcggccctctggctctaggccatggcgaggctctgccggcgtgtcccctgcaccctgcttctcggcctggccgtggtgctgctgaaagcgcggctggtccccgcggccgccagagcggaactcagccgctccgacctcagcctcatccaacagcagcagcagcagcagcaacaacaacaacaacagcaaaagcagctggaggaggctgaggaggagaggacagaggtgcctggggcaacctccaccttgacggttccagtgtctgtatttatgttgaaagtccaggtgaatgacatcatcagtcgtcagtacctgagccaagcagttgtagaagtgtttgtaaactacacgaagacaaattccacagtaactaaaagcaatggagcagtgctgataaaagtaccctacaaattaggacttagtttaactattattgcttacaaagatggctacgtgttgacccctctgccttggaaaaccagaagaatgccaatatattcatcagttacactttcactgttcccgcaaagccaagcaaatatatggctatttgaagacactgttttaattactggaaaattagctgatgccaagtctcaaccaagtgttcagttttcaaaagccttaattaaacttcctgacaaccatcatattagcaacgttactggctatcttacagttctacaacagtttttgaaagtggacaattttctgcatacaactggaattactcaataaaccaggttttgaaaacattgaattgactcctcttgctgcaatatgtgtgaaaatatattctggaggaaaagaactaaaggtcaatggctctattcaagtttctcttcctcttctacgtctgaatgatat

SEQ ID NO: 7066 - DNA, 720 bp, Homo sapiens
  source 1..720: mol_type = unassigned DNA
cttggggtgcttcctgtttctcagtaaagtgaagttgcggcgacctcgtgcctgccttatgtgcacctgtgccagcatctttctcaggtcccggatgttacagagaagcctgccctccgctgaaagaagaggaccagaaggagatcggcaccaaggtcaccaacctgcggtccaaggtgtctcacctggccatcagcaccttgggagacctcttccaggccttgaagaagaatatggaccaggaggccgaggagatcgcccgctgcttgctgcagaagatggcggacaccaacgagttcatccagagagcagccggccagtctctgagggctatggtggagaatgtgacccttgcccgctccctggtggtcctcacctcggcgggtgtctaccaccggaaccccttgatccggaaatacgcggctgagcacctctcagctgtgctggagcagatcggcgctgagaagcttctctcgggcaccagagacagcacagacatgttggtgcacaacctggtgaggctggcacaggactccaaccaggacaccagattttatggccggaagatggtgaatatcttgatggcgaacactaagtttgatgcatttctgaagcaatctctcccatcttacgacttgcagaaggtcatggcggccattaaacagcagggaatagaagataatgatgaacttccctctgccaaaggccgcaaggtgttga

SEQ ID NO: 7067 - DNA, 493 bp, Homo sapiens
  source 1..493: mol_type = unassigned DNA
tttcactccggctggccctggctcatctccttgaggaggaagtgtgtgtcctctcctgcacgcctctccttcctggggagccctggctcacagctggagccagcaggcctggaggctgcagaccctggactgggacttgttgcttttgagagctcccctgaagcctggctcctcaggtcccggatgttacaggtcagagccctccagacccccaaggactgtactcactgcccagaaatagctgctgcctctgggcaaccttgtaggcaccttctccacccaggacatgggcacccgtgacgatgtccccgaagccaaggtcctggtccccgtggccgtgtactgcgggagcatccctcggaccagtgctgggccccgggtgctcccgcctggaagcatcaactccagtctgcctcatggagaaggttctctccagcctgagccaagagccctgctgaacaacgaggaaccgtcacagctcctgcgtggactc

SEQ ID NO: 7068 - DNA, 12691 bp, Homo sapiens
  source 1..12691: mol_type = unassigned DNA
gtttattcaaggagagctttgctgagagctggagcacgccagcagtggagctcgtggccacccagcccctgctcagacaggaggctgcggcccaggactgtgtggctggtgggggccagggtgggccaggcctggggctgccccgtccttgcctccctgggcccatgagcatcaacgtctctatagagaccaaggaccctggattcctccagtgacaggggtttggcctctggacagagaggtcccggatgttacaggtcagagccctccagacccccaaggactgtactcactgcccagaaatagctgctgcctctgggcaaccttgtaggcaccttctccacccaggacatgggcacccgtgacgatgtccccgaagccaaggtcctggtccccgtggccgtgtactgcgggagcatccctcggaccagtgctgggccccgggtgctcccgcctggaagcatcaactccagtctgcctcatggagaaggttctctccagcctgagccaagagccctgctgaacaacgaggaaccgtcacagctcctgcgtggactcggacagctgggtggcctcaagctggacaccccttccaagggctggcaggcaaggaatggtcaccccaggaacctcagggccttgtctttgggggaccagcccctggtgctcctcccttctccggagtcagaggccaacagcgtggccagggacaccatccagattaaggacaagctcaagaaaaggaggctctcagagggcttggcagcgtcttcccgagcctctctggatccagggggaggcccccaaggagttcccctgcacagcaccatcccccgagccacctctcagaggctgctgagggtgcccaggccgatgcctctcatccagagcatccctaccacccctgaggccagcggagtcaaagagaagggcctggacctaccggggagcattccgggtcctcacgagttgagacccggtgctcaggaggcgcagatctcctggcaatacctgcactgcaatgatgagaagatgcagaagtccctgggcgccatcgtgatcccacccatcccaaaggccaggacggttgcagcgaccccctcccgtgtgcctggctcccttcccagcccgttacctccaggccagggagtcctcacaggcctgagggccccacgcacgcgattggctcgggggagtgggcctcgggagaagacccctgcatctctggagccaaaacctttggcctcacccatcagagacaggcctgccgctgccaagaagcctgccctgcctttttctcagtctgctcccacgctgacagccttctcctttgactgtgccagagaagcctgccctccgctgaaagaagaggaccagaaggagatcggcaccaagatccaagtcaccatctccaagtctgcccgggagaagatgcagctgaagcagatgaaggagatggagctgcttcggaggctggaggagcccaggacagggcaggagctcacttcccagtgcctgggctcccagagagccttcatgaaggaaggcctccttcccctccggggcagcgggacactgtctgtgcccactaggctgagcggcccatgcagaaacgacgtcagcatcatcctgaggaagtgggccagccgggcctccctgcccagcatccccatcagccggcaggagccccgctttgcccgccacgcctcagctaactcattacctgcggtgctcacgttggggtctcctgaatgggaagaagaggaggagatggatcttagagcctgtaaggagttgaggcctttctcgaacccggagctggggctgagggatgcactccagtgcctcaacagcagtgactggcagatgaaggagaagggtctggtgagcatccagcgcttggcagcctgtcactcagaggtcctcaccgggaagctgcacgacgtgtgcttggtggtgactggggaggtcaccaacctgcggtccaaggtgtctcacctggccatcagcaccttgggagacctcttccaggccttgaagaagaatatggaccaggaggccgaggagatcgcccgctgcttgctgcagaagatggcggacaccaacgagttcatccagagagcagccggccagtctctgagggctatggtggagaatgtgacccttgcccgctccctggtggtcctcacctcggcgggtgtctaccaccggaaccccttgatccggaaatacgcggctgagcacctctcagctgtgctggagcagatcggcgctgagaagcttctctcgggcaccagagacagcacagacatgttggtgcacaacctggtgaggctggcacaggactccaaccaggacaccagattttatggccggaagatggtgaatatcttgatggcgaacactaagtttgatgcatttctgaagcaatctctcccatcttacgacttgcagaaggtcatggcggccattaaacagcagggaatagaagataatgatgaacttccctctgccaaaggccgcaaggtgttgaggagtctggtggtgtgtgagaacgggctgcccatcaaggaggggctcagctgcaatggcccaaggctggtggggctgcgctccacactgcagggccgcggggagatggtggagcagctacgggagctgacacggctgctggaggccaaggacttccggtcccggatggaaggcgtggggcagctcctggagctctgcaaggccaagacggagcttgtcactgcccacctggtccaggtctttgatgctttcaccccaaggcttcaggattccaacaagaaagtgaaccagtgggcgctggagtccttcgccaagatgatccccctcctcagagagagcttacaccccatgctgctctccatcatcatcactgttgcagacaacctcaactccaagaactcagggatttacgctgctgccgtggctgtgctggatgcgatggttgagagcctggacaacctttgccttctaccagcgcttgctgggcgagtgcgtttcctgagtggccgtgcggtgctggatgtcacagatcgcctggcagtgctggtggcctcagtttacccccggaagcctcaagctgtagagcggcatgtccttcccatcctctggcacttcctgaacaccgccaccaggaatggcaccctgcctggacccagcgggaacatccgcggggtggtgtgccggctgtccaggagcctccaggagcacatgggctcccgcctgctggactttgccgccagccagccaaagcacgtcctcaagacgctccaggaactcttagactcagagtccttgggaggcagccgcaaggccactgacagaggggtggcccctgacagcaagacaactggcagctcatacccttttcagctggattaaagatggatctgaaatgggcaattattatttatcttatttttttgatggactattctcctggttactttcccccttagagttccagatgtacatggtatattttgaagtagaaataaaagaattacttatttttctaaggttttattatcttgtacttttttaatcacagagaattttccagtaactaggtttgtgatgaacgaaatgaaatgtgacagcagcaaaaccagttgcagacaatgttgagacaaagagttaggaagaaaaagggtagcacagccctgcaagctgcagcccgctcgagacgatagttgcccatctgtgagctgctgggcaagccctcctgaaacccgcagcctgagttggtcatcgaatccagtccatttgttatgggcctgattggaggtgagtgtaacaaacgtgttcagggacatcgtgcttctgccctgcaaaagctgcagcacgtgtctgttggtcctgtgggaaccttctgatcggcccagcttatcaaaagacaaggggaatttgagatttgcatcactaaaagccttctctagaagttggagttctggctagttctgaagaggactagacaatgctttgccattgaaacaccctaaatggagatgcatgtggagcgtaaagtgctaccagtgtgcagatgctgccgagtctctgaaactgcacaggctgcaattgtgggccacatcacaaggctggaggggcgagtgggcacagcacgggccaggacttgtggaagcagggaaggtgttggcccctgggggaacagccagtgaaatgaagtcccggcagtggagagggaagtctggggctcaggctctggacactttaggtaggagtggctctgccttggctggggccagtggcaggttaacaactgtgtgaccagaaagagttagagctaaggccatgacctcaaatgcacaggcaaggcaggcctggtaaggcaaaggctgaagaggcagcatcccagctcttgcaggggagcccagcctgcagccacgtgctggggcagatccagacgaccgaggccctgagggcccagcctcatgccagcaagttttctggcagacacccccctcccctgcccttccccagtggaacctctttccactgtcatctgccccccaggcctaacatccattccacatccctgttctgagcctctcctggggagtctggctctggaaagccccgaatctactcacttatgtatttccataccccaccaggctgaggaagccactttcccatcttgcctctgtggcaggtgtagttagtccggcccctccttacgccctggggtgaggttgggcctgcgagtcatcccgggccttgggcttgtcataggcggcttaagagtgactttgggtaattctagcccagtgagctgcttctcacctgattgtgaccccagcaggggcttccctgcgaccatctagctctttgttgattctgattgaaccaggttaaaggcctgctagacaggcagccatccaaaaatgcccaagaggctgacagtaaatgttttaagtgttgaacaatttaatgaattgcatttgcctgtcatctgagcaaatgtttttggtttggtgaggagacttgcattttctgcttttatcctagaatgtatcagaacatttcagggttttttagatccctaggaggccagggacgtagagtctggcaaggattttgacggcagaaatgaagcttagcagtactgtcctgtcttcctgccttccatgtgtgttctcacacaggaagcttcccatcccatgggcctccacccactctcaggggcggaggcattgaaaacagctgaaaacagtggaaaagtgcagaatacatctttgcactgttctcttttccctcattatttcaggttttattaaccacacctgtggtgtgacgctgctgggaggcactgggtggctctggtgtaccttgagaaatttccatctccaaagacttccttacctcattacttttaaaatgaagggaagacagcatgttggtaacctggccctgggcctgttgggaatacctgtgggaatctaatgggacggcctgtcatgggacatgaagattttcctaagagctggggctggagctaagcccacacatactttgcttggttctgtgtgtggccaggaactccacttacatgagatgctcttgggggtgggaatacagcctctaatgatggaagattctctttctctcaatctctctctccatgtaacaaaaatgcaggtgcagtcactcactgcttgcagactccagtgaacaaaagggaggcctggtataaagaaactgactttttattccaaagctagtttaggggaagaagctgccttgaagggtactgtgtcgtttttggagcagaaagtgggcacttttaaaggggcgggggggggggtgctggcacgaatggcatgcaggagaggaagcgggcaggtgggggagtccacatacttgctttgatgacttatgtaacgggtggtcaagttggcatcttcgtgggcagaactaggttgtaaagtggctgaagctctccgggtgggagggagtttcatagtgggcatattttgggttattaattgactgttgtgtctccaggcagtttcctggtgggtgcaagttctgctctagagcttctaagcacacagttagatgagcctgccctggagggagtgtctggtaaaggggaggtaaaaggttatagttgcatttcttttatatatatgtttatttgtttatttatttattatactttaagttctagggtacatgtgcacaacgtgcaggtttgttacatatgtatacatgtgccatgttggtgtgctgcacccttaactcgtcatttacattaggtatatctcctaatgctatccctcccccctcccccaccccacaacaggccccggtgtgtgatgttccccttcctgcgtccaagtgttctcattgctcaattcccacctatgagtgagaacatgcggtgtttggttttttgtccttgcgatagtttgctgagaatgatggtttcccgcttcatccatgtccctacaaaggacatgaactcatcattttgtatggctgcataatattccatggtgtatatgtgccacattttcttaatccagtctatcattgttggacatttgggttggttccaagtctttgctattgtgagtagtgccgtatagttgcatttctaaagggctaagtaggaagtggggaacaaggggaaatggggaaaagagaagagaaataattttaaaaactcgttttcttagaaaaatgagtgtactcagttcagagtgagactcatagacagaagacttgtctgagagctgtaactgccaggattcccttttacatcaaggagaatttttttgagattttaggaaacttttcctataggtcccattgtggcaggccaggtatcactaatgcaggcatccataacaactgtttcaatactgactgagtggttaagttaaacattaaaagctgagagagctggtggccttatacaaaggctggaatgtaacaaaagcccaccaagagtttgcctaggcctttgctgggccttgaagcatgatgagataatgaaggaattcttagtgggacctgtttaggattaaacaagctttactgggtgtctgaagaaactccccaggcctccaaaaacaagtttattggaggtctgaaggaactccccaaaccttcaggatttagcaggagacaagataagggtaatcaccccagcacctggacccatttagattaagtaaatctattgaggctccagaggaaggtcttcaggacttagatgttagctacagattaaaagaaattaatcgcttatgtctttagatgagtgcacacttacacatagacatgtagcttagaagatatgcaagctctggaaaactttgtaatttgagttggtctggcgatattttccaggccttctccctgtaaccggttatggaaataaaaaactctcttcctccccagttcatctgcatcttgttactgggccacgagaaatagcagcccaaccctcagtttggtccaggaacaaaatctctcatcttgttttctcctccctttattatctcctacctgctgagataataaacgtttctaccctctcactgtgcttcggaatcatctggcaagacttaaaaaatactgaggtctacccccaccccacagggattttgattcacttggtctgaggtgaagcctaggcagctgtatttttttttcttttaactccaggtgattctaatggctgggtgaattcaaaaaccacaataaaatatcagataaaaaaggaaactggccatggcttaggccctgtgggctcctggcctgccagctccccttacctcacagccctagagtattctggggttgacggtagaaactgagtccaggctctggagtcaggcctgtggcctgctggcgtgtggcttgggacccatctatcaacctctctgatctttccatatcaatctagtgtgtggatgacatcaatgcccacctacacctggctgtggtgacgatgactgagaacattctcataaagcatttagcataaggccacgaaaacagggagctgttctgcttggggcctgccatttctccagctgtcttaccctttctccagacgccctcagaaccatccctccccccagagaagaaaacccagaagctcttctctccttgtggctgttccttcccctccactcttctgactcttgagactggagaggggatgatttgcaggggagcagagtgctttcttgcctaaagcattttcctcttattataacttggttctgccattaggaaaagaaagggggaaatgaccataagtctcctgctctccttgtgatggagggaggaagatgggggcccagaaagggaagccgagaggaagagccaacctcctcattaaattctgcagtgttccaggtctgccattcttcttgacatcttataaggaagatattatttcttccatttcctgatgaggaaactgggcctcagcgatgcttaatgaataaccgcagccagtgcacaggaatcacctgggaatcttggtaaagttcagattctgcttcagcaggtctgggtggggcctgagagtctgtagtgttcaattcccaggtgaggtcaatcctgtgagtctggcagggaccacactttgaggcgtcaggtcctaagacagcaagaaagtggctgaaacttgggtgtgtgtccaggcctgtttgactccaaagcccctgactttctgttccaggatgttttatggctccaagacatttacctccccttgggtcagtttgagccctttgaaataagccacggaaaccccatggatttctggagttagtctggtcccagagttttgctcccaaaagcttcagggcagagagggtctgcttggtcagctctgatcattaggacatgctgtgaacacttggcctctggtggggacgggatttgtggacacaaatgaaggctacatgagcaaagtgtagcctattcagagcttgctatagcaagggagcctgccatgacgacctgagttttggcagagactcatatgcaagcagaggtaatgctgcagcttcatagtggaaaaaggggagacttcaggtatgccctgattggaagctgttggcctggggacgctgtaggcacgaagtgtggactgtggcttgcttgttacagtatcacccacggtgcttgttaaagtacagatccctgggttgtactgcagacctaccgaatcagagccttgatcactcaaagttgagaacctctgtcacaatctcaaagctttcagtggttattaggttcccaggctagcccacacctgggagtcagcatccctaaatcagtctttaccaaatgtggttgatgaaaagaattgcttgcgggaggagaacggggagagagagacgggaacaagtgctttttaaaaactcagactcttagtctcagctgtagatctgttactggggggaaggcctgggaatctgcaaattatcaagcagctgattctgaggatcaggaagcctgggaagcagcgtcctaactgcctgctcccagccgggttccagacagcacggcagcatcactgtgtgcacagatgctccctggtgggtgtttctgagtcagggacctcttgggggctcaggtttggtccttatgattactggggtttattcagggggcgtgctggtttcgccatattccgtcccctggtgtttcagtgaagctggctgtaacatttgaaggctttgctttattttaatcacatctttataattacctcgctgtgagttgacagctgttattaacatcaccttgggttctccttgagaatttttacatccttaaagtgatgcggcacttctgcagctgaagtcagaagccgttaactaaataatcgctctaaaatgtcaccaggttttgtaaacatagccaatactgtccccttccaaaggaggaaaaaaaattgctagataaataattttcatgaaggcaatttgtttcccagggtctatattattttctgtctcatccactggtttttgccgctgtggggcactggcaataaagagctgtctcaagaaggaggccacgtctgctcctgccaattttcatctggaagcccacttcagggttcatggcaatgagaagcaaagatttttggaaaagacttttctttttctcttaatgctagcagcagttgtgtgtgtgtgtgtgtgtgtgtgtgtgtgtgtgtgtgtgtgtgtgtggaaaatgatgggagtggttgaggttcatagagggaattattttaaaaactcttggaaacattgttttgagttttcatccaagctagtttgaggaatggctagaatttcagctgaactttgattagatatgaaaagtaatgtcctgggctaggtgtggcagctcacacccgtaaacccagcactttgggaggctgaggtgggaggattgcttgagtctaggagtttgagaccagtctgggcaacagagcaagaccccatctctacaaaaaaataaaaaatcgtagctgggaatggtggtgcatgcctgcagtgccagttaatcaggagactgaggtgggaggatcacttgagcttaggagttcgaggctgcactgagctacagtgagctatgattgtgtcacttcactccagcctgggcgacattgagtgagaccctgtatctttaaaaagaaaaataatttcctatttgtaaatgttggagaaaatggagaatttcttccatagaaaggtatgctgtctccttccagtactgcctctatggaataatctagatcttgctttcagcaggtatcaggaggaaggctggccagggtaagaggcctgctctgccctcactggcaatgtatctttggagtgagatctttttttcatgtgtaaaaggtattgaaaaaacacttgctttgtccatctcatagcgtcttttttcctctaaagatttaatgaaacaatgtacatgattgcattttgaaaaagtagagtgttacatacaaagaaaggtagaattattaactggagcctcatcccacactgtgtgcaaagcctgctgtttagcagtgttcagagtaattgccagtcatctatctgactgactgacaagcctcatgactcaacatgggaaagatgagagattcagaggcttaatttgtttttttccatgtggtatatttgacatatgtacttgcaattgcaagcaaatattgtaaagtcttttctcttcactttgaaagacatgaaaaccttcaaagaaggaagtcaattcttgctgagtttgacagctgtttttaagtttctccaaagatcaaagcgcagcccaggaatgagggggaaatgatattggcttcttttctcaatcgggatcttaaagtgcggaggcagcagagatgaacactaaagaccaaaatggccaggattatgagttccgttccccgaggtggctcaaaaagatgccttagaaaagacaggtttgcccctgttgtgcagatggcaggataaataggctgacattattatcactgctttgcagatgaagacacgggctcagagatgccaggtcacagagccaggggatggaggtgtcatgactcaggctctggtgttctaattccaactctcaggagcgtgataccctctggctcctgagaatgcgtggcccatttaccataccccttgtttctttcccctcctgctctcttcctcctctttttcttcttcctccaatttaggccagtcagctttatctatgggcattaactgagccccgccagtgctatcactccagccaaaaccgattgctgcctcgtgtgctagacttcaaggctgtctgcagtgacagcgttcagaagcgggtgactagatcagtggaatcctagagccacctgatgcagggcccaccgaccattcacaaagttactttgtgaagtccaggagtgcgatcaagcctgcagtgtccagggtccttcctaaaattgaattagagtgctgagtgaattaactgtttgctcctcttcttgtgtgatgcatttttaattacatttcataaaaacgtctggatggattgatggagctttagttaaacttcaggtaggcagggggagtagacgatggtgcagtataacatgttctgttaatacaggctcagaacacatgtactttatggcagttcaactgaatctttgatgtagggctacttaaaaatatattacctttgaaaagatttcctttgaaagatagagtgggtgctttagcagcctgtaagccgtcagccagacgatcaattgacaaacacgtcagcacttataattcactgcagcggctcccctgatacatgcaaaacactggtttatttcagaaaaagaatatatttctcaaaatccctttcattcacattgtaaggtttatgaggcaagtcttgtcaatcctaggcccttcacaatgaaagaaaagtctctttggtctgtctgccctgcgtttcctacaacatggattattttaggctctgaactgggcatacgatgtgaggaaggagaatagatacggcttaaagtaaacagcagctcagaccccagccacggagggaggttatatttcattttgaagattgtatttatacttgcaaaaagctatcactgttctgccagaatatgatgtttact

SEQ ID NO: 7069 - DNA, 1932 bp, Homo sapiens
  source 1..1932: mol_type = unassigned DNA
agtctgctcccacgctgacagccttctcctttgactgtgccagagaagcctgccctccgctgaaagaagaggaccagaaggagatcggcaccaagctaactcattacctgcggtgctcacgttggggtctcctgaatgggaagaagaggaggagatggatcttagagcctgtaaggagttgaggcctttctcgaacccggagctggggctgagggatgcactccagtgcctcaacagcagtgactggcagatgaaggagaagggtctggtgagcatccagcgcttggcagcctgtcactcagaggtcctcaccgggaagctgcacgacgtgtgcttggtggtgactggggaggtcaccaacctgcggtccaaggtgtctcacctggccatcagcaccttgggagacctcttccaggccttgaagaagaatatggaccaggaggccgaggagatcgcccgctgcttgctgcagaagatggcggacaccaacgagttcatccagagagcagccggccagtctctgagggctatggtggagaatgtgacccttgcccgctccctggtggtcctcacctcggcgggtgtctaccaccggaaccccttgatccggaaatacgcggctgagcacctctcagctgtgctggagcagatcggcgctgagaagcttctctcgggcaccagagacagcacagacatgttggtgcacaacctggtgaggctggcacaggactccaaccaggacaccagattttatggccggaagatggtgaatatcttgatggcgaacactaagtttgatgcatttctgaagcaatctctcccatcttacgacttgcagaaggtcatggcggccattaaacagcagggaatagaagataatgatgaacttccctctgccaaaggccgcaaggtgttgaggagtctggtggtgtgtgagaacgggctgcccatcaaggaggggctcagctgcaatggcccaaggctggtggggctgcgctccacactgcagggccgcggggagatggtggagcagctacgggagctgacacggctgctggaggccaaggacttccggtcccggatggaaggcgtggggcagctcctggagctctgcaaggccaagacggagcttgtcactgcccacctggtccaggtctttgatgctttcaccccaaggcttcaggattccaacaagaaagtgaaccagtgggcgctggagtccttcgccaagatgatccccctcctcagagagagcttacaccccatgctgctctccatcatcatcactgttgcagacaacctcaactccaagaactcagggatttacgctgctgccgtggctgtgctggatgcgatggttgagagcctggacaacctttgccttctaccagcgcttgctgggcgagtgcgtttcctgagtggccgtgcggtgctggatgtcacagatcgcctggcagtgctggtggcctcagtttacccccggaagcctcaagctgtagagcggcatgtccttcccatcctctggcacttcctgaacaccgccaccaggaatggcaccctgcctggacccagcgggaacatccgcggggtggtgtgccggctgtccaggagcctccaggagcacatgggctcccgcctgctggactttgccgccagccagccaaagcacgtcctcaagacgctccaggaactcttagactcagagtccttgggaggcagccgcaaggccactgacagaggggtggcccctgacagcaagacaactggcagctcatacccttttcagctggattaaagatggatctgaaatgggcaattattatttatcttatttttttgatggactattctcctggttactttcccccttagagttccagatgtacatggtatattttgaagtagaaataaaagaattacttatttttctaa

SEQ ID NO: 7070 - DNA, 658 bp, Homo sapiens
  source 1..658: mol_type = unassigned DNA
caaggaagcagctgtgaacagcagaaagaggatgagaggattggggaagacctcggtttctttcctgttgcttcataaaatgtcagggctggacagcactggctacagacaggaatcagagggtccagagcttctaccagggcacctcaggaatcgtgcctgggacatggggacgctctgtccccattctaccagaggagcttctatgttgcctcattttttttttttgtatactgggcattcatgtgagatttcatttggaaagattttgctactgaaaaaaacttaaaaacagtcagcttggttcagagtttctgcagatgaaggagaagggtctggtgagcatccagcgcttggcagcctgtcactcagaggtcctcaccgggaagctgcacgacgtgtgcttggtggtgactggggaggtcaccaacctgcggtccaaggtgtctcacctggccatcagcaccttgggagacctcttccaggccttgaagaagaatatggaccaggaggccgaggagatcgcccgctgcttgctgcagaagatggcggacaccaacgagttcatccagagagcagccggccagtctctgagggctatggtggagaatgtgacccttgcccgctccctggtggtcctcacctcggcgggtgtcta

SEQ ID NO: 7071 - DNA, 616 bp, Homo sapiens
  source 1..616: mol_type = unassigned DNA
gtttattttattaatctattttttaactgggtagggattgcttttgtaattagaaaaagtattaaaaactctctttaattaggaagattatgtaaagctgtaaagcaaatttattttgcatttcagaggctgtttctttatcttgctctctctcctgtggcagattttatggccggaagatggtgaatatcttgatggcgaacactaagtttgatgcatttctgaagcaatctctcccatcttacgacttgcagaaggtcatggcggccattaaacagcagggaatagaagataatgatgaacttccctctgccaaaggccgcaaggtgttgaggagtctggtggtgtgtgagaacgggctgcccatcaaggaggggctcagctgcaatggcccaaggctggtggggctgcgctccacactgcagggccgcggggagatggtggagcagctacgggagctgacacggctgctggaggccaaggacttccggtcccggatggaaggcgtggggcagctcctggagctctgcaaggccaagacggagcttgtcactgcccacctggtccaggtctttgatgctttcaccccaaggcttcaggattccaacaagaaagt

SEQ ID NO: 7072 - DNA, 7450 bp, Homo sapiens
  source 1..7450: mol_type = unassigned DNA
actccttttggctcatgctctgtgtgtattttttcaagggaatagaagataatgatgaacttccctctgccaaaggccgcaaggtgttgaggagtctggtggtgtgtgagaacgggctgcccatcaaggaggggctcagctgcaatggcccaaggctggtggggctgcgctccacactgcagggccgcggggagatggtggagcagctacgggagctgacacggctgctggaggccaaggacttccggtcccggatggaaggcgtggggcagctcctggagctctgcaaggccaagacggagcttgtcactgcccacctggtccaggtctttgatgctttcaccccaaggcttcaggattccaacaagaaagtgaaccagtgggcgctggagtccttcgccaagatgatccccctcctcagagagagcttacaccccatgctgctctccatcatcatcactgttgcagacaacctcaactccaagaactcagggatttacgctgctgccgtggctgtgctggatgcgatggttgagagcctggacaacctttgccttctaccagcgcttgctgggcgagtgcgtttcctgagtggccgtgcggtgctggatgtcacagatcgcctggcaggtgagcacccccagccccaccccaccccatctcctggcagatttctgttctctcctggtctgtggttgaaccattcacccagttatcttagacctgaaataatcccccccaatcatttaaaattttgaaaatctgctttttttgtgtgtgacaatctccatattgccagaagacaatctttgtttttgatcaaaatgaagtaggtttgtacaaaagcaaaagtgtttttaaaaaactgttacaggttgaatctccctaatcagaaaattagaaatgctccaaaacctgaaactttttgagcgctgacatgacattaaaagaaaatgtacattggggcatttccgatttcagatttttggattagggatgcagaactggtatcatgaaaatattccaaaatcagaaaaaaagccgaagtacttctggtaccaaacattttagataagggacactcaacctgtgtgcgtttcttcctccttgcaaacaaggctgcttctagcctatagagtacctttgtgtgagtcagaaaaaagcctcctttttcagacagaccatgcctagtgggtgcatatggcttggtcagttgacagcaccatcaagagaattagaaaaagttgccatgtacaactttagcatgtgcagcctggcaagcaggcaccagctgggtttcaacccctcaggaccccttggccagtgctgggactgtattatgtggagacggggccttagcctgagtctactcagccttgctcaagcttcagctggtgaagggttgctccaatcctgtttctgctttgagtctgcaggagaagtccaagtgacttcattccagggctgaaatctgttcttgtggtccttgaggtggcaacacagaaaggacacaggctttggtgtccacacacccatctgccaccaccagccctgaccttgggcaggttacttatcttggtttcatgatcatttttgcttgcacaaagcctcctcccctgccttgggaaggtcccatctagggaggggggcagagggactctgttccctagactcccgatggtccccctgaaatgcagacagatcatgcaccagccctgctttaatctttgtgagactcctgagctgtcttcaggatagtgtccaggccccctggagtggcccacagctgtcactgctgctctaggatgtgccgccttcctcccaccccagctctatgctcattgaatcctcatgaccaccccacaggaggatgtagattccacttggtggagaaaaggagaatggagctcagaaaagtgaaatgcacaaggtctcttggtgaggagcccaggatgtgtcctgggagcctggctgaagggccaagaccccaaccctgtgctgtgctgcttccccctggcactctgcctcctgggtgcctgcatgcagtggccggtctctcaacttcttgctctgcccacttgtggctgccctgcccggaaagccttctccattcttcttcctctacctgggggatgcctgcttggctctggcattaccttctccctgtgtgcttctcaagactgcatcccacatggtatcactggtctgtctactgccctcccctcctagcccagctgtgagcatccagagaggggcctggcacatgctgcatggctgaggaccttggcaccagctgccctttcagcttctcccctgccccatctcttgcgcctggccttgcctctatgcaggttctgtccttccagcattcctggagtggcctcttaccttacgggaaggcaggtgcgagtgaggcagggctggctgcaggtgagctgggggagaacagggtatgtaagtaagatggtcctagacaccagacaaggaaccctttgccattgctcaaagtcagcattttctgcatgaaaggtttacctgtccttgtctgggtaatttacggggcccagaggtgggcaagtatcttcaccttatccacttactgtaattttttcttgtctatttccaagagacctcaaaagaagagcttctccataggtcttctgttaactctgtgtccaccaggaacacagaagaaaatttttattgacacaggcgaggcctaataatagcacagcttaataggagtaaatcttctgctaattacttcagctgcttctaagcttgagtttaatggggcttgctcccgcatgctggcccccagaagggcctcaccatctttgccagcttaagagtcaacacctgccagccaggcgactgccacatccttgcacctggggaatgtggctctgaagtagcctgagttctattagccaagacgtgatcagagaaggtggcctgggctgtggaattgagtttgggtggggactgctactcttcctgtggagtgagcttcctgggggctgaagtgtaaacacgcctcactctgtggaagagaattcaaggagcaagagtggataaaatgtagcaggatggggaaggaggctctgttggggggcaggtagagcccccccagcctttggtgggggtgggggtggagggtgcgtgcctgggtttggctcttgagatagttctcacttttccctgctgtattagcctgttctcatgctgctgataaagacatatccgagactgggtaatttataaagaaaaagaggtttaatggacgaacagttccatgttgctggggaggcctcacaatcatgccactcatcttacatggtggcaaggaagacagaatttgtgcaggaaaattcccccttataaccttttaaaaccatcagatctcatgagacttactatcacaagaagtacaccggaaagacctgcccccatgattcaattacttcctaccggctccctcccatgacacgtaggaattgtgggagctacaattcaagatgagatttgggtggggacacagccaaactatatcaccccccattaaaagaattgtgttaaaatacacaacataaaatgtaccaccttaaccatttttagttgtacagttcagtggtagtgtccatgatttttgcagtcatcttccgaactgttaccttgcaaaacagaaactacgtccccattaggcactagctccccattcctcccttccccagtccctggcaaccaccaactactttctgtctctacgattttggctattctaggtatgtcatataaatggaactgtacagtttgtctttttgtgtctggcttaattcacacagcagaatgtcctcaagatttatccatgttgtagcgggtgtcagaatttccttccttttttttttttttttttcagagagattctcgttctgtcacccaggctggagtgcagtgatgagatctcagctcactgcaacctctgtctcctagggtcaagccattctcatgcttcaggctcccaagtaactgggattacaggcgcccaccacaacacccagctaatttttttttttttttttttttttagacagagtcttgctttgttgcccaggctggggtgtagtggcgcgatctcagctcactgctacccctgcctccctggtcccggttcaagcaattctccttcctcagcctcccaagtagctgggattacagtcacgcaccactatgcccagctaatttttgtattttttttttttttttagtagagatggggtttctccatgttggccaggctggtcttgaactcctgacctcgtgatccacccgccttggcctcccaaagtgctgggattacaggcgtgagccactgcgcctggcccgatttttgtagttttagtagagacagggttttgccatgttggccaggctggtcttgaactcttgacctcaagtgatccacccacctgggacccccacagtgctgggattatagtcatgaaccacagcacctggccagaattcccttccttttgaaggctgaaaaacattccattaaatgtatataccacattttgtttatccattcctcaatggacactgggctgcttctgccttttggcgattgtgaaaaaggttggtataaacacgggcatagaaatctctgtgttctcacctatttttgcattccatagggattcaggatacttttgagttatcgttattcagtgtaggcggctactcagggtcattcgttttcttttggttccctctcactgtcccccttctagtttcccctcatctcccaccctggggctgacagggactgctttcttgtcacctgttctcttcctactcagcctgtttcaagcacaaggaatagaactctcaactctttccaaccagtgtacctctttgctccactttagaaagctcctccaagccctttaccccaggatcctttcctggggaatgctggggtgacccaaaaggtgcagtcctgcccttccagttatcaggaccaccttcacctctgaggatcctgtgaccctcggaggttccctgcaagagccccaagggtgcagcctcaaagccaacattccttgataaatgtcaccaagagagtgtcaggctgaccagagggtggcccagggcatcttccctggttcctccttattccaggctggctttgaaatcagagggacccgtggggctctaaggggaaggtatcctaggggattagatgatgtggtcctgatgaaggaaggacaaattgcagtttcatgaaaaataaaacaaggtggctcacctatgatcccagcactttgggaggtcaagatgggcagattgcttaagaccaggagttcaagaccagcctgggtaacataatgagacccccatctctacaaaaaaaatttttaaaaaaataactgagcgtggaggcgcatgcctgtggtcccagctactggggaggctgaggcaggagaattacttgagcctaggaggtcgagactgcagtgaaccgtgatcgtgccactctactccagcctgggtgacagagcaagacactgtctcaataaataaataaaacaaaaaataaagctccagatcacctctgaaatatggaatccctagaaatttggggacagcatgcggtagaaagagtgtggactttggagtccaggcagattaggcctttgtcctctgctttgccctttgccttgatttgagtcttgctttcctcctctggaaaacggacaagcatcctgcctctcaggggtgctgtgagcatgaaatggagctgtgatgtgaagctctgagccctgggctcaggcagtttccaggatatggaaactgttttccacagaattcccggcccacagaatcaataaagcgctgctgttagtgttgtttgcctgccccagcacttatccttcggctggatgacaggcagagcatgtgaatcgcaaagccagcttcgatagtgctaatgcgcttaggataatgcggccacagctgaaggcctgagcagcccctctggggacccaggagagcccttgatgtggttttaatgtggccacagccctggcatttactcaggtgatgaagagctggttggcagattcagctggcttctgggttttccggggtttagagagggttgggggccttgggaaaccagatatgggggcttatcactggaatggtctgtgcagagcttgctggttcacaagcacgttcatgcctctgctgctggtctcgtcctgaggtttggcatccgggcaccggggaggctgtgctaggcttctcccctgccagctgtcttgtctgccagcatgcttcatgtgagagggtcttgatttccctccccagtagtttttctctgtatttgtgtggacttccataggtggtgatgtggataaatgcagtattactatagttactatttgtcacctgcctgcctacaggtaggcactttatgtatattatcgaatttctaacaatctggagaggttggttcagcatttttatccttactttatgggtttggaaaaggctcagaaaggtcgggtggcttcctcatgctgacacagttgatgggggcaggattgtaaccaggcgtgcctgcctctttcctgttccctgggctggaggaaccattatgattgtcagagattctgcatatttctgcctttgcgtgcccctttctccataaaaaatatttaaaaattatagtttctgactggttggtataagcacagatataaaccaggttggacatattcatatattttctactaatgttaaaagaagctaacacattttcataggctgctaaatgtgtcatgatccttagttgctgtgcctgctgggctgccagccctttgggggacaaagttggtgtcccaagagagggaagtgggagagggagagagtgcctggctcaagtgactctccttttctgcctgacagtgctggtggcctcagtttacccccggaagcctcaagctgtagagcggcatgtccttcccatcctctggcacttcctgaacaccgccaccaggaatggcaccctgcctggacccagcgggaacatccgcggggtggtgtgccggctgtccaggagcctccaggagcacatgggctcccgcctgctggactttgccgccagccagccaaagcacgtcctcaagacgctccaggaactcttagactcagagtccttgggaggcagccgcaaggccactgacagaggggtggcccctgacagcaagacaactggcagctcatacccttttcagctggattaaagatggatctgaaatgggcaattattatttatcttatttttttgatggactattctcctggttactttcccccttagagttccagatgtacatggtatattttgaagtagaaataaaagaattacttatttttctaa

SEQ ID NO: 7073 - DNA, 4403 bp, Homo sapiens
  source 1..4403: mol_type = unassigned DNA; mol_type = unassigned DNA
aagtccccggagccgaggcttcctccgcgtgagcgcggcgagtctggccgcggatgccctgtccggagtgctccgtgccgccccaggcttgccagggtccgcagcgagacatgcccgagccaggcgctgcatcgacctcgacttatctgtaagcagcggaagatcctgaaggcactaactaaggtatctccaggcaaccaaggatcttacctctcacattgagaaaaaccataacttcagagacatttcctggctccaaattcaagtcctttcagagacccctctactaattattttccagtaccactctccatggaataaaaggagttgcaaacatggcctttgtagatgcagggaaacccacgttccttttagagctgatgttaacccatgagaagcgaccacccctcgacgacttctccttcacggttcccacccaggagcacggccaactctcccccggaatccataacggctcacgcaaatagatttctttccgttcctcctcggagggctctccacatttatctgctcgagacgtggcagctccagaaccatggtcagtaaggacaccggcaaatgcatactcacaacgtcggagagtgaagtggaacccgccgcctgcctggccctggagatgaaatacgccctggaccccaaccggcagattaaaaaacggaacaaagccctgcaggtgcggtttaaggatatctgcgaggcacagaatgagcagagggacacacagctgtcctcgggccagctgggggagaagcgggaggccaagcccgtgtcctgcagagcagcctaccgcaaatacatgacagtgcccgcacgcaggtccatccccaacgtcaccaagagcacaggcgtgcagacctcgcccgaccttaagaagtgttaccagacgttccctctggaccgcaaaaaggggaacctcaaaagcctcccagctgcagatccctttaaaagccaaaacaatgggtttctaacagatgcgaaagagaagaacgaggctggacccatggaggaggcccggccatgtggcgcggggcgggtgcacaagaccacagccttggttttccattccaaccaacacatgaacacagtggaccagcctttgggggtcaactgcacagagccctgtaaaagcccggagccgctcagctatggagaagctgcgctccaaaactccactcggcctccatccgaagagcccgattaccagctgctcgggagggccaagcaggaccgggggaggccaaactccgaggagcccgctccacctgccctcaggagggtgtttaaaacggaggttgccaccgtttacgcacctgccctcagtgccagggcccccgagcctggtttgtcagactctgcagccgccagccagtggtcactctgcccggcagatgacgagcggaggagagccacacatctcaacgggctccaggcgccctcggaaactgccctggcctgctcacccccgatgcagtgcctgtcccccgaatgtagtgagcagccgtcgcagactcacaccccgccggggctggggaaccagcctagtcccacagcggttgctgcaggtgaagaatgccaacgaatcgtgcctcatacggaagtggtcgacctcaaagcacaacttcagatgatggagaacttgatcagttcaagccaagaaaccatcaaagtgctcttgggggtcattcaggagttggaaaaaggagaggcccatcgggaagggctttcatatcggacggggcaagacacagctaattgtgacacatgcaggaacagtgcatgtattatctatagtgtggagctggattttaagcagcaagaagacaaactccagccggttctaagaaaactccaccctattgaggaaactcaggtcataccttcgccttactctcaggagacttactcctcaactcccaagcaaaaatccaaaactgaatctaaaaagcacggaagatggaaactctggttcctttaacactcacggtgtctggagtctcgaggccgtctttagaacccactggagtttaagtcaatacttttccaaaatgaataggatcgagggaactgtggtgcccattcaggcacctcccacttctcgccctgcgtaccaaaaaggcctttgtaccaatagataattaacagaagcaaggtattctgtgtcactccttgccagctgttctttgcagttcactgatgtgggatgtaaaatctgaaatgaaacttacgtagtcaaagatgataagtaaaaattttcccccacccccgatctgcaagtaatacattatcaacctgcgagatggcaggctgtcaccctgtacacagctataactcataattattttcaagccttgattttttttttaaataatgagaagaaaaagcaagccttatgtttgcgaaggacttcatttttatgtttcattttgcaaataagcagggggcgagtgcaattttcagcacatcaaattccggagaaagcacaattttttcaagtggtcggagaccatgaataatctctaaaatgtgactatatgtatatttgccttcatgtgctatagcgctaagccaagtgaccacatctcagtgtcacaacgacacctcaaatttagcatcctcttcatctccagacttacgacatgtttactgctcattttccaaatggccagcagccaggagtcccccaaagtcaggatatgcctttaatcactgcaagtagacagggtcagagctattggacactaagttttcttagatctcatttttaatcttttggtacccaaaggccaaataatacattctggcaagaatctgagaacatacatagagatacacgatggataatccacccaccaataaatcacaggcattctgtgccatggcagacagtgtttttgtggatcgatcctccgagacactgttagccatggtaagtgcagccagacgttatgtacaattcgttatgctttgtattaatggtggaagccctgaccatctcaaagagaaacagtgcgtttagtttagctgctaccaagggacaatgtcgcctacatttaacctattagtaagttgtactaaacaacatacttaggggaaagctgtgaatcaaatgtttttaggtattttttaaatcaacagtaacacttagagttctctcttgattacacattgcaatgtaaatcttagttcctttattttttcactcatttctttgcacctttgcaagtatctttttatagaaatcaaatcccctagtctattaatgactttgtctatcaattttttgattttcacaataggaagtagggatcttactttgcctttttttttttttttgtacaacttaaattttgaatagtttgtgagcatacaggaaaacctagtcttgaagtttctgtccagcagtttcacatctagtggagtgctgacatgcacacctcattgactagatgccaaacacacagtggctaaccttggtaaaaggatctcacctgcttttgtcagattggagctgcttcttgccatgtattttcctcctgactcaacagcaaatctgttttagttctaagtgttttgattctacaaggacctagtgatcagtaaccagatcgggccttgaaaaaaaaatgaagagtatgtcgtgtaaacattcttcgggggccaaacaacactgcagttgtatgctttaatttaaaacacacatgtgcacacacacatcctctgcggaaacactatatgaagttcgaatccctgaatatcaataaaaggaactgagaaatattttggtgcaagaacaatgaggaagttgatcctgtaacatgaaggaagtgtaactgtttcacgtagactaaatatttaaaaatgggtttcatgttttttatactgtttttaactaaagttataaaaatgtttccaacaagttctctctccttatgttttaagaatcccaactatctcagtaaattgaaataagggtattagcagttttctaattagtaacacaaatctgtctaaacaagaggacatcctagtacacaaaataatgtcactgtttcacaccagtctagaccaaaaaaaaataaaattaaaatgttcagagtcaaaaaggaacttctgaagataaattaattcatccctaaaaattaaagtgtgttcaaaatagaaaaactattgtcaaaatcatttcatagtttaattgcaacacgtcactaacagatggtgattcttctcttggaaagattcaagtaaaaacgctgatacaaaagcaaggtaaaacgcacagggttcccttatgtagatgtacacatggcattgcatatagagattaaattattatacttgtcgttaagttctttattaatttttaaataaaaaaatcaaagatg

SEQ ID NO: 7074 - DNA, 3149 bp, Homo sapiens
  source 1..3149: mol_type = unassigned DNA
ctccttcacggttcccacccaggagcacggccaactctcccccggaatccataacggctcacgcaaatagatttctttccgttcctcctcggagggctctccacatttatctgctcgagacgtggcagctccagaaccatggtcagtaaggacaccggcaaatgcatactcacaacgtcggagagtgaagtggaacccgccgcctgcctggccctggagatgaaatacgccctggaccccaaccggcagattaaaaaacggaacaaagccctgcaggtgcggtttaaggatatctgcgaggcacagaatgagcagagggacacacagctgtcctcgggccagctgggggagaagcgggaggccaagcccgtgtcctgcagagcagcctaccgcaaatacatgacagtgcccgcacgcaggtccatccccaacgtcaccaagagcacaggcgtgcagacctcgcccgaccttaagaagtgttaccagacgttccctctggaccgcaaaaaggggaacctcaaaagcctcccagctgcagatccctttaaaagccaaaacaatgggtttctaacagatgcgaaagagaagaacgaggctggacccatggaggaggcccggccatgtggcgcggggcgggtgcacaagaccacagccttggttttccattccaaccaacacatgaacacagtggaccagcctttgggggtcaactgcacagagccctgtaaaagcccggagccgctcagctatggagaagctgcgctccaaaactccactcggcctccatccgaagagcccgattaccagctgctcgggagggccaagcaggaccgggggaggccaaactccgaggagcccgctccacctgccctcaggagggtgtttaaaacggaggttgccaccgtttacgcacctgccctcagtgccagggcccccgagcctggtttgtcagactctgcagccgccagccagtggtcactctgcccggcagatgacgagcggaggagagccacacatctcaacgggctccaggcgccctcggaaactgccctggcctgctcacccccgatgcagtgcctgtcccccgaatgtagtgagcagccgtcgcagactcacaccccgccggggctggggaaccagcctagtcccacagcggttgctgcaggtgaagaatgccaacgaatcgtgcctcatacggaagtggtcgacctcaaagcacaacttcagatgatggagaacttgatcagttcaagccaagaaaccatcaaagtgctcttgggggtcattcaggagttggaaaaaggagaggcccatcgggaaggtgtggagctggattttaagcagcaagaagacaaactccagccggttctaagaaaactccaccctattgaggaaactcaggtcataccttcgccttactctcaggagacttactcctcaactcccaagcaaaaatccaaaactgaatctaaaaagcacggaagatggaaactctggttcctttaacactcacggtgtctggagtctcgaggccgtctttagaacccactggagtttaagtcaatacttttccaaaatgaataggatcgagggaactgtggtgcccattcaggcacctcccacttctcgccctgcgtaccaaaaaggcctttgtaccaatagataattaacagaagcaaggtattctgtgtcactccttgccagctgttctttgcagttcactgatgtgggatgtaaaatctgaaatgaaacttacgtagtcaaagatgataagtaaaaattttcccccacccccgatctgcaagtaatacattatcaacctgcgagatggcaggctgtcaccctgtacacagctataactcataattattttcaagccttgattttttttttaaataatgagaagaaaaagcaagccttatgtttgcgaaggacttcatttttatgtttcattttgcaaataagcagggggcgagtgcaattttcagcacatcaaattccggagaaagcacaattttttcaagtggtcggagaccatgaataatctctaaaatgtgactatatgtatatttgccttcatgtgctatagcgctaagccaagtgaccacatctcagtgtcacaacgacacctcaaatttagcatcctcttcatctccagacttacgacatgtttactgctcattttccaaatggccagcagccaggagtcccccaaagtcaggatatgcctttaatcactgcaagtagacagggtcagagctattggacactaagttttcttagatctcatttttaatcttttggtacccaaaggccaaataatacattctggcaagaatctgagaacatacatagagatacacgatggataatccacccaccaataaatcacaggcattctgtgccatggcagacagtgtttttgtggatcgatcctccgagacactgttagccatggtaagtgcagccagacgttatgtacaattcgttatgctttgtattaatggtggaagccctgaccatctcaaagagaaacagtgcgtttagtttagctgctaccaagggacaatgtcgcctacatttaacctattagtaagttgtactaaacaacatacttaggggaaagctgtgaatcaaatgtttttaggtattttttaaatcaacagtaacacttagagttctctcttgattacacattgcaatgtaaatcttagttcctttattttttcactcatttctttgcacctttgcaagtatctttttatagaaatcaaatcccctagtctattaatgactttgtctatcaattttttgattttcacaataggaagtagggatcttactttgcctttttttttttttttgtacaacttaaattttgaatagtttgtgagcatacaggaaaacctagtcttgaagtttctgtccagcagtttcacatctagtggagtgctgacatgcacacctcattgactagatgccaaacacacagtggctaaccttggtaaaaggatctcacctgcttttgtcagattggagctgcttcttgccatgtattttcctcctgactcaacagcaaatctgttttagttctaagtgttttgattctacaaggacctagtgatcagtaaccagatcgggccttgaaa

SEQ ID NO: 7075 - DNA, 4335 bp, Homo sapiens
  source 1..4335: mol_type = unassigned DNA
aagtccccggagccgaggcttcctccgcgtgagcgcggcgagtctggccgcggatgccctgtccggagtgctccgtgccgccccaggcttgccagggtccgcagcgagacatgcccgagccaggcgctgcatcgacctcgacttatctgtaagcagcggaagatcctgaaggcactaactaaggtatctccaggcaaccaaggatcttacctctcacattgagaaaaaccataacttcagagacatttcctggctccaaattcaagtcctttcagagacccctctactaattattttccagtaccactctccatggaataaaaggagttgcaaacatggcctttgtagatgcagggaaacccacgttccttttagagctgatgttaacccatgagaagcgaccacccctcgacgacttctccttcacggttcccacccaggagcacggccaactctcccccggaatccataacggctcacgcaaatagatttctttccgttcctcctcggagggctctccacatttatctgctcgagacgtggcagctccagaaccatggtcagtaaggacaccggcaaatgcatactcacaacgtcggagagtgaagtggaacccgccgcctgcctggccctggagatgaaatacgccctggaccccaaccggcagattaaaaaacggaacaaagccctgcaggtgcggtttaaggatatctgcgaggcacagaatgagcagagggacacacagctgtcctcgggccagctgggggagaagcgggaggccaagcccgtgtcctgcagagcagcctaccgcaaatacatgacagtgcccgcacgcaggtccatccccaacgtcaccaagagcacaggcgtgcagacctcgcccgaccttaagaagtgttaccagacgttccctctggaccgcaaaaaggggaacctcaaaagcctcccagctgcagatccctttaaaagccaaaacaatgggtttctaacagatgcgaaagagaagaacgaggctggacccatggaggaggcccggccatgtggcgcggggcgggtgcacaagaccacagccttggttttccattccaaccaacacatgaacacagtggaccagcctttgggggtcaactgcacagagccctgtaaaagcccggagccgctcagctatggagaagctgcgctccaaaactccactcggcctccatccgaagagcccgattaccagctgctcgggagggccaagcaggaccgggggaggccaaactccgaggagcccgctccacctgccctcaggagggtgtttaaaacggaggttgccaccgtttacgcacctgccctcagtgccagggcccccgagcctggtttgtcagactctgcagccgccagccagtggtcactctgcccggcagatgacgagcggaggagagccacacatctcaacgggctccaggcgccctcggaaactgccctggcctgctcacccccgatgcagtgcctgtcccccgaatgtagtgagcagccgtcgcagactcacaccccgccggggctggggaaccagcctagtcccacagcggttgctgcaggtgaagaatgccaacgaatcgtgcctcatacggaagtggtcgacctcaaagcacaacttcagatgatggagaacttgatcagttcaagccaagaaaccatcaaagtgctcttgggggtcattcaggagttggaaaaaggagaggcccatcgggaaggtgtggagctggattttaagcagcaagaagacaaactccagccggttctaagaaaactccaccctattgaggaaactcaggtcataccttcgccttactctcaggagacttactcctcaactcccaagcaaaaatccaaaactgaatctaaaaagcacggaagatggaaactctggttcctttaacactcacggtgtctggagtctcgaggccgtctttagaacccactggagtttaagtcaatacttttccaaaatgaataggatcgagggaactgtggtgcccattcaggcacctcccacttctcgccctgcgtaccaaaaaggcctttgtaccaatagataattaacagaagcaaggtattctgtgtcactccttgccagctgttctttgcagttcactgatgtgggatgtaaaatctgaaatgaaacttacgtagtcaaagatgataagtaaaaattttcccccacccccgatctgcaagtaatacattatcaacctgcgagatggcaggctgtcaccctgtacacagctataactcataattattttcaagccttgattttttttttaaataatgagaagaaaaagcaagccttatgtttgcgaaggacttcatttttatgtttcattttgcaaataagcagggggcgagtgcaattttcagcacatcaaattccggagaaagcacaattttttcaagtggtcggagaccatgaataatctctaaaatgtgactatatgtatatttgccttcatgtgctatagcgctaagccaagtgaccacatctcagtgtcacaacgacacctcaaatttagcatcctcttcatctccagacttacgacatgtttactgctcattttccaaatggccagcagccaggagtcccccaaagtcaggatatgcctttaatcactgcaagtagacagggtcagagctattggacactaagttttcttagatctcatttttaatcttttggtacccaaaggccaaataatacattctggcaagaatctgagaacatacatagagatacacgatggataatccacccaccaataaatcacaggcattctgtgccatggcagacagtgtttttgtggatcgatcctccgagacactgttagccatggtaagtgcagccagacgttatgtacaattcgttatgctttgtattaatggtggaagccctgaccatctcaaagagaaacagtgcgtttagtttagctgctaccaagggacaatgtcgcctacatttaacctattagtaagttgtactaaacaacatacttaggggaaagctgtgaatcaaatgtttttaggtattttttaaatcaacagtaacacttagagttctctcttgattacacattgcaatgtaaatcttagttcctttattttttcactcatttctttgcacctttgcaagtatctttttatagaaatcaaatcccctagtctattaatgactttgtctatcaattttttgattttcacaataggaagtagggatcttactttgcctttttttttttttttgtacaacttaaattttgaatagtttgtgagcatacaggaaaacctagtcttgaagtttctgtccagcagtttcacatctagtggagtgctgacatgcacacctcattgactagatgccaaacacacagtggctaaccttggtaaaaggatctcacctgcttttgtcagattggagctgcttcttgccatgtattttcctcctgactcaacagcaaatctgttttagttctaagtgttttgattctacaaggacctagtgatcagtaaccagatcgggccttgaaaaaaaaatgaagagtatgtcgtgtaaacattcttcgggggccaaacaacactgcagttgtatgctttaatttaaaacacacatgtgcacacacacatcctctgcggaaacactatatgaagttcgaatccctgaatatcaataaaaggaactgagaaatattttggtgcaagaacaatgaggaagttgatcctgtaacatgaaggaagtgtaactgtttcacgtagactaaatatttaaaaatgggtttcatgttttttatactgtttttaactaaagttataaaaatgtttccaacaagttctctctccttatgttttaagaatcccaactatctcagtaaattgaaataagggtattagcagttttctaattagtaacacaaatctgtctaaacaagaggacatcctagtacacaaaataatgtcactgtttcacaccagtctagaccaaaaaaaaataaaattaaaatgttcagagtcaaaaaggaacttctgaagataaattaattcatccctaaaaattaaagtgtgttcaaaatagaaaaactattgtcaaaatcatttcatagtttaattgcaacacgtcactaacagatggtgattcttctcttggaaagattcaagtaaaaacgctgatacaaaagcaaggtaaaacgcacagggttcccttatgtagatgtacacatggcattgcatatagagattaaattattatacttgtcgttaagttctttattaatttttaaataaaaaaatcaaagatgtttt

SEQ ID NO: 7076 - DNA, 4900 bp, Homo sapiens
  source 1..4900: mol_type = unassigned DNA
gtgaactgttgcaccgtgcaattgcacactataaatgtctttccttatctgtgtgtactcttatctcactgttctattttttctcctcatttatattaactctttcttacctttttttctgaacttctaggccttctctttccagaactggtggaagacaaatgaaacggccaagatggtaagaaacaagccgcatttctccttggggagactgataatttaaaaggtttgttgtgtcagaaacattcccagcttcatcaccaaccctttccttccacctctgcccactggagaccacttatatcccgaagcggacgcggcagctgaagtcaggaaaccatgcatcacattagcaggagccaactgcagactttaaactccgttcaacatgtggatgcggcagagaaatgacctgtccagacaagccggggcagctcataaactggttcatctgctccctgtgcgtcccgcgggtgcgtaagctctggagcagccggcgtccaaggacccggagaaaccttctgctgggcactgcgtgtgccatctacttgggcttcctggtgagccaggtggggagggcctctctccagcatggacaggcggctgagaaggggccacatcgcagccgcgacaccgccgagccatccttccctgagatacccctggatggtaccctggcccctccagagtcccagggcaatgggtccactctgcagcccaatgtggtgtacattaccctacgctccaagcgcagcaagccggccaatatccgtggcaccgtgaagcccaagcgcaggaaaaagcatgcagtggcatcggctgccccagggcaggaggctttggtcggaccatcccttcagccgcaggaagcggcaagggaagctgatgctgtagcacctgggtacgctcagggagcaaacctggttaagattggagagcgaccctggaggttggtgcggggtccgggagtgcgagccgggggcccagacttcctgcagcccagctccagggagagcaacattaggatctacagcgagagcgccccctcctggctgagcaaagatgacatccgaagaatgcgactcttggcggacagcgcagtggcagggctccggcctgtgtcctctaggagcggagcccgtttgctggtgctggaggggggcgcacctggcgctgtgctccgctgtggccctagcccctgtgggcttctcaagcagcccttggacatgagtgaggtgtttgccttccacctagacaggatcctggggctcaacaggaccctgccgtctgtgagcaggaaagcagagttcatccaagatggccgcccatgccccatcattctttgggatgcatctttatcttcagcaagtaatgacacccattcttctgttaagctcacctggggaacttatcagcagttgctgaaacagaaatgctggcagaatggccgagtacccaagcctgaatcgggttgtactgaaatacatcatcatgagtggtccaagatggcactctttgattttttgttacagatttataatcgcttagatacaaattgctgtggattcagacctcgcaaggaagatgcctgtgtacagaatggattgaggccaaaatgtgatgaccaaggttctgcggctctagcacacattatccagcgaaagcatgacccaaggcatttggtttttatagacaacaagggtttctttgacaggagtgaagataacttaaacttcaaattgttagaaggcatcaaagagtttccagcttctgcagtttctgttttgaagagccagcacttacggcagaaacttcttcagtctctgtttcttgataaagtgtattgggaaagtcaaggaggtagacaaggaattgaaaagcttatcgatgtaatagaacacagagccaaaattcttatcacctatatcaatgcacacggggtcaaagtattacctatgaatgaatgacaaaagaatcttctggctagggtgttagatatatttatgcatttttggttttgtttttaaatcaagcacatcaacctcaagcccgtttagcaatgaggcagtgtagatgaatacgtaaaataaatgactttaaccaagtagctataatgggacttagcactgtatgcatacttaaaaaggttttgaaaaacaaactacttgagaaatatttgtttatatttttctctaacatcatgctatgtgtcagtctgaacatctgacaacagaaatttcagttattattctagctaagttttgaaaacatttgtcatgctgtttaatagaaaactgcaaaccagagacactgactccattaataaaccatattttgtgccgttttgactgttctgaccaaatactaatgggaacaattcttgacgtttttctgttgctgattgttaacatagagcagtctctacactaccctgaggcaactctacattggaacactgaggcttacagcctgcaagagcatcagagctgaccatacatttaaacagaaatgctggtttatttgcaaaatcaccagtatattttctattgtgtctataaaaaatcagtcatttaagtacaagaatcatattttccattcctttttagaaatttattttgttgtccctatggaaatcattcacatctgacaatttatatgttaaagagttttactctctctattttggtccaatttgtatctagtggctgagaaattaaataattctaaagtatgaagttacctatctgaaaatgtacttacagagtatcattttaaaatggatgtctctttaaaaattttgttacttttaccaacaatgtaatataatttatgtatattttattaataatagtgaattccttaaaatttgttctatgtacttatatttaatttgatttaatggttactgcccagatattgagaattggttcaaatattgagtgtgtttcaatatattatctggcttatttcaacatgagtaatatgagcaaaataagttaaaacctgcgtctgatcaattttcctcatgactagaactaaaacagtaaatttggacaatattaagcctcaaataatcatctccaaactccttctaacactttttaaatcagattggaagacatggacaaatcaggttcatgtgttgcatctttatgtcctttgccaatatccaagatcatcacatatggtagatattcacatggagtttcaaattcagaatagattaccattaccttcctgcccttacacatcctactccttatttaaaagttctatttgtgacttttcatttcctgaaagtttaaaaatacaatttgagaatgtttataatacattctctcctgtcttttcacggttacgtctgttattgctgaaatacaccacattttctttgttctggtcaaggttaactcaatatctgtgtgaaagagaactactaacaacgttacaatagaggctagatttgaaaaaaaaaatctatagatctaattgatacaattgtagaacaaaatgtcaaaataatgttttaagtataagagaagatggaccaaggagagagagatcatttgaaaatctaattgtagcttttctaggctcacattcatgtactacttttagcacccttatgggctgtgctcgccccctggacagttgagctttggattatcttcctcttcaattttccctctattgacccgagtgtctccctctgcttctacagatttatagtactccttggctcttttgagtctccacttttactcactgtctctgggatttttaagatccttttcttctcttataaatcatcctcttaatgaaaattagcctaacaaaagtttggagactggaatcctactttgagccactgacttgaaataactcttttggcaagttgcctgacatcctgtcttaccaaggtggcatatttgcatttttactgcttaaaacatttttttttttttaccatctttatccaaatttatcatattgatggtaggactaacaggctttttagaagctggctttaactttgagtctcaagctacaatgctgttgggcagcctggtcttcccacgtgagggtttaactttgtttatttgcctccagttattccaaaatgcttattaaatgaaagtcccaggaacatgtttattttagtcacctttgctttttaacaattttgttttgtaatcaatgagtaattcatgatgaattatttttgactaatggatagccgaaggccaggcttttaattctaataggtaatgttcttcttttgtcttattgaaacaatgagaatactctgtgcatttcaaatgcactccgattatgctgtggttttattcacataagcacaatatgtgttttatttataacttcataacaaacttataatataataatttaccttagcagacatgcaaaagcttattcttgtgtgacttactttctttaagctaataatataaaaataaatatgtatcttaaaaatctataataaaacattagaaattaaagatatgtgctttttattttgcagatgagttcatttgcttttgtagatgtgttttcagagctaggtacagaggaatgtttgctacctttagcggtgaaaaaagaaagagagtcaagaattttgttggattgtgtttgtgtgtgcatatatttgatatcatcattatatttgtaatctttggacttgtaatcatagcctgtttattctactgtgccattaaatatactttaccttatacataacgaataaaatacctagaagtagatttatttacacactgtcttatgaaattcttatgtttatgtcagcacagaacaagcacacatttagagcattcatctgaaaattatatggaaattgaacatgggtcaaataaagatg

SEQ ID NO: 7077 - DNA, 4985 bp, Homo sapiens
  source 1..4985: mol_type = unassigned DNA
ctcgatcttttgaacttcatgagactgacatttctgagtctgtttgcgaacaggacactagagggctcccaggggttaaaaataagtggaaatttatttgaatgaaaactgattctctacggcatttcttttttccgaatttaaaattaaagtttattttgttaactattgtttttaaaagctttgtatctcttaaaaccatgcagcagtcagtttccaagttttgctttgcaatcagtagttttcaagggagcttttaaagctgaactgaaatgtttgaaatgtggaacactcttgaccatgaaatatgttctacttacatgcctcagcctttaaaagttctttgcattagagtcaaggattacattcttcctggagccaagcatggggccagctgtaaacaagccgcatttctccttggggagactgataatttaaaaggtttgttgtgtcagaaacattcccagcttcatcaccaaccctttccttccacctctgcccactggagaccacttatatcccgaagcggacgcggcagctgaagtcaggaaaccatgcatcacattagcaggagccaactgcagactttaaactccgttcaacatgtggatgcggcagagaaatgacctgtccagacaagccggggcagctcataaactggttcatctgctccctgtgcgtcccgcgggtgcgtaagctctggagcagccggcgtccaaggacccggagaaaccttctgctgggcactgcgtgtgccatctacttgggcttcctggtgagccaggtggggagggcctctctccagcatggacaggcggctgagaaggggccacatcgcagccgcgacaccgccgagccatccttccctgagatacccctggatggtaccctggcccctccagagtcccagggcaatgggtccactctgcagcccaatgtggtgtacattaccctacgctccaagcgcagcaagccggccaatatccgtggcaccgtgaagcccaagcgcaggaaaaagcatgcagtggcatcggctgccccagggcaggaggctttggtcggaccatcccttcagccgcaggaagcggcaagggaagctgatgctgtagcacctgggtacgctcagggagcaaacctggttaagattggagagcgaccctggaggttggtgcggggtccgggagtgcgagccgggggcccagacttcctgcagcccagctccagggagagcaacattaggatctacagcgagagcgccccctcctggctgagcaaagatgacatccgaagaatgcgactcttggcggacagcgcagtggcagggctccggcctgtgtcctctaggagcggagcccgtttgctggtgctggaggggggcgcacctggcgctgtgctccgctgtggccctagcccctgtgggcttctcaagcagcccttggacatgagtgaggtgtttgccttccacctagacaggatcctggggctcaacaggaccctgccgtctgtgagcaggaaagcagagttcatccaagatggccgcccatgccccatcattctttgggatgcatctttatcttcagcaagtaatgacacccattcttctgttaagctcacctggggaacttatcagcagttgctgaaacagaaatgctggcagaatggccgagtacccaagcctgaatcgggttgtactgaaatacatcatcatgagtggtccaagatggcactctttgattttttgttacagatttataatcgcttagatacaaattgctgtggattcagacctcgcaaggaagatgcctgtgtacagaatggattgaggccaaaatgtgatgaccaaggttctgcggctctagcacacattatccagcgaaagcatgacccaaggcatttggtttttatagacaacaagggtttctttgacaggagtgaagataacttaaacttcaaattgttagaaggcatcaaagagtttccagcttctgcagtttctgttttgaagagccagcacttacggcagaaacttcttcagtctctgtttcttgataaagtgtattgggaaagtcaaggaggtagacaaggaattgaaaagcttatcgatgtaatagaacacagagccaaaattcttatcacctatatcaatgcacacggggtcaaagtattacctatgaatgaatgacaaaagaatcttctggctagggtgttagatatatttatgcatttttggttttgtttttaaatcaagcacatcaacctcaagcccgtttagcaatgaggcagtgtagatgaatacgtaaaataaatgactttaaccaagtagctataatgggacttagcactgtatgcatacttaaaaaggttttgaaaaacaaactacttgagaaatatttgtttatatttttctctaacatcatgctatgtgtcagtctgaacatctgacaacagaaatttcagttattattctagctaagttttgaaaacatttgtcatgctgtttaatagaaaactgcaaaccagagacactgactccattaataaaccatattttgtgccgttttgactgttctgaccaaatactaatgggaacaattcttgacgtttttctgttgctgattgttaacatagagcagtctctacactaccctgaggcaactctacattggaacactgaggcttacagcctgcaagagcatcagagctgaccatacatttaaacagaaatgctggtttatttgcaaaatcaccagtatattttctattgtgtctataaaaaatcagtcatttaagtacaagaatcatattttccattcctttttagaaatttattttgttgtccctatggaaatcattcacatctgacaatttatatgttaaagagttttactctctctattttggtccaatttgtatctagtggctgagaaattaaataattctaaagtatgaagttacctatctgaaaatgtacttacagagtatcattttaaaatggatgtctctttaaaaattttgttacttttaccaacaatgtaatataatttatgtatattttattaataatagtgaattccttaaaatttgttctatgtacttatatttaatttgatttaatggttactgcccagatattgagaattggttcaaatattgagtgtgtttcaatatattatctggcttatttcaacatgagtaatatgagcaaaataagttaaaacctgcgtctgatcaattttcctcatgactagaactaaaacagtaaatttggacaatattaagcctcaaataatcatctccaaactccttctaacactttttaaatcagattggaagacatggacaaatcaggttcatgtgttgcatctttatgtcctttgccaatatccaagatcatcacatatggtagatattcacatggagtttcaaattcagaatagattaccattaccttcctgcccttacacatcctactccttatttaaaagttctatttgtgacttttcatttcctgaaagtttaaaaatacaatttgagaatgtttataatacattctctcctgtcttttcacggttacgtctgttattgctgaaatacaccacattttctttgttctggtcaaggttaactcaatatctgtgtgaaagagaactactaacaacgttacaatagaggctagatttgaaaaaaaaaatctatagatctaattgatacaattgtagaacaaaatgtcaaaataatgttttaagtataagagaagatggaccaaggagagagagatcatttgaaaatctaattgtagcttttctaggctcacattcatgtactacttttagcacccttatgggctgtgctcgccccctggacagttgagctttggattatcttcctcttcaattttccctctattgacccgagtgtctccctctgcttctacagatttatagtactccttggctcttttgagtctccacttttactcactgtctctgggatttttaagatccttttcttctcttataaatcatcctcttaatgaaaattagcctaacaaaagtttggagactggaatcctactttgagccactgacttgaaataactcttttggcaagttgcctgacatcctgtcttaccaaggtggcatatttgcatttttactgcttaaaacatttttttttttttaccatctttatccaaatttatcatattgatggtaggactaacaggctttttagaagctggctttaactttgagtctcaagctacaatgctgttgggcagcctggtcttcccacgtgagggtttaactttgtttatttgcctccagttattccaaaatgcttattaaatgaaagtcccaggaacatgtttattttagtcacctttgctttttaacaattttgttttgtaatcaatgagtaattcatgatgaattatttttgactaatggatagccgaaggccaggcttttaattctaataggtaatgttcttcttttgtcttattgaaacaatgagaatactctgtgcatttcaaatgcactccgattatgctgtggttttattcacataagcacaatatgtgttttatttataacttcataacaaacttataatataataatttaccttagcagacatgcaaaagcttattcttgtgtgacttactttctttaagctaataatataaaaataaatatgtatcttaaaaatctataataaaacattagaaattaaagatatgtgctttttattttgcagatgagttcatttgcttttgtagatgtgttttcagagctaggtacagaggaatgtttgctacctttagcggtgaaaaaagaaagagagtcaagaattttgttggattgtgtttgtgtgtgcatatatttgatatcatcattatatttgtaatctttggacttgtaatcatagcctgtttattctactgtgccattaaatatactttaccttatacataacgaataaaa

SEQ ID NO: 7078 - DNA, 4544 bp, Homo sapiens
  source 1..4544: mol_type = unassigned DNA
gtgaactgttgcaccgtgcaattgcacactataaatgtctttccttatctgtgtgtactcttatctcactgttctattttttctcctcatttatattaactctttcttacctttttttctgaacttctaggccttctctttccagaactggtggaagacaaatgaaacggccaagatggtaagaaacaagccgcatttctccttggggagactgataatttaaaaggtttgttgtgtcagaaacattcccagcttcatcaccaaccctttccttccacctctgcccactggagaccacttatatcccgaagcggacgcggcagctgaagtcaggaaaccatgcatcacattagcaggagccaactgcagactttaaactccgttcaacatgtggatgcggcagagaaatgacctgtccagacaagccggggcagctcataaactggttcatctgctccctgtgcgtcccgcgggtgcgtaagctctggagcagccggcgtccaaggacccggagaaaccttctgctgggcactgcgtgtgccatctacttgggcttcctggtgagccaggtggggagggcctctctccagcatggacaggcggctgagaaggggccacatcgcagccgcgacaccgccgagccatccttccctgagatacccctggatggtaccctggcccctccagagtcccagggcaatgggtccactctgcagcccaatgtggtgtacattaccctacgctccaagcgcagcaagccggccaatatccgtggcaccgtgaagcccaagcgcaggaaaaagcatgcagtggcatcggctgccccagggcaggaggctttggtcggaccatcccttcagccgcaggaagcggcaagggaagctgatgctgtagcacctgggtacgctcagggagcaaacctggttaagattggagagcgaccctggaggttggtgcggggtccgggagtgcgagccgggggcccagacttcctgcagcccagctccagggagagcaacattaggatctacagcgagagcgccccctcctggctgagcaaagatgacatccgaagaatgcgactcttggcggacagcgcagtggcagggctccggcctgtgtcctctaggagcggagcccgtttgctggtgctggaggggggcgcacctggcgctgtgctccgctgtggccctagcccctgtgggcttctcaagcagcccttggacatgagtgaggtgtttgccttccacctagacaggatcctggggctcaacaggaccctgccgtctgtgagcaggaaagcagagttcatccaagcagcagcagcagcgtgtctttccatgcgcttggcattctttattttcccagcctgggaggatatgagagttccagggaaatgctgtattggacatgcaagactcacctggggaacttatcagcagttgctgaaacagaaatgctggcagaatggccgagtacccaagcctgaatcgggttgtactgaaatacatcatcatgagtggtccaagatggcactctttgattttttgttacagatttataatcgcttagatacaaattgctgtggattcagacctcgcaaggaagatgcctgtgtacagaatggattgaggccaaaatgtgatgaccaaggttctgcggctctagcacacattatccagcgaaagcatgacccaaggcatttggtttttatagacaacaagggtttctttgacaggagtgaagataacttaaacttcaaattgttagaaggcatcaaagagtttccagcttctgcagtttctgttttgaagagccagcacttacggcagaaacttcttcagtctctgtttcttgataaagtgtattgggaaagtcaaggaggtagacaaggaattgaaaagcttatcgatgtaatagaacacagagccaaaattcttatcacctatatcaatgcacacggggtcaaagtattacctatgaatgaatgacaaaagaatcttctggctagggtgttagatatatttatgcatttttggttttgtttttaaatcaagcacatcaacctcaagcccgtttagcaatgaggcagtgtagatgaatacgtaaaataaatgactttaaccaagtagctataatgggacttagcactgtatgcatacttaaaaaggttttgaaaaacaaactacttgagaaatatttgtttatatttttctctaacatcatgctatgtgtcagtctgaacatctgacaacagaaatttcagttattattctagctaagttttgaaaacatttgtcatgctgtttaatagaaaactgcaaaccagagacactgactccattaataaaccatattttgtgccgttttgactgttctgaccaaatactaatgggaacaattcttgacgtttttctgttgctgattgttaacatagagcagtctctacactaccctgaggcaactctacattggaacactgaggcttacagcctgcaagagcatcagagctgaccatacatttaaacagaaatgctggtttatttgcaaaatcaccagtatattttctattgtgtctataaaaaatcagtcatttaagtacaagaatcatattttccattcctttttagaaatttattttgttgtccctatggaaatcattcacatctgacaatttatatgttaaagagttttactctctctattttggtccaatttgtatctagtggctgagaaattaaataattctaaagtatgaagttacctatctgaaaatgtacttacagagtatcattttaaaatggatgtctctttaaaaattttgttacttttaccaacaatgtaatataatttatgtatattttattaataatagtgaattccttaaaatttgttctatgtacttatatttaatttgatttaatggttactgcccagatattgagaattggttcaaatattgagtgtgtttcaatatattatctggcttatttcaacatgagtaatatgagcaaaataagttaaaacctgcgtctgatcaattttcctcatgactagaactaaaacagtaaatttggacaatattaagcctcaaataatcatctccaaactccttctaacactttttaaatcagattggaagacatggacaaatcaggttcatgtgttgcatctttatgtcctttgccaatatccaagatcatcacatatggtagatattcacatggagtttcaaattcagaatagattaccattaccttcctgcccttacacatcctactccttatttaaaagttctatttgtgacttttcatttcctgaaagtttaaaaatacaatttgagaatgtttataatacattctctcctgtcttttcacggttacgtctgttattgctgaaatacaccacattttctttgttctggtcaaggttaactcaatatctgtgtgaaagagaactactaacaacgttacaatagaggctagatttgaaaaaaaaaatctatagatctaattgatacaattgtagaacaaaatgtcaaaataatgttttaagtataagagaagatggaccaaggagagagagatcatttgaaaatctaattgtagcttttctaggctcacattcatgtactacttttagcacccttatgggctgtgctcgccccctggacagttgagctttggattatcttcctcttcaattttccctctattgacccgagtgtctccctctgcttctacagatttatagtactccttggctcttttgagtctccacttttactcactgtctctgggatttttaagatccttttcttctcttataaatcatcctcttaatgaaaattagcctaacaaaagtttggagactggaatcctactttgagccactgacttgaaataactcttttggcaagttgcctgacatcctgtcttaccaaggtggcatatttgcatttttactgcttaaaacatttttttttttttaccatctttatccaaatttatcatattgatggtaggactaacaggctttttagaagctggctttaactttgagtctcaagctacaatgctgttgggcagcctggtcttcccacgtgagggtttaactttgtttatttgcctccagttattccaaaatgcttattaaatgaaagtcccaggaacatgtttattttagtcacctttgctttttaacaattttgttttgtaatcaatgagtaattcatgatgaattatttttgactaatggatagccgaaggccaggcttttaattctaataggtaatgttcttcttttgtcttattgaaacaatgagaatactctgtgcatttcaaatgcactccgattatgctgtggttttattcacataagcacaatatgtgttttatttataacttcataacaaacttataatataataatttaccttagcagacatgcaaaagcttattcttgtgtgacttactttctttaagctaataatataaaaataaatatgtatcttaaaaatctataataaaacattagaaattaaa

SEQ ID NO: 7079 - DNA, 701 bp, Homo sapiens
  source 1..701: mol_type = unassigned DNA
aattcacatgaacacccacatatcttttaaaacccgctttctcaccactgtgacagaattttatctcttcacttgttgagatttctctagagagtccagtactgcatcattttgacaaacctgaatgtggagagatgaatgcttctcatctctgaaacacttcaggatggccgcccatgccccatcattctttgggatgcatctttatcttcagcaagtaatgacacccattcttctgttaagctcacctggggaacttatcagcagttgctgaaacagaaatgctggcagaatggccgagtacccaagcctgaatcgggttgtactgaaatacatcatcatgagtggtccaagatggcactctttgattttttgttacagatttataatcgcttagatacaaattgctgtggattcagacctcgcaaggaagatgcctgtgtacagaatggattgaggccaaaatgtgatgaccaaggttctgcggctctagcacacattatccagcgaaagcatgacccaaggcatttggtttttatagacaacaagggtttctttgacaggagtgaagataacttaaacttcaaattgttagaaggcatcaaagagtttccagcttctgcagtttctgttttgaagagccagcacttacggcagaaacttcttcagtctctgtttcttgataaagtgtattgggaaag

SEQ ID NO: 7080 - DNA, 548 bp, Homo sapiens
  source 1..548: mol_type = unassigned DNA
tttaatatttgagagagtgagaagccagcaaagcctatggccgcccatgccccatcattctttgggatgcatctttatcttcagcaagtaatgacacccattcttctgttaagctcacctggggaacttatcagcagttgctgaaacagaaatgctggcagaatggccgagtacccaagcctgaatcgggttgtactgaaatacatcatcatgagtggtccaagatggcactctttgattttttgttacagatttataatcgcttagatacaaattgctgtggattcagacctcgcaaggaagatgcctgtgtacagaatggattgaggccaaaatgtgatgaccaaggttctgcggctctagcacacattatccagcgaaagcatgacccaaggcatttggtttttatagacaacaagggtttctttgacaggagtgaagataacttaaacttcaaattgttagaaggcatcaaagagtttccagcttctgcagtttctgttttgaagagccagcacttacggcagaaacttcttcagtctctgttt

SEQ ID NO: 7081 - DNA, 574 bp, Homo sapiens
  source 1..574: mol_type = unassigned DNA
ttttctccacccacggttcacatttggacagcagcagcagcagcgtgtctttccatgcgcttggcattctttattttcccagcctgggaggatatgagagttccagggaaatgctgtattggacatgcaagaatggccgcccatgccccatcattctttgggatgcatctttatcttcagcaagtaatgacacccattcttctgttaagctcacctggggaacttatcagcagttgctgaaacagaaatgctggcagaatggccgagtacccaagcctgaatcgggttgtactgaaatacatcatcatgagtggtccaagatggcactctttgattttttgttacagatttataatcgcttagatacaaattgctgtggattcagacctcgcaaggaagatgcctgtgtacagaatggattgaggccaaaatgtgatgaccaaggttctgcggctctagcacacattatccagcgaaagcatgacccaaggcatttggtttttatagacaacaagggtttctttgacaggagtgaagataacttaaacttcaaattgttagaaggcatcaaaga

SEQ ID NO: 7082 - DNA, 584 bp, Homo sapiens
  source 1..584: mol_type = unassigned DNA
actataaatgtctttccttatctgtgtgtactcttatctcactgttctattttttctcctcatttatattaactctttcttacctttttttctgaacttctaggccttctctttccagaactggtggaagacaaatgaaacggccaagatggtaagatggccgcccatgccccatcattctttgggatgcatctttatcttcagcaagtaatgacacccattcttctgttaagctcacctggggaacttatcagcagttgctgaaacagaaatgctggcagaatggccgagtacccaagcctgaatcgggttgtactgaaatacatcatcatgagtggtccaagatggcactctttgattttttgttacagatttataatcgcttagatacaaattgctgtggattcagacctcgcaaggaagatgcctgtgtacagaatggattgaggccaaaatgtgatgaccaaggttctgcggctctagcacacattatccagcgaaagcatgacccaaggcatttggtttttatagacaacaagggtttctttgacaggagtgaagataacttaaacttcaaattgtta

SEQ ID NO: 7083 - DNA, 3425 bp, Homo sapiens
  source 1..3425: mol_type = unassigned DNA
actgttgcaccgtgcaattgcacactataaatgtctttccttatctgtgtgtactcttatctcactgttctattttttctcctcatttatattaactctttcttacctttttttctgaacttctaggccttctctttccagaactggtggaagacaaatgaaacggccaagatggtaagaaacaagccgcatttctccttggggagactgataatttaaaaggtttgttgtgtcagaaacattcccagcttcatcaccaaccctttccttccacctctgcccactggagaccacttatatcccgaagcggacgcggcagctgaagtcaggaaaccatgcatcacattagcaggagccaactgcagactttaaactccgttcaacatgtggatgcggcagagaaatgacctgtccagacaagccggggcagctcataaactggttcatctgctccctgtgcgtcccgcgggtgcgtaagctctggagcagccggcgtccaaggacccggagaaaccttctgctgggcactgcgtgtgccatctacttgggcttcctggtgagccaggtggggagggcctctctccagcatggacaggcggctgagaaggggccacatcgcagccgcgacaccgccgagccatccttccctgagatacccctggatggtaccctggcccctccagagtcccagggcaatgggtccactctgcagcccaatgtggtgtacattaccctacgctccaagcgcagcaagccggccaatatccgtggcaccgtgaagcccaagcgcaggaaaaagcatgcagtggcatcggctgccccagggcaggaggctttggtcggaccatcccttcagccgcaggaagcggcaagggaagctgatgctgtagcacctgggtacgctcagggagcaaacctggttaagattggagagcgaccctggaggttggtgcggggtccgggagtgcgagccgggggcccagacttcctgcagcccagctccagggagagcaacattaggatctacagcgagagcgccccctcctggctgagcaaagatgacatccgaagaatgcgactcttggcggacagcgcagtggcagggctccggcctgtgtcctctaggagcggagcccgtttgctggtgctggaggggggcgcacctggcgctgtgctccgctgtggccctagcccctgtgggcttctcaagcagcccttggacatgagtgaggtgtttgccttccacctagacaggatcctggggctcaacaggaccctgccgtctgtgagcaggaaagcagagttcatccaaggtaacagattcacatgcttcgttatttgcagctgttggggattctggttcattttcttttttccctcactctctttttctaaatgatttttctccacccacggttcacatttggacagcagcagcagcagcgtgtctttccatgcgcttggcattctttattttcccagcctgggaggatatgagagttccagggaaatgctgtattggacatgcaagagtaagcccatactgtataatctttgctctccatttccctcgcttcacttcccagtggcttattaaatctaattaaagccaacggcaatttgcatgatgaggagaggaagctaggctggaggcaaagaacttgctgacagtcaggcatactattaaataggttactatgggaggaagtagaagtttttaaaagtaagggggaagcgggttatcgttcttgagcagatggaatcttcttaagccgcgcagagccagaccatgttaggtttaaccccccctttttttttcaatggatttaacctctttatttaacaaataaaaagaatgagcaaaaattggtgatttgttcagtatgtatactaactagctgtgtggttttatcaagcccctgactatgatctattgagtctgtctttcaagattctcccgtcttgggtgacaaacattttggcaggttctaacacatgtagccagttactgcagttgccagcaaaaggactggtctgcggtcatgcccatgccatataaaggatattctctgaatattaaagctattccagggctcgaatacaaagtacagtgagtcagtggcttatgtttgaatgcagaatgatgccagaagttacaactttgaatccagattggcccaagaggctaaaatgtaccccaaagagattataagctgaaaggatacttaactttctccatgttaccatgaaatttagcatttcagtgaggttcccagggagcctagaatggaatggattaaaatccctgggagtggctgagacccaactgcatttccaatggctttagcattataatttcattttaaaatggatacccctggaagtaccagtgatttacttagaaaaattggacattccctactgatggtggttcttgtctaagtgctccagattcacaggtatgctttgatgtctcaagtttataaagcagtccaccacagttatgccaatgtaagaaaccttctcaaacatttaatctaatgttgataaaaatgaatttttattgggtgcccacaatttgctaaggattatacaaattgattcatatgtgttggctcctagaattttcataacaatgctatgaagtggggactattattatttccatttagtagatgagaaaattgaggcttattgagacaaagtaattggcctcaactcccacagctagtaggtggctaagctgggttttgactatagacccagcaaacttcagaacataacttcttagccactggacttaggtgaatatgtaacttattatccaaactggaaccgtgtggcgtgaaaggagatgctggtgggcattgggacaacaggcccacactgactgttctgagcagagtagagcacaggatcccccttgttatgctgaaatcccattcattttcatgtcataaaggccccagagaggagaagatgaactcctgtgtatatcctgaggcagagttctctgatatgtcctttgagcttcccttagacgctcttagactactgtattgggagaatgcagtagtggctaagagcctgggccgtggagttggactgactaggtttgaacttaccaatcatacgacttggaaatgttgccatgtctctttatgcctcagtttcctcagctgtaaaatgacaatactgcctaccatatgagattgttgttagttaatacagggaaaacacttagaaccagtatttgccacaagataaaccttcaataaatattggttattattattattattgtaccaagcacatgaggtaccaagttcattgaattcctcacataatctccaagtctcatgtgttacttcgttacgtgataggactatgactaaaactgctcaattaaacttttgtaatcccaa

SEQ ID NO: 7084 - DNA, 587 bp, Homo sapiens
  source 1..587: mol_type = unassigned DNA
attgtaaaatatagtatttttaggattatacaccatatgctaatcttttacccactcttcagtatcacaactttctttctctgtggggaggaaaaatccctgtcccctttctgtcttcttgccttttgattctatttgccatagtctaattgacaccccaaggtcatcagcccctgcctttgtgctaggacacgcaaaccacccaggccaatccctaacctgttttttcaaaaaacctccaatcagagagaatccacgacttccttttgtgaactgttgcaccgtgcaattgcacactataaatgtctttccttatctgtgtgtactcttatctcactgttctattttttctcctcatttatattaactctttcttacctttttttctgaacttctaggccttctctttccagaactggtggaagacaaatgaaacggccaagatgaccacttatatcccgaagcggacgcggcagctgaagtcaggaaaccatgcatcacattagcaggagccaactgcagactttaaactccgttcaacatgtggatgcggcagagaaatgacctgtccagacaagccggggcag

SEQ ID NO: 7085 - DNA, 2014 bp, Homo sapiens
  source 1..2014: mol_type = unassigned DNA
gatactttagagcggagggatgtattgaaacagactactgctacttacagcaccgtatagcagccctgctcctacattttgctgccttactctgccccgaatgcactggagtggggatggtccatcggcaactataaactgattctcatcaggaaactgcacattatctccccatcacttcaaaggtctcgtcaggcagaggtgacgccaggagatgatttaaaggtgaaaatgacaaggtttccacccctcaaaccttggctccttttctgacaatacagtctgaatgaacccgatgtctttttttttactgtggaaataggatcggaagagagtaacatttttttttttttaatcctgataaagaagattgttgggaagctctttgaaaaaaaattttaaattgtggcacagatggattttaaaaagtgttagatctttccaatgaacactaatagagtactctgctcttggctggatttttcagagaatggcaatggtctctgcgatgtcctgggtcctgtatttgtggataagtgcttgtgcaatgctactctgccatggatcccttcagcacactttccagcagcatcacctgcacagaccagaaggagggacgtgtgaagtgatagcagcacaccgatgttgtaacaagaatcgcattgaggagcggtcacaaacagtaaagtgttcctgtctacctggaaaagtggctggaacaacaagaaaccggccttcttgcgtcgatgcctccatagtgattgggaaatggtggtgtgagatggagccttgcctagaaggagaagaatgtaagacactccctgacaattctggatggatgtgcgcaacaggcaacaaaattaagaccacgagaattcacccaagaacctaacagaagcatttgtggtagtaaaggaaaaccaaccctctggaaaatacattttgagaatctcaaacatctcacatatatacaagccaaatggatttcttacttgcactttgactggctaccagataatcacagtgcgtttactgtgtgtaacgaaatatcctacagtgagaagacacagcgttttggcaacaccatggaaagtgggcttaaaaaagggttttctcagtgaaatttttgggcatcatgaagaacgatcaactatcttctaatttgaatctatagttactttgtaccatttgaaatatatgtatatatatatatataatattttgaaatattatctattctcttcaagaaatgaacagtaccacagtttgagacggctggtgtacccctttgagttttggatgttttgtctgttttgctttgttttgttagtcatttctttttctaacggcaaggaagatatgtgcccttttgagaattcaagatggcactgacacgggaaggccagctacaggtggactcctggaatttgaggcatcataatgatactgaatcaagaacttccttctgcttctaccagatggcccaaggaagcacatcgtcctgttttattgctttctaccctgtgcaatattagcatgcaagcttggcttacatagtcatactttatattcaattgatatataataaccgttctaacctcttccaggaaaatatttttagaactactagcttttccacttagaagaaaatgaggattcttaagggagccactccaccatgctattaagactctggcagagttatgggtaggatatggatccctacatgaataagtcctgtaaatacaatgtcttaaggctttgtatagctgtcctagactgcagaaatgtcctctgattaaatccaaagtctggcatcgttaactacatagtgctgtagcaacaagtcttatcatggcatctctttctatgtttggtttgctttttccaagagtattcaggtctcctcttgtgagataggaaggccatgaaaacaattagatttcaagatgatctatgtgaccaaatgttggacagccctattaaagtggtaaacaacttctttctaaaccta

SEQ ID NO: 7086 - DNA, 1917 bp, Homo sapiens
  source 1..1917: mol_type = unassigned DNA
agacttgcaatgaagttagaatgaacaggaggagtctgcagcttttcagtgcctgggataactatagtttaaagatcattgtgtaaaataggatttttagtcagcatgcattgttttaaaccgactaactgatagcctaaaactttatttttgcattttgccaatccttggagttttgttttgcagaattaagaaaaaaatgaatgtatgatcatctgaaaagggctttctctcaatcccacttcatggcatgacctctgctggatcattagttctagccagagaagtagcaaaggaacatgacgtctgagacctcccttccctcatcagtggggctgactgagctgggggcttgaagccggaggtaacctttcctgtcgaatgttctctttagagaatggcaatggtctctgcgatgtcctgggtcctgtatttgtggataagtgcttgtgcaatgctactctgccatggatcccttcagcacactttccagcagcatcacctgcacagaccagaaggagggacgtgtgaagtgatagcagcacaccgatgttgtaacaagaatcgcattgaggagcggtcacaaacagtaaagtgttcctgtctacctggaaaagtggctggaacaacaagaaaccggccttcttgcgtcgatgcctccatagtgattgggaaatggtggtgtgagatggagccttgcctagaaggagaagaatgtaagacactccctgacaattctggatggatgtgcgcaacaggcaacaaaattaagaccacgagaattcacccaagaacctaacagaagcatttgtggtagtaaaggaaaaccaaccctctggaaaatacattttgagaatctcaaacatctcacatatatacaagccaaatggatttcttacttgcactttgactggctaccagataatcacagtgcgtttactgtgtgtaacgaaatatcctacagtgagaagacacagcgttttggcaacaccatggaaagtgggcttaaaaaagggttttctcagtgaaatttttgggcatcatgaagaacgatcaactatcttctaatttgaatctatagttactttgtaccatttgaaatatatgtatatatatatatataatattttgaaatattatctattctcttcaagaaatgaacagtaccacagtttgagacggctggtgtacccctttgagttttggatgttttgtctgttttgctttgttttgttagtcatttctttttctaacggcaaggaagatatgtgcccttttgagaattcaagatggcactgacacgggaaggccagctacaggtggactcctggaatttgaggcatcataatgatactgaatcaagaacttccttctgcttctaccagatggcccaaggaagcacatcgtcctgttttattgctttctaccctgtgcaatattagcatgcaagcttggcttacatagtcatactttatattcaattgatatataataaccgttctaacctcttccaggaaaatatttttagaactactagcttttccacttagaagaaaatgaggattcttaagggagccactccaccatgctattaagactctggcagagttatgggtaggatatggatccctacatgaataagtcctgtaaatacaatgtcttaaggctttgtatagctgtcctagactgcagaaatgtcctctgattaaatccaaagtctggcatcgttaactacatagtgctgtagcaacaagtcttatcatggcatctctttctatgtttggtttgctttttccaagagtattcaggtctcctcttgtgagataggaaggccatgaaaacaattagatttcaagatgatctatgtgaccaaatgttggacagccctattaaagtggtaaacaacttctttctaaa

SEQ ID NO: 7087 - DNA, 648 bp, Homo sapiens
  source 1..648: mol_type = unassigned DNA
caggatttaagacactttgaaaatgggcaaagcctcatttttcctaggtcaaaaggagttcaagattggggaaatctgaggattcagaaggatgataaatatgtcaccagcactaacacctgtcctagttccagctctggtgaactccagcagacctgctcaagtggacagcattagggaccttgtcagttttgcagtgctttttgcctgaagccacctcaggtccctcatgctgcagttccttttggccgcaatctgaatgcagtcctgtatgggataaaggaatatcataagtatatattttttaaaacagcaacacgattcatgactctgttgcagaatgtgaaggagcaagtctctcaattggctaattgaatcaagctctgcaatttccttcttccctggagcctgatcctgcaggacaaggatctattttcaagtcaattacaattcctaagggatataattacctacaaaatcagcaaaggaaccctatttctcttatgaaggagggacgtgtgaagtgatagcagcacaccgatgttgtaacaagaatcgcattgaggagcggtcacaaacagtaaagtgttcctgtctacctggaaaagtggctggaacaacaagaaaccggccttcttgcgtcgatgg

SEQ ID NO: 7088 - DNA, 159 bp, Homo sapiens
  source 1..159: mol_type = unassigned DNA
ccagaaggagggacgtgtgaagtgatagcagcacaccgatgttgtaacaagaatcgcattgaggagcggtcacaaacagtaaagtgttcctgtctacctggaaaagtggctggaacaacaagaaaccggccttcttgcgtcgatggtgctattatttga

SEQ ID NO: 7089 - DNA, 2292 bp, Homo sapiens
  source 1..2292: mol_type = unassigned DNA
aatcagcgcgttccgcggcgggcccggcccctcctggtcagcgcgctagctgggctcggctccgcactgctagctgcgcgccgccctggacggggcgcaccgactgcgcgcgcggctgcgggcaaacatcgggagtcctgcctcagctgccgcttctccagcagcagcttcaggcttctcccgcaggagcttcgggcttctcctggtagagacgtgggaacttttcttctcctggcgaggctgcagaggtgatgggccgctcccggggctcccgcggggaggcggcacggtgagcgtcctcgggctccggtgcggcgatcagtacctagttccggacgcgccggtccgacttggatgccggctctagtcgagtcttctgagctacgataattttttggaacggcagaaatgattggttctagcaacagatgggaatttggagtcactctgaaatatatcctggaataagtgtgtttgactagaaccacatcttatgaggtccccaaggatgagagtctgtgctaagtcagtgttgctgtcgcactggctctttctagcctacgtgttaatggtgtgctgtaagctgatgtccgcctcaagccagcacctccggggacatgcaggtcaccaccaaatcaagcaagggacctgtgaggtggtcgccgtgcacaggtgctgcaataagaaccgcatagaagagcggtcacaaacggtcaagtgctcttgcttcccgggacaggtggcgggcacaactcgggctcaaccttcttgtgttgaagcttccattgtgattcagaaatggtggtgtcacatgaatccgtgtttggaaggagaggattgtaaagtgctgccagattactcaggttggtcctgtagcagtggcaataaagtcaaaactacgaaggtaacgcggtagcgaagagagaggtgtgcttcaatcctggaggggcagcaggaggcggagctcttttgcttggattcccatcatggcccctttgcagaaaattgtctaggatttcagcaacttcatatttgtatatgtgagctgtgagaggtggcattcacttaactggcccagccctctctgcttcgtgattttatttcattgaattataaccacaagccaccacccatttgacatcctctctggattcccaaggagcatacctccaaaatccgagaagagcaaatcagagtcttcaaaatggatcaccactaagggcatgttcattcttcactttctttctgcttttacaaaagaacttggatgtatgttccaaagggtcctcattctgttcctcttttgaacttttccttttgtccttgtattaaagtggttttaaaggggtctaaaaagattttggcaaaacatatttgcagatgtagattagctggtgaagaaaattactgctagagatcaactgattaactggtaaagaacgtttattttataacccttgaagaatagaaggacatagttggattattgtgtgtgcattgtatttttacttctattttttttttgctttccattttccagttagcagagataaaatgagagcgttttaacttcaatgtaccattttactgagtgctaaggaagcatatcaattccaatattttataaccaaagctctatcagaacatatttataaaacttgttggaatttttacggcttttgtgtagtcatgtaggtaaatcatttaaaatataaaacaatctcaatttagatcaagggttatttcttagatcaaatttatgccaattatatgaaaagattttaactccgagacaggagtctttcagtgctgaatttttagactgtaaatgagttcttcttaacttagctgtttccctacttctgtgacttctgtgttagccatcttatttctttaaaatctgagtcctgattggcttaatgattttgcagcagacatgtctccacatattctcaaatgctgtcatgcggaaacgtatgaaacagatgaagaatgactgacccagattttagatgtataatgttgttaaagtacatactactgtaaaaatatgggatgaattttatatattaagaaatgccaaaaacatagtttctgcaccaagttaattatccctgtcctttcacatttatagggggaaaataaatactttaatgttgtttatagcctaacagttatttgattttattcttgcagagggaatggaaaggaatggaaagatttgttggcgtaatttttgaatatttgttatgatcatatgaataagtaaaaaaattcatcctgctgatggca

SEQ ID NO: 7090 - DNA, 602 bp, Homo sapiens
  source 1..602: mol_type = unassigned DNA
gcgctagctgggctcggctccgcactgctagctgcgcgccgccctggacggggcgcaccgactgcgcgcgcggctgcgggcaaacatcgggagtcctgcctcagctgccgcttctccagcagcagcttcaggcttctcccgcaggagcttcgggcttctcctggtagagacgtgggaacttttcttctcctggcgaggctgcagaggtgatgggccgctcccggggctcccgcggggaggcggcacggtcttctgagctacgataattttttggaacggcagaaatgattggttctagcaacagatgggaatttggagtcactctgaaatatatcctggaataagtgtgtttgactagaaccacatcttatgaggtccccaaggatgagagtctgtgctaagtcagtgttgctgtcgcactggctctttctagcctacgtgttaatggtgtgctgtaagctgatgtccgcctcaagccagcacctccggggacatgcaggtcaccaccaaatcaagcaagggacctgtgaggtggtcgccgtgcacaggtgctgcaataagaaccgcatagaagagcggtcacaaacggtcaagtgctcttg

SEQ ID NO: 7091 - DNA, 1300 bp, Homo sapiens
  source 1..1300: mol_type = unassigned DNA
gggggcagtgaatgaatttggcatttatttccttaaacttgtaaggaaagtgaaagtgtaaagataagaaatatgactttaaaataaaaaagtctttggttgtaatcattcgtcatgcctctgatacagatttccagtcttagatataaatatttcaggatcgagacgctttcatctttctctgccttgcaagaagggaagattggaaacaatcttccttaaagtaagcagctttaatcattgtttctaaatcaactgaactgtgtagggaaaaaaagaagatgtaagaatcctataatccctggtttagttgtaatgaaaatgtccaggctgagaagggaacagatggattttgattaatttctactaagaccagcaagtatcaacctcaatattctttataaacttgtcagggtaaatgttatgtagtcataagagaatgaagaaaaaaagatttataactgggttatgaagagttaaagaggatatacttaaaaacacgatccttagcaacatgtcaaaaatgcagattcattgaatcacggcaatttttttcagagactgtttcagatttgttcctttaaaacgaagttgatatttttaagaagaggacttgtacccattgccttgggtatccagtgcagtgggccacaacatacccactacataggcttaacggtatagagtgatatatttacatagaggaaatggagaattattaatgaactatgtgatcgttgtgcctcccatcactggaatgtggaaacgtatatttactgcctgaaatgacttcacttgctgagctctgaaccacagtatttcataaatgattaacattagatggagtcagtgggaacctcacaacatttcttaaacagcattccacaagaaagaatttctcacaattgtaaggacttgcatgctggagagaaggcaagcaaggaacaaacagcactgtaaattgaataccagcagctcacgacttgaactgccattggaacccaggtcttctgagctacgataattttttggaacggcagaaatgattggttctagcaacagatgggaatttggagtcactctgaaatatatcctggaataagtgtgtttgactagaaccacatcttatgaggtccccaaggatgagagtctgtgctaagtcagtgttgctgtcgcactggctctttctagcctacgtgttaatggtgtgctgtaagctgatgtccgcctcaagccagcacctccggggacatgcaggtcaccaccaaatcaagcaagggacctgtgaggtggtcgccgt

SEQ ID NO: 7092 - DNA, 3668 bp, Homo sapiens
  source 1..3668: mol_type = unassigned DNA
actggggactacatttcaacatgagatttggaggggacaaacatccaaaccatatctgatggcgacacaagatgtacagagagcagatgaaccttacctccctggaccccccactgcagctccgactcgaggccagctgggtccagttccacctgggtattaaccgccatgggctctactcccggtccagccctgttgtcagcaaacttctgcaagacatgaggcactttcccaccatcagtgctgattacagtcaagatgagaaagccttgctgggggcatgtgactgcacccagattgtgaaacccagtggggtccacctcaagctggtgctgaggttctcggatttcgggaaggccatgttcaaacccatgagcagcgagatgaggagacaccagtggacttcttctacttcattgactttcagagacacaatgctgagatcgcagctttccatctggacaggattctggacttccgacgggtgccgccaacagtggggaggatagtaaatgtcaccaaggaaatcctagaggtcaccaagaatgaaatcctgcagagtgttttctttgtctctccagcgagcaacgtgtgcttcttcgccaagtgtccatacatgtgcaagacggagtatgctgtctgtggcaacccacacctgctggagggttccctctctgccttcctgccgtccctcaacctggcccccaggctgtctgtgcccaacccctggatccgctcctacacactggcaggaaaagaggaccccaggacttcttctccccctcaggtgggaggtcaatcccctttactgtgacacagtgaaacagatctacccgtacaacaacagccagcggctcctcaatgtcatcgacatggccatcttcgacttcttgatagggaatatggaccggcaccattatgagatgttcaccaagttcggggatgatgggttccttattcaccttgacaacgccagagggttcggacgacactcccatgatgaaatctccatcctctcgcctctctcccagtgctgcatgataaaaaagaaaacacttttgcacctgcagctgctggcccaagctgactacagactcagcgatgtgatgcgagaatcactgctggaagaccagctcagccctgtcctcactgaaccccacctccttgccctggatcgaaggctccaaaccatcctaaggacagtggaggggtgcatagtggcccatggacagcagagtgtcatagtcgacggcccagtggaacagttggccccagactctggccaggctaacttgacaagctaagggctggcagagtccagtttcagaaaatacgcctggagccagagcagtcgactcgagtgccgaccctgcgtcctcactcccacctgttactgctgggagtcaagtcagctaggaaggaagcaggacattttctcaaacagcaagtggggcccatggaactgaatctttactccttggtgcaccgcttctgtcgtgcgttgccttgctccgtttttcccaaaaagcactggcttcatcaaggccaccgacgatctcctgagtgcactgggaaatctgggtataggtcaggcttggcagccttgatcccaggagagtactaatggtaacaagtcaaataaaaggacatcaagtggatacctgacttctcaggatccttattctagctacaagtcaaagataactcctggtccagacaaaacacctggcctatcacaagctgactaaaaatctgcactttgggccagcgcaggcaacagtaactctgacaggttcaaattagacctcacactttctactcatattctagtcactggacccatctgaatcagtaatccctactgcccggtcctggagtaacttcttagagatattataacaagtggcaaaaataaaagagggatttgctaagaatatcagaaaaggagtgttccaatttgaagagtattacaattgaaataacatcaaatatgtcacactaagcagccagtaacagaataaataattacaacgaaggaaaaaaaaaggaaagtcctccaaggtcaggatggcatgggaacaggcctagcagggacacaagcctggagtaaggcaggaaaagagccaaggctgactacagcccaccaaccacaatcttcttccctaagaccccaggattgtccccggcccatccccaaaagaagaaaggggctatgtggaaaggtgaggccctctagatgcccctccctgtgacggctggctcaaaaaagactaagtcaggttttttattgaagcctcccttagaagaaagtgtagtagggattccttgtctcctctaccttctccctgacttgttgatatctgaaactccttttaataggaggctttgtttcttattccataattaatgaccgaaaacacaaaggacagtaaggtcttcattccatggagtgactagtcagtcaacaaaagtaaaaatgcctcatttcatcaaatcaacttttccagtaaaggccagagttcaaatactgtaagcatgagaatagaatggagctgtcactaaagagagtacaaggtcaagaaccagaaatgtctccaagctttctgcagtgtgagcaaagatagcctcgactggacaaataacacttctgaccccgtggtacccccacatgactggtatgctgcccctggactttgtgtctctctaaaatcactaccattcactgagatctgaccaggtgaggcactcaccaacgctacagaagcaacacacaggtttccaatcctctcaaacacagatacaacccccatcctccaatgtgcatggaagaactttaaatctcagagagagtaagcaaaatcacacaatttagtggtttagacctattccaaagtcttcttttcactgtaacacaaaacccaacagtatcccacccaatttatgaagtcaaatttgtttgcttaaaaaaaaaatcagctgggcatgggctcacacctgtaatcccagcactttgggcctaaacaggcagatcgcttggtctcaggagctcgagaccagcctgggtaacatgacaaaaccctgtctctacaaaaaaatacaaaaaaaaaaaaatttttttttaaatcaactctttaacagagaaaccttaatcccaaagatttccttaactgttgtggccctactgcagcatagggctccccacttcattcactgtctctcctgcttcaagatgtttcttccctgtggatgaagaaccaggagatcacacacagaaatgggaaaatatctgggtaaaaacattcaaagaatagcacaaaatggtttgggacttccaaataagactctcaggaaagcaggctacagctctacctcaaaacccgccacctcctataacgaaggactggttttccaatggcctatatacacattttgctgcactctacaaacagaaagcaataggcttgaatttcaccatgatatgtggtacacctaccttattattcacttatctttcaaccttccattactttttgattagtaacaaaattaagactcatttctcaaaaatatcagaaaaccaaccgtttcattcttactcgagttcttccagcatgttcattttgaactgtttacctcccatgaaataaaaagtctcttgactctgagaa

SEQ ID NO: 7093 - DNA, 2955 bp, Homo sapiens
  source 1..2955: mol_type = unassigned DNA
gcagcgccggcttcggatcgggagttggccgtcagctgcgccagaggcaggtgccagcggagagtgggtgggggtgccggcgccaggccaggctcggggaggccccgcgctacctctgcctctaggagtccaggcgcacagacaagctccccggagccgctcctgcttcgccaactccccactcgcgccgcccgtgccagccgccggcactggcgtctccgccgcccgcaggaggagtcgcgggagcactagcagccgccgccgagcgacagcatcctcaggagagacgccccgggctttgcagccggcggcctccgtccgccctccgcggtcgccccccgccccgtcgcccgtccgcccgcggtggcagccggcgccggcgccccggggcccttcacctgccgcgagcgtccgggcgggcgggcgcacgggagaaaaggcgcaagaagcgggcaccccgggaaccccattccctcggctcactcggcgcggagaagcgacgcccgctgactccgagagccccggtgctccgtgcacctggtccccaagttgaggagcgacacccctccacaggggactagcccgcgcggggagcattccggtctcactgaccccggcccacccgcgggactccaggcacctcttctgcccgcaccccgcgacccctcccgggaccccggagacagccggcctgcccccggcgtcccccttggccagcacgccatgccggggctgcgccgggaccgcctactgactctgctgctgctgggcgcgctgctctccgccgacctctacttccacctctggccccaagtacagcgccagctgcggcctcgggagcgcccgcgggggtgcccgtgcaccggccgcgcctcctccctggcgcgggactcggccgcagctgcctcggaccccggcacgatcgtgcacaacttttcccgaaccgagccccggactgaaccggctggcggcagccacagcgggtcgagctccaagttgcaggccctcttcgcccacccgctgtacaacgtcccggaggagccgcctctcctgggagccgaggactcgctcctggccagccaggaggcgctgcggtattaccggaggaaggtggcccgctggaacaggcgacacaagatgtacagagagcagatgaaccttacctccctggaccccccactgcagctccgactcgaggccagctgggtccagttccacctgggtattaaccgccatgggctctactcccggtccagccctgttgtcagcaaacttctgcaagacatgaggcactttcccaccatcagtgctgattacagtcaagatgagaaagccttgctgggggcatgtgactgcacccagattgtgaaacccagtggggtccacctcaagctggtgctgaggttctcggatttcgggaaggccatgttcaaacccatgagacagcagcgagatgaggagacaccagtggacttcttctacttcattgactttcagagacacaatgctgagatcgcagctttccatctggacaggattctggacttccgacgggtgccgccaacagtggggaggatagtaaatgtcaccaaggaaatcctagaggtcaccaagaatgaaatcctgcagagtgttttctttgtctctccagcgagcaacgtgtgcttcttcgccaagtgtccatacatgtgcaagacggagtatgctgtctgtggcaacccacacctgctggagggttccctctctgccttcctgccgtccctcaacctggcccccaggctgtctgtgcccaacccctggatccgctcctacacactggcaggaaaagaggagtgggaggtcaatcccctttactgtgacacagtgaaacagatctacccgtacaacaacagccagcggctcctcaatgtcatcgacatggccatcttcgacttcttgatagggaatatggaccggcaccattatgagatgttcaccaagttcggggatgatgggttccttattcaccttgacaacgccagagggttcggacgacactcccatgatgaaatctccatcctctcgcctctctcccagtgctgcatgataaaaaagaaaacacttttgcacctgcagctgctggcccaagctgactacagactcagcgatgtgatgcgagaatcactgctggaagaccagctcagccctgtcctcactgaaccccacctccttgccctggatcgaaggctccaaaccatcctaaggacagtggaggggtgcatagtggcccatggacagcagagtgtcatagtcgacggcccagtggaacagttggccccagactctggccaggctaacttgacaagctaagggctggcagagtccagtttcagaaaatacgcctggagccagagcagtcgactcgagtgccgaccctgcgtcctcactcccacctgttactgctgggagtcaagtcagctaggaaggaagcaggacattttctcaaacagcaagtggggcccatggaactgaatctttactccttggtgcaccgcttctgtcgtgcgttgccttgctccgtttttcccaaaaagcactggcttcatcaaggccaccgacgatctcctgagtgcactgggaaatctgggtataggtcaggcttggcagccttgatcccaggagagtactaatggtaacaagtcaaataaaaggacatcaagtggatacctgacttctcaggatccttattctagctacaagtcaaagataactcctggtccagacaaaacacctggcctatcacaagctgactaaaaatctgcactttgggccagcgcaggcaacagtaactctgacaggttcaaattagacctcacactttctactcatattctagtcactggacccatctgaatcagtaatccctactgcccggtcctggagtaacttcttagagatattataacaagtggcaaa

SEQ ID NO: 7094 - DNA, 804 bp, Homo sapiens
  source 1..804: mol_type = unassigned DNA
cagagacacaatgctgagatcgcagctttccatctggacagggaatatggaccggcaccattatgagatgttcaccaagttcggggatgatgggttccttattcaccttgacaacgccagagggttcggacgacactcccatgatgaaatctccatcctctcgcctctctcccagtgctgcatgataaaaaagaaaacacttttgcacctgcagctgctggcccaagctgactacagactcagcgatgtgatgcgagaatcactgctggaagaccagctcagccctgtcctcactgaaccccacctccttgccctggatcgaaggctccaaaccatcctaaggacagtggaggggtgcatagtggcccatggacagcagagtgtcatagtcgacggcccagtggaacagttggccccagactctggccaggctaacttgacaagctaagggctggcagagtccagtttcagaaaatacgcctggagccagagcagtcgactcgagtgccgaccctgcgtcctcactcccacctgttactgctgggagtcaagtcagctaggaaggaagcaggacattttctcaaacagcaagtggggcccatggaactgaatctttactccttggtgcaccgcttctgtcgtgcgttgccttgctccgtttttcccaaaaagcactggcttcatcaaggccaccgacgatctcctgagtgcactgggaaatctgggtataggtcaggcttggcagccttgatcccaggagagtactaatggtaacaagtcaaataaaaggacatcaagtggata

SEQ ID NO: 7095 - DNA, 2081 bp, Homo sapiens
  source 1..2081: mol_type = unassigned DNA
aagaggagtgagttggtccccaggccacacagcccagtccttgacagtagccacagaccctgtaccagggacttgttgctagcttggcttttgaatctgaaaagctgcctcaatactcctttgccccatttcatattgatcctgggatcagcaggcctgggtctgttctcccctttagttcatttattcagttctaaagaaccttccatatacccaacactaggtgttatgggatacagaaatggaagactcagactctctccttgagaagctccttggtctagtggggagaacagacatgtagccagatcacgaaaacacagcacagcacttgctataaccagggagcacacgagaatcccatgggagggacacctggttcccgagcaagccctgggagaccaaggacctcactgctgtatccccaggacctagcaccctccctggcacatagcaggtactccacactagctgactgagtgaatcgatccatcagtcaagccgtcatgatcatcgtgggaaaagaagtaaccaggcagaatttctggaggacatgacagatcctaagggactctgtgaaggctgagaagagccctcggatgaaaatgggcatcggagcattgtaggcagaaaaccatgtgtgagagagaaagggcaggaacagcccatggaggtgctatgagtggcgcagggtccaagaggcttggtgagagggactgtggagggacgaggaagcaggtgagggtcactacctcctcctttcctgcctgccccggcctctcccctctggcacacagtatcccaaccatgggtttagtgtccaccagacttaaaggacccaggaccttctcaccacacggaatatgcagccttacgcgtccttgcccagggcctttctgaattttagaagctgccaccagcccagggcaggatcagggaggcagggattgggggggcagggggaggtgtggggagacccccgacaccctgccatcttggcttttccagccccaggacttcttctccccctcaggtgggaggtcaatcccctttactgtgacacagtgaaacagatctacccgtacaacaacagccagcggctcctcaatgtcatcgacatggccatcttcgacttcttgatagcctcagaagtggcggaggtcccagaggacagaaggtaacaggctcccctctcttcaaagaactggaagaagctcaaggggtcgtcactcataaggcaggcatctcaccctgccacgggcctgagtgggcgtcagattggaagctgtatgttcacttcaccaagtgaggggaaaccagggaatatggaccggcaccattatgagatgttcaccaagttcggggatgatgggttccttattcaccttgacaacgccagagggttcggacgacactcccatgatgaaatctccatcctctcgcctctctcccagtgctgcatgataaaaaagaaaacacttttgcacctgcagctgctggcccaagctgactacagactcagcgatgtgatgcgagaatcactgctggaagaccagctcagccctgtcctcactgaaccccacctccttgccctggatcgaaggctccaaaccatcctaaggacagtggaggggtgcatagtggcccatggacagcagagtgtcatagtcgacggcccagtggaacagttggccccagactctggccaggctaacttgacaagctaagggctggcagagtccagtttcagaaaatacgcctggagccagagcagtcgactcgagtgccgaccctgcgtcctcactcccacctgttactgctgggagtcaagtcagctaggaaggaagcaggacattttctcaaacagcaagtggggcccatggaactgaatctttactccttggtgcaccgcttctgtcgtgcgttgccttgctccgtttttcccaaaaagcactggcttcatcaaggccaccgacgatctcctgagtgcactgggaaatctgggtataggtcaggcttggcagccttgatcccaggagagtactaatggtaacaagtcaaataaaaggacatcaagtgga

SEQ ID NO: 7096 - DNA, 1642 bp, Homo sapiens
  source 1..1642: mol_type = unassigned DNA
acttccacctctggccccaagtacagcgccagctgcggcctcgggagcgcccgcgggggtgcccgtgcaccggccgcgcctcctccctggcgcgggactcggccgcagctgcctcggaccccggcacgatcgtgcacaacttttcccgaaccgagccccggactgaaccggctggcggcagccacagcgggtcgagctccaagttgcaggccctcttcgcccacccgctgtacaacgtcccggaggagccgcctctcctgggagccgaggactcgctcctggccagccaggaggcgctgcggtattaccggaggaaggtggcccgctggaacaggcctcagttcctgcttttgaaaggaagagggggagtctgtgacccctgaggcctccttgcaactctgttttccaagctttgcacatcttccgaatttcttcttcaaagtctaccctaatgaaatatcagacaattttccaagtgtgcttcatgaacttctgggaggtgcttcacagtttctgcaaatgattgattgaattttcactttgaaaaaatatactttaaggcgacacaagatgtacagagagcagatgaaccttacctccctggaccccccactgcagctccgactcgaggccagctgggtccagttccacctgggtattaaccgccatgggctctactcccggtccagccctgttgtcagcaaacttctgcaagacatgaggcactttcccaccatcagtgctgattacagtcaagatgagaaagccttgctgggggcatgtgactgcacccagattgtgaaacccagtggggtccacctcaagctggtgctgaggttctcggatttcgggaaggccatgttcaaacccatgagacagcagcgagatgaggagacaccagtggacttcttctacttcattgactttcagagacacaatgctgagatcgcagctttccatctggacaggattctggacttccgacgggtgccgccaacagtggggaggatagtaaatgtcaccaaggaaatcctagaggtcaccaagaatgaaatcctgcagagtgttttctttgtctctccagcgagcaacgtgtgcttcttcgccaagtgtccatacatgtgcaagacggagtatgctgtctgtggcaacccacacctgctggagggttccctctctgccttcctgccgtccctcaacctggcccccaggctgtctgtgcccaacccctggatccgctcctacacactggcaggaaaagaggagtgggaggtcaatcccctttactgtgacacagtgaaacagatctacccgtacaacaacagccagcggctcctcaatgtcatcgacatggccatcttcgacttcttgatagggaatatggaccggcaccattatgagatgttcaccaagttcggggatgatgggttccttattcaccttgacaacgccagagggttcggacgacactcccatgatgaaatctccatcctctcgcctctctcccagtgctgcatgataaaaaagaaaacacttttgcacctgcagctgctggcccaagctgactacagactcagcgatgtgatgcgagaatcactgctggaagaccagctcagccctgtcctcactgaaccccacctcc

SEQ ID NO: 7097 - DNA, 824 bp, Homo sapiens
  source 1..824: mol_type = unassigned DNA
tcaacatgagatttggaggggacaaacatccaaaccatatctgatggcgacacaagatgtacagagagcagatgaaccttacctccctggaccccccactgcagctccgactcgaggccagctgggtccagttccacctgggtattaaccgccatgggctctactcccggtccagccctgttgtcagcaaacttctgcaagacatgaggcactttcccaccatcagtgctgattacagtcaagatgagaaagccttgctgggggcatgtgactgcacccagattgtgaaacccagtggggtccacctcaagctggtgctgaggttctcggatttcgggaaggccatgttcaaacccatgagacagcagcgagatgaggagacaccagtggacttcttctacttcattgactttcagagacacaatgctgagatcgcagctttccatctggacaggattctggacttccgacgggtgccgccaacagtggggaggatagtaaatgtcaccaaggaaatcctagaggtcaccaagaatgaaatcctgcagagtgttttctttgtctctccagcgagcaacgtgtgcttcttcgccaagtgtccatacatgtgcaagacggagtatgctgtctgtggcaacccacacctgctggagggttccctctctgccttcctgccgtccctcaacctggcccccaggctgtctgtgcccaacccctggatccgctcctacacactggcaggaaaagaggaccccaggacttcttctccccctcaggtgggaggtcaatcccctttactgtgacacagtgaaacagatctaccc

SEQ ID NO: 7098 - DNA, 2798 bp, Homo sapiens
  source 1..2798: mol_type = unassigned DNA
atgttcacttcaccaagtgaggggaaaccagggaatatggaccggcaccattatgagatgttcaccaagttcggggatgatgggttccttattcaccttgacaacgccagagggttcggacgacactcccatgatgaaatctccatcctctcgcctctctcccagtgctgcatgataaaaaagaaaacacttttgcacctgcagctgctggcccaagctgactacagactcagcgatgtgatgcgagaatcactgctggaagaccagctcagccctgtcctcactgaaccccacctccttgccctggatcgaaggctccaaaccatcctaaggacagtggaggggtgcatagtggcccatggacagcagagtgtcatagtcgacggcccagtggaacagttggccccagactctggccaggctaacttgacaagctaagggctggcagagtccagtttcagaaaatacgcctggagccagagcagtcgactcgagtgccgaccctgcgtcctcactcccacctgttactgctgggagtcaagtcagctaggaaggaagcaggacattttctcaaacagcaagtggggcccatggaactgaatctttactccttggtgcaccgcttctgtcgtgcgttgccttgctccgtttttcccaaaaagcactggcttcatcaaggccaccgacgatctcctgagtgcactgggaaatctgggtataggtcaggcttggcagccttgatcccaggagagtactaatggtaacaagtcaaataaaaggacatcaagtggatacctgacttctcaggatccttattctagctacaagtcaaagataactcctggtccagacaaaacacctggcctatcacaagctgactaaaaatctgcactttgggccagcgcaggcaacagtaactctgacaggttcaaattagacctcacactttctactcatattctagtcactggacccatctgaatcagtaatccctactgcccggtcctggagtaacttcttagagatattataacaagtggcaaaaataaaagagggatttgctaagaatatcagaaaaggagtgttccaatttgaagagtattacaattgaaataacatcaaatatgtcacactaagcagccagtaacagaataaataattacaacgaaggaaaaaaaaaggaaagtcctccaaggtcaggatggcatgggaacaggcctagcagggacacaagcctggagtaaggcaggaaaagagccaaggctgactacagcccaccaaccacaatcttcttccctaagaccccaggattgtccccggcccatccccaaaagaagaaaggggctatgtggaaaggtgaggccctctagatgcccctccctgtgacggctggctcaaaaaagactaagtcaggttttttattgaagcctcccttagaagaaagtgtagtagggattccttgtctcctctaccttctccctgacttgttgatatctgaaactccttttaataggaggctttgtttcttattccataattaatgaccgaaaacacaaaggacagtaaggtcttcattccatggagtgactagtcagtcaacaaaagtaaaaatgcctcatttcatcaaatcaacttttccagtaaaggccagagttcaaatactgtaagcatgagaatagaatggagctgtcactaaagagagtacaaggtcaagaaccagaaatgtctccaagctttctgcagtgtgagcaaagatagcctcgactggacaaataacacttctgaccccgtggtacccccacatgactggtatgctgcccctggactttgtgtctctctaaaatcactaccattcactgagatctgaccaggtgaggcactcaccaacgctacagaagcaacacacaggtttccaatcctctcaaacacagatacaacccccatcctccaatgtgcatggaagaactttaaatctcagagagagtaagcaaaatcacacaatttagtggtttagacctattccaaagtcttcttttcactgtaacacaaaacccaacagtatcccacccaatttatgaagtcaaatttgtttgcttaaaaaaaaaatcagctgggcatgggctcacacctgtaatcccagcactttgggcctaaacaggcagatcgcttggtctcaggagctcgagaccagcctgggtaacatgacaaaaccctgtctctacaaaaaaatacaaaaaaaaaaaaatttttttttaaatcaactctttaacagagaaaccttaatcccaaagatttccttaactgttgtggccctactgcagcatagggctccccacttcattcactgtctctcctgcttcaagatgtttcttccctgtggatgaagaaccaggagatcacacacagaaatgggaaaatatctgggtaaaaacattcaaagaatagcacaaaatggtttgggacttccaaataagactctcaggaaagcaggctacagctctacctcaaaacccgccacctcctataacgaaggactggttttccaatggcctatatacacattttgctgcactctacaaacagaaagcaataggcttgaatttcaccatgatatgtggtacacctaccttattattcacttatctttcaaccttccattactttttgattagtaacaaaattaagactcatttctcaaaaatatcagaaaaccaaccgtttcattcttactcgagttcttccagcatgttcattttgaactgtttacctcccatgaaataaaaagtctcttgactctg

SEQ ID NO: 7099 - DNA, 501 bp, Homo sapiens
  source 1..501: mol_type = unassigned DNA; mol_type = unassigned DNA
ggggaagcgactctgagtcccgggctcggagcgcaggctcagctccgcgctgcgagcgctacgggcgcaggggcggggagccggcccggagcgcagtttccagtggggccggggtttcacccgggccctctctgtttgaaccgaacccgacaaatgggcgcatgacgatggagagcagggaaatggactgctatctccgtcgcctcaaacaggagctgggtctcactctgttgctcaggctggagtgcagtggcacaatcacaactcactgcagtctccacctcccttgctcaagtcatccttccgcctcagcctcctgagtagctgggactacagacatgcaccaccacaactgggtctgctggagtttgctggaggtccactccagaccctgtttgcctgggtgtcaccagcagaggctgtagaacagcaaagattgctacctgctccttcctctggaagcttcatcccagaggagcacctgccaaatgccagctgaac

SEQ ID NO: 7100 - DNA, 5980 bp, Homo sapiens
  source 1..5980: mol_type = unassigned DNA; mol_type = unassigned DNA
gaccgcgcgcggctagccgctggggaagcgactctgagtcccgggctcggagcgcaggctcagctccgcgctgcgagcgctacgggcgcaggggcggggagccggcccggagcgcagtttccagtggggccggggtttcacccgggccctctctgtttgaaccgaacccgacaaatgggcgcatgacgatggagagcagggaaatggactgctatctccgtcgcctcaaacaggagctgatgtccatgaaggaggtgggtgatggcttacaggatcagatgaactgcatgatgggtgcactgcaagaactgaagctcctccaggtgcagacagcactggaacagctggagatctctggagggggtcctgtgccaggcagccctgaaggtcccaggacccagtgcgagcacccttgttgggagggtggcagaggtcctgccaggcccacagtctgttccccctccagtcaaccttctcttggcagcagcaccaagtttccatcccataggagtgtctgtggaagggatttagcccccttgcccaggacacagccacatcaaagctgtgctcagcaggggccagagcgagtggaaccggatgactggacctccacgttgatgtcccggggccggaatcgacagcctctggtgttaggggacaacgtttttgcagacctggtgggcaattggctagacttgccagaactggagaagggtggggagaagggtgagactgggggggcacgtgaacccaaaggagagaaaggccagccccaggagctgggccgcaggttcgccctgacagcaaacatctttaagaagttcttgcgtagtgtgcggcctgaccgtgaccggctgctgaaggagaagccaggctgggtgacacccatggtccctgagtcccgaaccggccgctcacagaaggtcaagaagcggagcctttccaagggctctggacatttccccttcccaggcaccggggagcacaggcgaggggagaatccccccacaagctgccccaaggccctggagcactcaccctcaggatttgatattaacacagctgtttgggtctgaatcctagagacagaaagttgactgagcctgaaagggccaggtcccagtgctgggcccctggggaggagggagggtgggcggtatggctctcgaaagcccaactccaagttcctttcccccagaaagcggggagaagccagagttcttggctcaggactgaagggaaggtggttgggagaggctgtcttgggggctagctggtggaggaggtaagagtagctggagagtgagctgtgcgtgtgtgtgtgtgtgtgtgcatgtgtgtgtctgtctggcatgcatgcactcactttggggctggaggtgacagtaggtgagggcagaggaggagatcagaaaatccctctgacatctccactgcccccaaagacctccgttgaacattctgtatggaaaagagccctggagcatcaggttccccagataggcccccaaataaagacctgtctatggctctcccaaccttctgtcagcttctttggcaagacattgctccaggcacagggactgaaccccaggcctcctgggactggagcagcagtgaggcaaaacccgacctgctagccctttctgccttggaggtttcagtccatacctggactctgagaaaatgagctgaataaggagtacagtgtgtaaggagcagccagggaagccctagacactccccgcgtctcccccatgcacaggggaaggatgttgacatagcactgggctgtttgaatgccttttcatctccatggtctcatttgaaagtgagcgaggcaggcaggcatgatcccattttccagataaggaaacaagcctagatatgctacatgtccaggaacaactgcagccaggaggcagaacagcctaggtctaactgcagagtagaagctggaccctggagttaccaacactcctccccaacagttcttagcaccccgcaggctgggcgctgtggctcacgcctgtaatcccagcactttgggagggcaaggcaggcggattacctggggtcaggagttcatgaccagcctggccaacatggtgaaaccccgtctctactaaaaaaatacgtaaaaattagccaggcgtggtggcacacgcctgtaaacccagctacttgggaggctgaggcaggagaattgcttgagcccgggagagggaggttgcagtgaggcgagatcatgccactgcactccagcctggctgacagagcaagactcccctgtctcaaaaaaaataaaaaaaaacagttcgtagggccccataccccacaacccctgtctcctgcacttaactcccacctgggtcagagaacagccaattcaccagtgaggtagaagtgaacccagaagaaatagccacttgattttaaaattcccagctccattccgtggccttctccccactagacacagcagtcccaggcctcctgttccctcctcacctagaggcagccgggacggagggggaagggccaggcagcagctcagctccggcttctctaaagccactctgggcacgtggcccaggagggccacctagtgatccaggcccccccccaggactgccctgggaagccactgtccctcccactccagtagggaacactcactggctgggaaaagacaatgtggatcttcttttgggctgaccaagccaggagggcacaccctcccactgcccctctctgcctcccactgattgtccctcagcctgatggggtgtgacagctgcaattagaggcaggattccttcccaccctcaaagcattaatagccagttggagaggcaaaatagtaagaaaaggctcttctgcttgcttcctggatccctggggagagtggagagaggggcagagctcaagatgggattatgggggcgcagccgcggtggttagggtcactctcaaatcctacccagtcaaatggtaagatgtttcatttttggtgggggagctgcaggagggaggaaggcgctcatgctttttgggttttgttgagcactcactgtctgtcaggtaatgtgcacatctctcaaacttagaaggaccctagaaggcattgttctccagacacatctatggaggttattagggggcgtgtaaactgccccgattaggctgctagcaaaggaaaggacagagatttgaacagagggttgggttatctggctccaaaacccctgtccttttcttgctatttctctacctggagtttgccaactgagcaagcccactctggtggagccagccactgcaaatcctttgtgtcttcccagagaataccaacatttcagttttgagtgagggaacgttggctctgactgcctttggaggtggagatggtggaggtggtggtggtggtggtggtagtggtggtgtgtgtgtgtgtgtgtgtgtgtgtgtgtgtgtgcctgcgcgtgctaagaaactgcatgttaagattccacctactgaatcatgagcggaggaagtcgtgggacactggctggtggagaagccatctagcatattattcaagatgacaccagctccaagtctggaatgagtctgtgggaaaccaaggtacttcttggacattcacctataactcacgtgtttcgtggactggtcacagtggttcggataaattgaacagaactttatgaacacctcccagcaccaggtgttgttatagaaactaagaacagagcaatgagaaggacccaactcctgctctcaaatggatgcagtggaaaataagcagactttgaaccattggttagtcagaagagacttgggagactgaaaacttgtttcaacttgggccagaacaaaaaattaggaagcaacacttgctgccaacatgatttacaagtgccagcaccttcacctctgttacttccttctcactacacactgaaagcagttgctcttgttttacatggacaggctcagagaagttaagcaacttgtccaaggtcacacagtagtggaattgagattgaatcagttccaactgacttgcaatcttgtgcttttcagacgatcccactaattgtccatatctgttccaaagccaaatcaagaggaacaagagcaaaatctgtcctctcatattattcatggtcctgcgtggatcataaatggcatgctgactgtctgatggagacttacttttcccttccccctggacacctgccatggcaatgacagaggctgtattttactgaagtggagggaagaggtgaatgcaaatgcctagggcctaagtatacaggaaggtgtagggagaggtaagcagtgtgtatgtggaggagatagcagacgtaagcagagagaaatcagagagcttagttcttcctctggggcgcactttgtggttaattaggacatgcaaatgagctagaagctcatttaatatcctccctgacatgtagccccaccccaccctgccccacttccctggcaggtacaagggccacctgattggcccaggtatctgtggaaggttccacctgcttctttgtggcccagggaacagaaaagagtccctgctgggcatgctagtggggccggcctggtctccctcctccctttctcttcccaacctttcagacttgggacctctcttttccctctccctcagacacttcccttgtgccccgcccctcagggtgatctctgaacccaaacttgccccaaagaaggttgctctgtcctctccacatccccatctcctccctagggccttgttggggagaggctcctccatctttcccaagtcacaccatcgtttcctacgtggtctggacaagagcaagagcacaccttgtccccaccttctccagagcagccagaacccacctcaggtgccttccccatccggtgcagttaaggcacttctgccagcaccatggtatgagcactagacttggagttaagatttgagagccccctctgtcactgtggaagcttgagcatgttgcttgatctctctgaaccttgtgtttctcatctgtgaaaggtgataatgtggggctgctgtgagatttaaaggacataatgcacctacggtccaagcactgcctggaatacagcagaagctcagcagatactggacaacccatccccttagtagaggcactaaccatgtgacccaaggcaaaagtgcttaagaaaaagtgctttctctgagcgttggtctcttcttctgtcgaaacatttatattgatttaatatctcacaggattgtagcaagggtcagagaagacaataggtgacatgtttttgtacactgtatactagccacccagatgggctgttatttgctaaatggcaaatttacactgttccccaaaggatgacatgcactggggaggcggggggtgtggaggtggagaaaggctgagcttggagaaaaggtgcttgaggaccccactgcctaaggacctgctctaggaaacattcccactccctacaccctagctgcccctcacagtcaacccttaaggacctcaaattcttggcaaggggtaaagagttgaaagtgccaagtcctagtggttttgagaagcctctggtctgctctttctgctctgtaaagtcttagttgccagagtcccctatagcccccacatcgctcccttcctcctgccctccggccaccctggaaactaatggcctaaaggtgctgtggctgtcctcctaaaatccattccctcctgatggggtggaggaatctgtgaagcccaccttcaggagaggtctcggggctcgggctggtgctgccagagaaagggtgactgaaccagaaaggcctaggggaaagcagctcaaactgcagccatccccttagtacgattactaggatgtcccttgccttccttttgcctcctccacccaacccctaaaataaacagtatgatgaaacctc

SEQ ID NO: 7101 - DNA, 1217 bp, Homo sapiens
  source 1..1217: mol_type = unassigned DNA; mol_type = unassigned DNA
agctccgcgctgcgagcgctacgggcgcaggggcggggagccggcccggagcgcagtttccagtggggccggggtttcacccgggccctctctgtttgaaccgaacccgacaaatgggcgcatgacgatggagagcagggaaatggactgctatctccgtcgcctcaaacaggagctgatgtccatgaaggaggtgggtgatggcttacaggatcagatgaactgcatgatgggtgcactgcaagaactgaagctcctccaggtgcagacagcactggaacagctggagatctctggagggggtcctgtgccaggcagccctgaaggtcccaggacccagtgcgagcacccttgttgggagggtggcagaggtcctgccaggcccacagtctgttccccctccagtcaaccttctcttgagcagccagaacccacctcaggtgccttccccatccggtgcagttaaggcacttctgccagcaccatggtatgagcactagacttggagttaagatttgagagccccctctgtcactgtggaagcttgagcatgttgcttgatctctctgaaccttgtgtttctcatctgtgaaaggtgataatgtggggctgctgtgagatttaaaggacataatgcacctacggtccaagcactgcctggaatacagcagaagctcagcagatactggacaacccatccccttagtagaggcactaaccatgtgacccaaggcaaaagtgcttaagaaaaagtgctttctctgagcgttggtctcttcttctgtcgaaacatttatattgatttaatatctcacaggattgtagcaagggtcagagaagacaataggtgacatgtttttgtacactgtatactagccacccagatgggctgttatttgctaaatggcaaatttacactgttccccaaaggatgacatgcactggggaggcggggggtgtggaggtggagaaaggctgagcttggagaaaaggtgcttgaggaccccactgcctaaggacctgctctaggaaacattcccactccctacaccctagctgcccctcacagtcaacccttaaggacctcaaattcttggcaaggggtaaagagttgaaagtgccaagtcctagtggttttgagaagcctctggtctgctctttctgctctgtaaagtcttagttgccagagtcccctatagcccccacatcgctccctt

SEQ ID NO: 7102 - DNA, 1423 bp, Homo sapiens
  source 1..1423: mol_type = unassigned DNA; mol_type = unassigned DNA
aacacgcccggcctggaagtggaagaaagggacgggagtcggaggctgagagactgcccagacacacaaaaaatgtggcctgaggaaagccccaagagggaggagaggaaagatgaggcaactgatgtccatgaaggaggtgggtgatggcttacaggatcagatgaactgcatgatgggtgcactgcaagaactgaagctcctccaggtgcagacagcactggaacagctggagatctctggagggggtcctgtgccaggcagccctgaaggtcccaggacccagtgcgagcacccttgttgggagggtggcagaggtcctgccaggcccacagtctgttccccctccagtcaaccttctcttggcagcagcaccaagtttccatcccataggagtgtctgtggaagggatttagcccccttgcccaggacacagccacatcaaagctgtgctcagcaggggccagagcgagtggaaccggatgactggacctccacgttgatgtcccggggccggaatcgacagcctctggtgttaggggacaacgtttttgcagacctggtgggcaattggctagacttgccagaactggagaagggtggggagaagggtgagactgggggggcacgtgaacccaaaggagagaaaggccagccccaggagctgggccgcaggttcgccctgacagcaaacatctttaagaagttcttgcgtagtgtgcggcctgaccgtgaccggctgctgaaggagaagccaggctgggtgacacccatggtccctgagtcccgaaccggccgctcacagaaggtcaagaagcggagcctttccaagggctctggacatttccccttcccaggcaccggggagcacaggcgaggggagaatccccccacaagctgccccaaggccctggagcactcaccctcaggatttgatattaacacagctgtttgggtctgaatcctagagacagaaagttgactgagcctgaaagggccaggtcccagtgctgggcccctggggaggagggagggtgggcggtatggctctcgaaagcccaactccaagttcctttcccccagaaagcggggagaagccagagttcttggctcaggactgaagggaaggtggttgggagaggctgtcttgggggctagctggtggaggaggtaagagtagctggagagtgagctgtgcgtgtgtgtgtgtgtgtgtgcatgtgtgtgtctgtctggcatgcatgcactcactttggggctggaggtgacagtaggtgagggcagaggaggagatcagaaaatccctctgacatctccactgcccccaaagacctccgttgaacattctgtatggaaaagagccctggagcatcaggttccccagataggcccccaaataaagacctgtctatggctctcccaa

SEQ ID NO: 7103 - DNA, 556 bp, Homo sapiens
  source 1..556: mol_type = unassigned DNA; mol_type = unassigned DNA
caaatgggcgcatgacgatggagagcagggaaatggactgctatctccgtcgcctcaaacaggagctggccccatgctttctctctcccctgcagatgtccatgaaggaggtgggtgatggcttacaggatcagatgaactgcatgatgggtgcactgcaagaactgaagctcctccaggtgcagacagcactggaacagctggagatctctggagggggtcctgtgccaggcagccctgaaggtcccaggacccagtgcgagcacccttgttgggagggtggcagaggtcctgccaggcccacagtctgttccccctccagtcaaccttctcttggcagcagcaccaagtttccatcccataggagtgtctgtggaagggatttagcccccttgcccaggacacagccacatcaaagctgtgctcagcaggggccagagcgagtggaaccggatgactggacctccacgttgatgtcccggggccggaatcgacagcctctggtgttaggggacaacgtttttgcagacctggtgggcaattggctagacttgcc

SEQ ID NO: 7104 - DNA, 2785 bp, Homo sapiens
  source 1..2785: mol_type = unassigned DNA; mol_type = unassigned DNA
gtctcgcttcgcggccacctcttccccaacgctacccgctccgtaccctgactcgctgctcctctgtgctggcagagagcgcgcagaacgtagctggacccaagggtttatttaccacattggctggtgtgtccatctgctgtgcaaccacatttatctccggtgagataaaccccatttatctcctagcaagtccctggcgcacagtgagctctgataaaaagcagcccatctacctcctccaaccagacccaactagcccagatgcttaattctccatgacttgtaacacctcaatacctttgtatttgctgttccatctacctggagagcctttccagggagctagaggagggagagattcctatgaactgaaaagggaggatactgggatgaggatgcttgtaatgtggtgcacactgattaccagagcacagctgagatactgttgggtcctgtctcctcccaaagcacacatcacatcccagggtgcacaccagtaaatgatcagattctggacatggggagccaaggacaggggaaggcagagagaggagcagaattgcaaccactgtcgtcatgaaggaagctaggtgagagagctggcacaaggtggcaacatttgcatgaagaggacaaacaactggaaataccaccagggggcgtgtgtagctgtaacacaccagtcatgctctttccctacagttaccaggcggggtttggtcactatgcataacctgagaaagatagacaaacagcagacagatagataggttgggggtgcttagatagacaaatatcaccagcctcctaagctcatcctggtgttgtgattggccacaccaaaacgtaacatctccagtctatctgatatcattgaacaggtctcctctaaggcaaggagttggattcccctagaacacctgccaaagtgcagtggaagggaaggaggtcttgcctgggggcagtggtcactgggcctgggtttctgtgctgattctgcccttagcaacctgggtgacctagggcaggtcacttaacatttctgcgctacacttttctgacttgtaaaatcacatgcttgggtggcagatgcagactgttagtaatttttaaactttagagatcacggaggagaaaactgagatccaaagaagttaaattacttgtccaaagccacttgatgtgggagtggaatgaccgagaggatgtggattctggaaccagagccagttccacatgatggttccagcacacccctcacactgccctctggtgatctactgtctcctcatctcttcctcctctgcagaatggaggaatagcagcacctacctcccaaggttttggaagaataaatgagtacctgacacaaggaaagcctccaatatatgttagactaggcctatttttagtgatgaaccagaggctcatacccacaaatcttttcttccagtctttctgtgaggccacatgccctgatgaaggtccttttcagctcccaaattctatgattctaagtcagaaagattaagatgcaagttatttccaaaaccctccaggcagaaacacaaaagactatttgagagattcattattcactctctattgcctcagtcactttctatggatgatgattcatggagaataatcaacagcagagaagatctgttcaatgctaggagagaaggcagtaaagccgaaactccttcgcgtgttcagttcctattctccagtatgcatcttcacttgttaagcggcggcagcatttcttggcctcgctgcctttcttctctgggaatttgaggtcttctcttggtatagactgttgctagtgcagtcactgcccacccggcaccactcctcaaaatgccagggagaaggtcctgcctctctggccaagcaaaagcccgcacagaagcagctgtcaccagtggcactggctcttctcagggtgtccaggctgaaatgtttagcatgcccaaggttgatgtctaatcacagctacgagaattctctggctcctgaaaaacaacagaagagacttaagagccagtctggtggaagcaaacatgcagacagccaaacctgagatgtgacctctttttctcctcaccccatggtctcaggaggagaagcaggtggcttttctttccctcttgctaatatgtctctccctggcaagctgccaaccactggtccttgcttacagctagctagtggagatggccaagtggtatgtgataaaatgagcctttgctctgagttccaggccatggtaaggttacagggcagccagcactgggcctctggagtatcagatgttacagaatgtcccaggagagtcctgggtatgagccattttctttcctggtacagtttgcatccaccatcattagtttgcacaaataccatatttcccttaggtgtgccctggcattcttcacgtgttcttcgtagttcaaaaatatttgcttttcctggcccaacacggtggctcacgcctgtaatcccagcacttcgggaggctgaggtgagcagattgcttgagctcaggagttcaagaccaacctgggcaacatggcaaaaccctgtctccacaaaaaaaaccatatatatatatactgggcatggtggcatgtgcctgtagtcccagctgctttggcggcttaggtgggaggatcacctgagccaagggagctcaagggtgcagtgagccgtgatcacaccactgcactccacctggttgacagagtgagaccctgtctcaaaaaaaaaaaaaaaa

SEQ ID NO: 7105 - DNA, 461 bp, Homo sapiens
  source 1..461: mol_type = unassigned DNA; mol_type = unassigned DNA
atactgggatgaggatgcttgtaatgtggtgcacactgattaccagagcacagctgagatactgttgggtcctgtctcctcccaaagcacacatcacatcccagggtgcacaccagtaaatgatcagattctggacatggggagccaaggacaggggaaggcagagagaggagcagaattgcaaccactgtcgtcatgaaggaagctagagatcacggaggagaaaactgagatccaaagaagttaaattacttgtccaaagccacttgatgtgggagtggaatgaccgagaggatgtggattctggaaccagagccagttccacatgatggttccagcacacccctcacactgccctctggtgatctactgtctcctcatctcttcctcctctgcagaatggaggaatagcagcacctacctcccaaggttttggaagaataaatgagtacctgacacaa

SEQ ID NO: 7106 - DNA, 1763 bp, Homo sapiens
  source 1..1763: mol_type = unassigned DNA; mol_type = unassigned DNA
gtgcttccgttttccgttccgctggcctgtctcgcttcgcggccacctcttccccaacgctacccgctccgtaccctgactcgctgctcctctgtgctggcagagagcgcgcagaacgtagctggacccaagggtttatttaccacattggctggtgtgtccatctgctgtgcaaccacatttatctccggtgagataaaccccatttatctcctagcaagtccctggcgcacagtgagctctgataaaagtacgttgaattggaacctggaactggactaacagctcccaagttcgtatctccgcctcagatctccttttaaactctagacgtgtgcatccatctgcctccatgcatccgcctccatgcatccgcctccgcatccgcctccatgcatccgcctccgcagcacctcccttgggatgcctaatagactctcaaatgttacatgccttctgtattgctccttcccccatcatttcatgcgtaggcagctagcagtctctgccacttttccttgctgtggtcttctgctcaaatatcagcttttcaaagaggtcttgaacaccctaagacagctctgtcatcctctctgctccctggcctttcccagcactctcttgttttgctttattttttctttatgatacttatacctacctgaaattatatgtcttctgcctgtctcccacactctatgaggacaagaacctattctgtcttgttctcctctgcatccctagtgggaaaaacaatctgacacataggaaatgttcaatatttatcaaatgattgagctcctataacaaactcttagtcatcatgccaaatttaaatatttctggacctcagccatattcataattccaaatttagttgtgtggggtggctcgcacctgtgattccagcttcttgggaggctgaggcgggaggattgcttgaggccaggagttgccagcctgggcaacatgcagaaaccctgtctcaaattcttaaaaagtaaacaaatttttaaaaatacaaagaataccaaacttaaatatattctgcaaccaagcccaactttgtccatagattataatgctggtcattgtccctacccccttgacacacacacagtgatggtctagattccatatgatataggaggggctttgacatggtaatcccattggaaggtggtcctgaaggtttattttgcctggaaatgtacaaaacattgagaaaatgtcaactatccgtttgaaggaatggagactgatggtggagatggcactaaaggtcccagccttcctcttagtgccctcacctcttttatctgcctaatccccagaccacaaacctgggaattattcttgactcctttgccactttctaacaatttaccaagcacaagtaattttgcctccaaatatttcacccattcttcttcagtctccgtagaatctgccctatattttagatccctttatcatcctaactcgcaaaaacctcctgaatggtttctctggccagagtttcttctctatcccagccatgtaccccacaggtgctggagtgatctttcttaagtggatatcttaagctgtttgggtccagctccagatcctgctccttttgatcctgctccttttgatacccttttttattccccaccccagggtcccacatcacactataaataattccagtctggctcttatgttgtatttgcttggttacttgtatgtgcctcacattaaataaactgtgagcttctcaa

SEQ ID NO: 7107 - DNA, 731 bp, Homo sapiens
  source 1..731: mol_type = unassigned DNA; mol_type = unassigned DNA
ctggccattactgcgagaagccgaggccaagcggggaccagagaaagcggaccccgcgacgcaggacacgcacctccgttggaagcctaagagtgaggaaaaagggatcacccgctccctcgcgacatgagggcccacctgccagactcttaacaccgattgaacaagcctagccccgcgccagctgggggcagccattacagccgcaaggcactgcgggaaccgaccaggagcgctcctacgattgaacagagcggctgacgaaccagcgagtaggagagagtgtgagccactgccccatgttgtgttgatgccaatctgccatgctagcctgtctaccagggccaggtgacctgtcctttcagcttctttctcacacgcagatgaacactggacttcagaaatgggacactacacagaaaatgagaactgctcactatcctaccccagccgaattggatgcgtatgctaagaaggtcgcaaacaacccactgactataaaaatcttccccaacagtgtgaaggttccccagcggaaacacgttcgtcgtactgtgaacggcctcgacacatcagcccagcgctacagcccctacccgacacaggctgccaccaaggcaggcctgcttgccattgtcaaagtgccagccaaaagcatactcaaggactttgacggcacccgagcccggttgctccctgaggccatcatgaaccccccagtggcaccctat

SEQ ID NO: 7108 - DNA, 556 bp, Homo sapiens
  source 1..556: mol_type = unassigned DNA; mol_type = unassigned DNA
aaagggcccaggcgctacacgctgcgcaggcgcaggagcggctccgggtagtccccacagctgcgccggtgactgaggggccgggcagtggagaagtggtggcggcgggcggcgggcggcaaaggagcagccatgagggccgggcccagtcaccgaccgtgctgaggagtcatggaagagtttttaaaccaggaatatcacaggagtgatgctgtgttcttcactgcatgatttcaaaagtgtgagccactgccccatgttgtgttgatgccaatctgccatgctagcctgtctaccagggccaggtgacctgtcctttcagcttctttctcacacgcagatgaacactggacttcagaaattgtgaaggttccccagcggaaacacgttcgtcgtactgtgaacggcctcgacacatcagcccagcgctacagcccctacccgacacaggctgccaccaaggcaggcctgcttgccattgtcaaagtgccagccaaaagcatactcaaggactttgacggcacccgagcccggttgctccctgaggccatcatga

SEQ ID NO: 7109 - DNA, 556 bp, Homo sapiens
  source 1..556: mol_type = unassigned DNA; mol_type = unassigned DNA
gtagtccccacagctgcgccggtgactgaggggccgggcagtggagaagtggtggcggcgggcggcgggcggcaaaggagcagccatgagggccgggcccagtcaccgaccgaatatcacaggagtgatgctgtgttcttcactgcatgatttcaaaagcctagagttgtgaggtcacaattgcaagtgactttacggtcccctattgagttaaagatggagaagaaaaaggcctttgagcaatggctaaacattattcagtgtgagccactgccccatgttgtgttgatgccaatctgccatgctagcctgtctaccagggccaggtgacctgtcctttcagcttctttctcacacgcagatgaacactggacttcagaaattgtgaaggttccccagcggaaacacgttcgtcgtactgtgaacggcctcgacacatcagcccagcgctacagcccctacccgacacaggctgccaccaaggcaggcctgcttgccattgtcaaagtgccagccaaaagcatactcaaggactttgacggcacccgagcccggt

SEQ ID NO: 7110 - DNA, 568 bp, Homo sapiens
  source 1..568: mol_type = unassigned DNA; mol_type = unassigned DNA
catataatgtgctgcttctgaaaatgtctggctggtctccaaccaggcctataaatgggctggctgagccaggccctatgagggcccactctcctcaggaatactgagacattataaatgcacctgtactttccagttgtatgaataggtgctttccagttttatttctcccatccatacatctgtggtaactgaaaaatcattttaaccatagtgatatttgacagcaaattgtcgtcacagataaagatgtaagtatactttcaaccaacacactgctaattaaattgctttatgtgtctaaacttgggcctcacgccagtcatatccagtgttcctactctcttcttcgaatgagttgccttgtgtttcatgaccttgtttttgttcattacagtgtgagccactgccccatgttgtgttgatgccaatctgccatgctagcctgtctaccagggccaggtgacctgtcctttcagcttctttctcacacgcagatgaacactggacttcagaaatgggacactacacagaaaatgagaactgctcactatcctaccccagccga

SEQ ID NO: 7111 - DNA, 462 bp, Homo sapiens
  source 1..462: mol_type = unassigned DNA; mol_type = unassigned DNA
acacgctgcgcaggcgcaggagcggctccgggtagtccccacagctgcgccggtgactgaggggccgggcagtggagaagtggtggcggcgggcggcgggcggcaaaggagcagccatgagggccgggcccagtcaccgacctgtgagccactgccccatgttgtgttgatgccaatctgccatgctagcctgtctaccagggccaggtgacctgtcctttcagcttctttctcacacgcagatgaacactggacttcagaaatccctcttcaccatttcagcatcagtggaggcaggacaaagaaaactaatcaatgtggataagtgtccccttccatactcctgaatgaggtcaagcttcccccttgcctctgctaaaaaaaacctcagagttggtactaacttggaacaaagggactcttctactcatcaaggggacactacacagaaaatgagaactg

SEQ ID NO: 7112 - DNA, 4033 bp, Homo sapiens
  source 1..4033: mol_type = unassigned DNA; mol_type = unassigned DNA
tcttccttgctgtttcctctagcctagagttgtgaggtcacaattgcaagtgactttacggtcccctattgagttaaagatggagaagaaaaaggcctttgagcaatggctaaacattattcagtgtgagccactgccccatgttgtgttgatgccaatctgccatgctagcctgtctaccagggccaggtgacctgtcctttcagcttctttctcacacgcagatgaacactggacttcagaaattgtgaaggttccccagcggaaacacgttcgtcgtactgtgaacggcctcgacacatcagcccagcgctacagcccctacccgacacaggctgccaccaaggcaggcctgcttgccattgtcaaagtgccagccaaaagcatactcaaggactttgacggcacccgagcccggttgctccctgaggccatcatgaaccccccagtggcaccctatgctactgtggcacccagcactttagcccacccccaggcccaggctctggcccgccagcaggccctgcagcatgcacagaccctggcccatgcccctccccagacgctgcagcaccctcagggtatcccgccaccccaggcactgtcccaccctcagagcctccagcagcctcagggcctgggccaccctcagcccatggcccaaacccagggcttggtccaccctcaggccctggctcaccagggtctccagcacccccacaatcccttgctgcatggaggccggaagatgccagactcagatgcccccccgaatgtgaccgtgtctacctcaactatccccctttcaatggcggccactctgcagcacagccagcctccggacctgagtagcatcgtgcaccagatcaaccagttttgccagacgagggcaggcatcagcactacctcagtgtgtgagggccagatcgccaaccccagccccattagtcgcagtctgctcatcaatgcaagcacccgggtgtcgacccacagcgtccccacaccaatgccttcatgtgtggtcaatcccatggagcacacccacgcggccaccgccgcgttgcctgctgcaggtcctgtcaacctgcccacaggcatctctcgcgtccccactggctaccctagcgacctcaagccagtcacctggaaccagcaccagctggcccacctacagcagatgtgcagcgaggctagtgggacgccagcccctggcctgacaggcaagcatgcggcaggacgcgagttggcagggcctggctttgtgggcaaggcccctgcctacccgcaggaactctgcctggcgcagtccttccatctgaagccacccctggaaaagccgaccccatccccaccagtcaacggcatggcagccccattggcctaccccaatggtcactacttccaacccctgtggaacaacattctgcccactcccaatagcgacagctcggggtctcaggaccttgccatgccgttccacggtgggcagcccacaggtgcacccctcgactgtgcggcagctcccggggcccactaccgagcagggaccgggggcggtccagtggcaagccagaacagcttgatgcaaacagtggattacctaagtggggatttccaacaggcctgcttccgagaacagagcctggccatgctgagcaaggcccaccgagcccctggcaaccgagcccccgatcccacagagagtcgaagtcttcatattcagcacccagggtatagataggtagccctgctgccctccacgtgcaacacatcatacatcaccctcctaggtttagtcttttaagtaactggatagtttcaaagtttcactgctccagtgtgatcattcttagatgtctaagaaagggaatttggtgggatctaagtggggacagaaggggtcctctcgtcctcccctccagcaacttttggttttatgttagaacctaaccctaagcccaggcttttctctccactgactgcctgtcagctagtctctccaccttggccatttccagccagctcccacccatcttttcttgaatctcttcctgtttcccttaggacgactgaggtgtgggctgacggaatgccctagttgaggtagtataggtgctcaggcccctaatccagacctctacctgttgctaccccccttcccctccctccaggactaagaagcaagatttcccaggtgctctgaaagctaattacttactcatcgaaggatctcaaatcaaagctgacccagtcttcatatccttcaagttcctttccattcctcaaggctttgttttgtgtctatattgatcccacagccactgcacttgcccttgccacacttgatctcaagggcatcttggaagtatttgaccatttcttgagatatggggggaaaaagtctttgtattggcatcttggttccagactcccctttccaaacctagaaaaatacagtgacctttgagcatacccaagatccctttctcactgttgcctgtcccctaactcacctccccacagcccctatcctttccccctcaacaaaaacaaaatctaccttacttgaggaattaggtaggtaaggaatgatcacattggagtttgggattaaaaacaccaaaaaaaaaaaaatgcatttggttctctctacactggctaagaatattgctctacactgtaagttttaaacgttacgtttctgtatgaatgtagtgtgggtttgagtagcattgtgtgtgagtggccccacaggtacattcaccctctagtgcagcccctcagtttaatgaaggaaaaaaaaacaaacacaaagccttaagctctttgagtacttcctttaccaaatgagcatggttctaacacctggagctgggcctacattggaaacaagcccctcctgccctctgtccattcttagagcataccttcatccactccatgctcagcacgtctcatcccaagcgacaattagttggctagaaacacttttctgtaattttaaacttagactgttttgttacaaatttttgcaccattctgttaaagatgcagaattgggcttttttattttttacagatgaaataagcccttacctttcctcttgtctctggggaatgtcagctgatggttcttatttaaggttttgcattttgttcactatccactactgttcgttagccagaaattctctagtgatctgaagcaatgtgactgaagaccagttttaagttatgtgttggcaagttgccttatatttaaaaggaaaaagaaaaaaaaaaaagcctgattgtgttatgccaaatgatagcaacatgaagtcctaatttattgttcccaattgttttcctgccgtctgtgaacactggtacctccctgtcctgatcccccaggagcacctgtagcttctgactcaatgccttctccgaaggtgttggccgccatctcacccagggccctcttccagttcctgcttttctgagtcagatttaaagagcaccactgtcttccccctaccccttgcttgatctccaaagcagatattcttgctgtatttttttttcctccccaatacctctccctgaaaggtgagctgctattttaggaaactggaccagacaccaacttgggggctttaagtcaaacaacctcaaacccatctcttcctgtgtaggggtgcaagcctctgaagctctcactcccacccttagtctgcatggaaaatgtactgtgatccccctgcccccaactgccctcgcctttggtgtgagatgttccttctttcggagttcagcctgagtccctctcccctctgccagccaacccccagccagcaataagggtccaagccagggcctcctctccacactccctgtctccatcctacactaccctagggaatacctggattccccattctatccacatactgtagcattcattctccatctctctcacctcacctgtggtggtttatgggtgtgatggggtttttaagattattataaaccagtaaaaataagaaaacctcgc

SEQ ID NO: 7113 - DNA, 720 bp, Homo sapiens
  source 1..720: mol_type = unassigned DNA; mol_type = unassigned DNA
agtccccacagctgcgccggtgactgaggggccgggcagtggagaagtggtggcggcgggcggcgggcggcaaaggagcagccatgagggccgggcccagtcaccgaccgtgctgaggagtcatggaagagtttttaaaccagtgtgagccactgccccatgttgtgttgatgccaatctgccatgctagcctgtctaccagggccaggtgacctgtcctttcagcttctttctcacacgcagatgaacactggacttcagaaatgggacactacacagaaaatgagaactgctcactatcctaccccagccgaattggatgcgtatgctaagaaggtcgcaaacaacccactgactataaaaatcttccccaacagtgtgaaggttccccagcggaaacacgttcgtcgtactgtgaacggcctcgacacatcagcccagcgctacagcccctacccgacacaggctgccaccaaggcaggcctgcttgccattgtcaaagtgccagccaaaagcatactcaaggactttgacggcacccgagcccggttgctccctgaggccatcatgaaccccccagtggcaccctatgctactgtggcacccagcactttagcccacccccaggcccaggctctggcccgccagcaggccctgcagcatgcacagaccctggcccatgcccctccccagacgctgcagcaccctcagggtatcccg

SEQ ID NO: 7114 - DNA, 549 bp, Homo sapiens
  source 1..549: mol_type = unassigned DNA; mol_type = unassigned DNA
agtccccacagctgcgccggtgactgaggggccgggcagtggagaagtggtggcggcgggcggcgggcggcaaaggagcagccatgagggccgggcccagtcaccgaccgtgctgaggagtcatggaagagtttttaaaccagtgtgagccactgccccatgttgtgttgatgccaatctgccatgctagcctgtctaccagggccaggtgacctgtcctttcagcttctttctcacacgcagatgaacactggacttcagaaattgtgaaggttccccagcggaaacacgttcgtcgtactgtgaacggcctcgacacatcagcccagcgctacagcccctacccgacacaggctgccaccaaggcaggcctgcttgccattgtcaaagtgccagccaaaagcatactcaaggactttgacggcacccgagcccggttgctccctgaggccatcatgaaccccccagtggcaccctatgctactgtggcacccagcactttagcccacccccaggcccaggctctggcccgccagcaggccctgcagc

SEQ ID NO: 7115 - DNA, 598 bp, Homo sapiens
  source 1..598: mol_type = unassigned DNA; mol_type = unassigned DNA
acagctgcgccggtgactgaggggccgggcagtggagaagtggtggcggcgggcggcgggcggcaaaggagcagccatgagggccgggcccagtcaccgaccgaatatcacaggagtgatgctgtgttcttcactgcatgatttcaaaagtgtgagccactgccccatgttgtgttgatgccaatctgccatgctagcctgtctaccagggccaggtgacctgtcctttcagcttctttctcacacgcagatgaacactggacttcagaaatgggacactacacagaaaatgagaactgctcactatcctaccccagccgaattggatgcgtatgctaagaaggtcgcaaacaacccactgactataaaaatcttccccaacagtgtgaaggttccccagcggaaacacgttcgtcgtactgtgaacggcctcgacacatcagcccagcgctacagcccctacccgacacaggctgccaccaaggcaggcctgcttgccattgtcaaagtgccagccaaaagcatactcaaggactttgacggcacccgagcccggttgctccctgaggccatcatgaaccccccagtggcaccctat

SEQ ID NO: 7116 - DNA, 2836 bp, Homo sapiens
  source 1..2836: mol_type = unassigned DNA; mol_type = unassigned DNA
agccggctgggggagggggtgtcggcgcaccgcggagtcctgcgctccgtgagcctggcacccggagcagccgcctccccctccccctgcctagaccgctagaagccccctctcttccatcctcccggggcgggggtgagctgggctcagctgcccaaggcgggcggggcggagccaggagccccacggagcgctgcggagcgaacctcacctttccagggcgcaagtgtgagccactgccccatgttgtgttgatgccaatctgccatgctagcctgtctaccagggccaggtgacctgtcctttcagcttctttctcacacgcagatgaacactggacttcagaaatgggacactacacagaaaatgagaactgctcactatcctaccccagccgaattggatgcgtatgctaagaaggtcgcaaacaacccactgactataaaaatcttccccaacagtgtgaaggttccccagcggaaacacgttcgtcgtactgtgaacggcctcgacacatcagcccagcgctacagcccctacccgacacaggctgccaccaaggcaggcctgcttgccattgtcaaagtgccagccaaaagcatactcaaggactttgacggcacccgagcccggttgctccctgaggccatcatgaaccccccagtggcaccctatgctactgtggcacccagcactttagcccacccccaggcccaggctctggcccgccagcaggccctgcagcatgcacagaccctggcccatgcccctccccagacgctgcagcaccctcagggtatcccgccaccccaggcactgtcccaccctcagagcctccagcagcctcagggcctgggccaccctcagcccatggcccaaacccagggcttggtccaccctcaggccctggctcaccagggtctccagcacccccacaatcccttgctgcatggaggccggaagatgccagactcagatgcccccccgaatgtgaccgtgtctacctcaactatccccctttcaatggcggccactctgcagcacagccagcctccggacctgagtagcatcgtgcaccagatcaaccagttttgccagacgagggcaggcatcagcactacctcagtgtgtgagggccagatcgccaaccccagccccattagtcgcagtctgctcatcaatgcaagcacccgggtgtcgacccacagcgtccccacaccaatgccttcatgtgtggtcaatcccatggagcacacccacgcggccaccgccgcgttgcctgctgcaggtcctgtcaacctgcccacaggcatctctcgcgtccccactggctaccctagcgacctcaagccagtcacctggaaccagcaccagctggcccacctacagcagatgtgcagcgaggctagtgggacgccagcccctggcctgacaggcaagcatgcggcaggacgcgagttggcagggcctggctttgtgggcaaggcccctgcctacccgcaggaactctgcctggcgcagtccttccatctgaagccacccctggaaaagccgaccccatccccaccagtcaacggcatggcagccccattggcctaccccaatggtcactacttccaacccctgtggaacaacattctgcccactcccaatagcgacagctcggggtctcaggaccttgccatgccgttccacggtgggcagcccacaggtgcacccctcgactgtgcggcagctcccggggcccactaccgagcagggaccgggggcggtccagtggcaagccagaacagcttgatgcaaacagtggattacctaagtggggatttccaacaggcctgcttccgagaacagagcctggccatgctgagcaaggcccaccgagcccctggcaaccgagcccccgatcccacagagagtcgaagtcttcatattcagcacccagggtatagataggtagccctgctgccctccacgtgcaacacatcatacatcaccctcctaggtttagtcttttaagtaactggatagtttcaaagtttcactgctccagtgtgatcattcttagatgtctaagaaagggaatttggtgggatctaagtggggacagaaggggtcctctcgtcctcccctccagcaacttttggttttatgttagaacctaaccctaagcccaggcttttctctccactgactgcctgtcagctagtctctccaccttggccatttccagccagctcccacccatcttttcttgaatctcttcctgtttcccttaggacgactgaggtgtgggctgacggaatgccctagttgaggtagtataggtgctcaggcccctaatccagacctctacctgttgctaccccccttcccctccctccaggactaagaagcaagatttcccaggtgctctgaaagctaattacttactcatcgaaggatctcaaatcaaagctgacccagtcttcatatccttcaagttcctttccattcctcaaggctttgttttgtgtctatattgatcccacagccactgcacttgcccttgccacacttgatctcaagggcatcttggaagtatttgaccatttcttgagatatggggggaaaaagtctttgtattggcatcttggttccagactcccctttccaaacctagaaaaatacagtgacctttgagcatacccaagatccctttctcactgttgcctgtcccctaactcacctccccacagcccctatcctttccccctcaacaaaaacaaaatctaccttacttgaggaattaggtaggtaaggaatgatcacattggagtttgggattaaaaacacc

SEQ ID NO: 7117 - DNA, 886 bp, Homo sapiens
  source 1..886: mol_type = unassigned DNA; mol_type = unassigned DNA
cgggcggcaaaggagcagccatgagggccgggcccagtcaccgaccgtgctgaggagtcatggaagagtttttaaaccaggaatatcacaggagtgatgctgtgttcttcactgcatgatttcaaaagtgtgagccactgccccatgttgtgttgatgccaatctgccatgctagcctgtctaccagggccaggtgacctgtcctttcagcttctttctcacacgcagatgaacactggacttcagaaatgggacactacacagaaaatgagaactgctcactatcctaccccagccgaattggatgcgtatgctaagaaggtcgcaaacaacccactgactataaaaatcttccccaacagtgtgaaggttccccagcggaaacacgttcgtcgtactgtgaacggcctcgacacatcagcccagcgctacagcccctacccgacacaggctgccaccaaggcaggcctgcttgccattgtcaaagtgccagccaaaagcatactcaaggactttgacggcacccgagcccggttgctccctgaggccatcatgaaccccccagtggcaccctatgctactgtggcacccagcactttagcccacccccaggcccaggctctggcccgccagcaggccctgcagcatgcacagaccctggcccatgcccctccccagacgctgcagcaccctcagggtatcccgccaccccaggcactgtcccaccctcagagcctccagcagcctcagggcctgggccaccctcagcccatggcccaaacccagggcttggtccaccctcaggccctggctcaccagggtctccagcacccccacaatcccttgctgcatggaggccggaagatgccagactcagatgcccccc

SEQ ID NO: 7118 - DNA, 561 bp, Homo sapiens
  source 1..561: mol_type = unassigned DNA; mol_type = unassigned DNA
ctttccagggcgcaaggtgtgtgtgtgctttttctaacgcgaccccgacttcagccgacttaacctttgtgagccactgccccatgttgtgttgatgccaatctgccatgctagcctgtctaccagggccaggtgacctgtcctttcagcttctttctcacacgcagatgaacactggacttcagaaattgtgaaggttccccagcggaaacacgttcgtcgtactgtgaacggcctcgacacatcagcccagcgctacagcccctacccgacacaggctgccaccaaggcaggcctgcttgccattgtcaaagtgccagccaaaagcatactcaaggactttgacggcacccgagcccggttgctccctgaggccatcatgaaccccccagtggcaccctatgctactgtggcacccagcactttagcccacccccaggcccaggctctggcccgccagcaggccctgcagcatgcacagaccctggcccatgcccctccccagacgctgcagcaccctcagggtatcccgccaccccaggcactgtcccaccctcagag

SEQ ID NO: 7119 - DNA, 564 bp, Homo sapiens
  source 1..564: mol_type = unassigned DNA; mol_type = unassigned DNA
gattgaacagagcggctgacgaaccagcgagtaggagagaggtgctgaggagtcatggaagagtttttaaaccagtgtgagccactgccccatgttgtgttgatgccaatctgccatgctagcctgtctaccagggccaggtgacctgtcctttcagcttctttctcacacgcagatgaacactggacttcagaaattgtgaaggttccccagcggaaacacgttcgtcgtactgtgaacggcctcgacacatcagcccagcgctacagcccctacccgacacaggctgccaccaaggcaggcctgcttgccattgtcaaagtgccagccaaaagcatactcaaggactttgacggcacccgagcccggttgctccctgaggccatcatgaaccccccagtggcaccctatgctactgtggcacccagcactttagcccacccccaggcccaggctctggcccgccagcaggccctgcagcatgcacagaccctggcccatgcccctccccagacgctgcagcaccctcagggtatcccgccaccccaggcactgtcccaccct

SEQ ID NO: 7120 - DNA, 2613 bp, Homo sapiens
  source 1..2613: mol_type = unassigned DNA; mol_type = unassigned DNA
cacagctgcgccggtgactgaggggccgggcagtggagaagtggtggcggcgggcggcgggcggcaaaggagcagccatgagggccgggcccagtcaccgacctgtgagccactgccccatgttgtgttgatgccaatctgccatgctagcctgtctaccagggccaggtgacctgtcctttcagcttctttctcacacgcagatgaacactggacttcagaaattgtgaaggttccccagcggaaacacgttcgtcgtactgtgaacggcctcgacacatcagcccagcgctacagcccctacccgacacaggctgccaccaaggcaggcctgcttgccattgtcaaagtgccagccaaaagcatactcaaggactttgacggcacccgagcccggttgctccctgaggccatcatgaaccccccagtggcaccctatgctactgtggcacccagcactttagcccacccccaggcccaggctctggcccgccagcaggccctgcagcatgcacagaccctggcccatgcccctccccagacgctgcagcaccctcagggtatcccgccaccccaggcactgtcccaccctcagagcctccagcagcctcagggcctgggccaccctcagcccatggcccaaacccagggcttggtccaccctcaggccctggctcaccagggtctccagcacccccacaatcccttgctgcatggaggccggaagatgccagactcagatgcccccccgaatgtgaccgtgtctacctcaactatccccctttcaatggcggccactctgcagcacagccagcctccggacctgagtagcatcgtgcaccagatcaaccagttttgccagacgagggcaggcatcagcactacctcagtgtgtgagggccagatcgccaaccccagccccattagtcgcagtctgctcatcaatgcaagcacccgggtgtcgacccacagcgtccccacaccaatgccttcatgtgtggtcaatcccatggagcacacccacgcggccaccgccgcgttgcctgctgcaggtcctgtcaacctgcccacaggcatctctcgcgtccccactggctaccctagcgacctcaagccagtcacctggaaccagcaccagctggcccacctacagcagatgtgcagcgaggctagtgggacgccagcccctggcctgacaggcaagcatgcggcaggacgcgagttggcagggcctggctttgtgggcaaggcccctgcctacccgcaggaactctgcctggcgcagtccttccatctgaagccacccctggaaaagccgaccccatccccaccagtcaacggcatggcagccccattggcctaccccaatggtcactacttccaacccctgtggaacaacattctgcccactcccaatagcgacagctcggggtctcaggaccttgccatgccgttccacggtgggcagcccacaggtgcacccctcgactgtgcggcagctcccggggcccactaccgagcagggaccgggggcggtccagtggcaagccagaacagcttgatgcaaacagtggattacctaagtggggatttccaacaggcctgcttccgagaacagagcctggccatgctgagcaaggcccaccgagcccctggcaaccgagcccccgatcccacagagagtcgaagtcttcatattcagcacccagggtatagataggtagccctgctgccctccacgtgcaacacatcatacatcaccctcctaggtttagtcttttaagtaactggatagtttcaaagtttcactgctccagtgtgatcattcttagatgtctaagaaagggaatttggtgggatctaagtggggacagaaggggtcctctcgtcctcccctccagcaacttttggttttatgttagaacctaaccctaagcccaggcttttctctccactgactgcctgtcagctagtctctccaccttggccatttccagccagctcccacccatcttttcttgaatctcttcctgtttcccttaggacgactgaggtgtgggctgacggaatgccctagttgaggtagtataggtgctcaggcccctaatccagacctctacctgttgctaccccccttcccctccctccaggactaagaagcaagatttcccaggtgctctgaaagctaattacttactcatcgaaggatctcaaatcaaagctgacccagtcttcatatccttcaagttcctttccattcctcaaggctttgttttgtgtctatattgatcccacagccactgcacttgcccttgccacacttgatctcaagggcatcttggaagtatttgaccatttcttgagatatggggggaaaaagtctttgtattggcatcttggttccagactcccctttccaaacctagaaaaatacagtgacctttgagcatacccaagatccctttctcactgttgcctgtcccctaactcacctccccacagcccctatcctttccccctcaacaaaaacaaaatctaccttacttgaggaattaggtaggtaaggaatgatcacattggagtttgggattaaaaacaccaaaaaaaaaaaaa

SEQ ID NO: 7121 - DNA, 4161 bp, Homo sapiens
  source 1..4161: mol_type = unassigned DNA; mol_type = unassigned DNA
acacgctgcgcaggcgcaggagcggctccgggtagtccccacagctgcgccggtgactgaggggccgggcagtggagaagtggtggcggcgggcggcgggcggcaaaggagcagccatgagggccgggcccagtcaccgacctgtgagccactgccccatgttgtgttgatgccaatctgccatgctagcctgtctaccagggccaggtgacctgtcctttcagcttctttctcacacgcagatgaacactggacttcagaaatgggacactacacagaaaatgagaactgctcactatcctaccccagccgaattggatgcgtatgctaagaaggtcgcaaacaacccactgactataaaaatcttccccaacagtgtgaaggttccccagcggaaacacgttcgtcgtactgtgaacggcctcgacacatcagcccagcgctacagcccctacccgacacaggctgccaccaaggcaggcctgcttgccattgtcaaagtgccagccaaaagcatactcaaggactttgacggcacccgagcccggttgctccctgaggccatcatgaaccccccagtggcaccctatgctactgtggcacccagcactttagcccacccccaggcccaggctctggcccgccagcaggccctgcagcatgcacagaccctggcccatgcccctccccagacgctgcagcaccctcagggtatcccgccaccccaggcactgtcccaccctcagagcctccagcagcctcagggcctgggccaccctcagcccatggcccaaacccagggcttggtccaccctcaggccctggctcaccagggtctccagcacccccacaatcccttgctgcatggaggccggaagatgccagactcagatgcccccccgaatgtgaccgtgtctacctcaactatccccctttcaatggcggccactctgcagcacagccagcctccggacctgagtagcatcgtgcaccagatcaaccagttttgccagacgagggcaggcatcagcactacctcagtgtgtgagggccagatcgccaaccccagccccattagtcgcagtctgctcatcaatgcaagcacccgggtgtcgacccacagcgtccccacaccaatgccttcatgtgtggtcaatcccatggagcacacccacgcggccaccgccgcgttgcctgctgcaggtcctgtcaacctgcccacaggcatctctcgcgtccccactggctaccctagcgacctcaagccagtcacctggaaccagcaccagctggcccacctacagcagatgtgcagcgaggctagtgggacgccagcccctggcctgacaggcaagcatgcggcaggacgcgagttggcagggcctggctttgtgggcaaggcccctgcctacccgcaggaactctgcctggcgcagtccttccatctgaagccacccctggaaaagccgaccccatccccaccagtcaacggcatggcagccccattggcctaccccaatggtcactacttccaacccctgtggaacaacattctgcccactcccaatagcgacagctcggggtctcaggaccttgccatgccgttccacggtgggcagcccacaggtgcacccctcgactgtgcggcagctcccggggcccactaccgagcagggaccgggggcggtccagtggcaagccagaacagcttgatgcaaacagtggattacctaagtggggatttccaacaggcctgcttccgagaacagagcctggccatgctgagcaaggcccaccgagcccctggcaaccgagcccccgatcccacagagagtcgaagtcttcatattcagcacccagggtatagataggtagccctgctgccctccacgtgcaacacatcatacatcaccctcctaggtttagtcttttaagtaactggatagtttcaaagtttcactgctccagtgtgatcattcttagatgtctaagaaagggaatttggtgggatctaagtggggacagaaggggtcctctcgtcctcccctccagcaacttttggttttatgttagaacctaaccctaagcccaggcttttctctccactgactgcctgtcagctagtctctccaccttggccatttccagccagctcccacccatcttttcttgaatctcttcctgtttcccttaggacgactgaggtgtgggctgacggaatgccctagttgaggtagtataggtgctcaggcccctaatccagacctctacctgttgctaccccccttcccctccctccaggactaagaagcaagatttcccaggtgctctgaaagctaattacttactcatcgaaggatctcaaatcaaagctgacccagtcttcatatccttcaagttcctttccattcctcaaggctttgttttgtgtctatattgatcccacagccactgcacttgcccttgccacacttgatctcaagggcatcttggaagtatttgaccatttcttgagatatggggggaaaaagtctttgtattggcatcttggttccagactcccctttccaaacctagaaaaatacagtgacctttgagcatacccaagatccctttctcactgttgcctgtcccctaactcacctccccacagcccctatcctttccccctcaacaaaaacaaaatctaccttacttgaggaattaggtaggtaaggaatgatcacattggagtttgggattaaaaacaccaaaaaaaaaaaaatgcatttggttctctctacactggctaagaatattgctctacactgtaagttttaaacgttacgtttctgtatgaatgtagtgtgggtttgagtagcattgtgtgtgagtggccccacaggtacattcaccctctagtgcagcccctcagtttaatgaaggaaaaaaaaacaaacacaaagccttaagctctttgagtacttcctttaccaaatgagcatggttctaacacctggagctgggcctacattggaaacaagcccctcctgccctctgtccattcttagagcataccttcatccactccatgctcagcacgtctcatcccaagcgacaattagttggctagaaacacttttctgtaattttaaacttagactgttttgttacaaatttttgcaccattctgttaaagatgcagaattgggcttttttattttttacagatgaaataagcccttacctttcctcttgtctctggggaatgtcagctgatggttcttatttaaggttttgcattttgttcactatccactactgttcgttagccagaaattctctagtgatctgaagcaatgtgactgaagaccagttttaagttatgtgttggcaagttgccttatatttaaaaggaaaaagaaaaaaaaaaaagcctgattgtgttatgccaaatgatagcaacatgaagtcctaatttattgttcccaattgttttcctgccgtctgtgaacactggtacctccctgtcctgatcccccaggagcacctgtagcttctgactcaatgccttctccgaaggtgttggccgccatctcacccagggccctcttccagttcctgcttttctgagtcagatttaaagagcaccactgtcttccccctaccccttgcttgatctccaaagcagatattcttgctgtatttttttttcctccccaatacctctccctgaaaggtgagctgctattttaggaaactggaccagacaccaacttgggggctttaagtcaaacaacctcaaacccatctcttcctgtgtaggggtgcaagcctctgaagctctcactcccacccttagtctgcatggaaaatgtactgtgatccccctgcccccaactgccctcgcctttggtgtgagatgttccttctttcggagttcagcctgagtccctctcccctctgccagccaacccccagccagcaataagggtccaagccagggcctcctctccacactccctgtctccatcctacactaccctagggaatacctggattccccattctatccacatactgtagcattcattctccatctctctcacctcacctgtggtggtttatgggtgtgatggggtttttaagattattataaaccagtaaaaataagaaaacctc

SEQ ID NO: 7122 - DNA, 2494 bp, Homo sapiens
  source 1..2494: mol_type = unassigned DNA; mol_type = unassigned DNA
tggggtaattctgtgtgcgcgcgtgtctcccccgcaccaaccttttttgcacactcgaagctgaatattttcttttttagagaatttacccgcacctcctgcggggttcctaagcactctctctgctcccctccccccaactccctaccacagggccgctcccagtagttttattcttcgatcttgcccgggccgagcctggcaggggccggtggctcagcgggcctcgcacccggcgctccgccgccgccgccgcccagctgcgccggggcgccctccggagatgctgccgtggaagaagcacaagttcgagctgctggccgaggcgccgccgcggcaggcgtccaagcccaagggctacgctgtgagcctgcactactcggcgctcagctcgctggcgcgggcgtgccccgaaggcgcgcttagccgggtgggcagcatgttccgctccaagcgcaagaagctgcacatcactagcgaggacccaacttacaccgtgctctacctgggcaatgccaccaccatccaggcgcgcggcgacggctgcaccgaccttgctgtgggcaagatctggagcaagagcgaggcgggccgtcagggcaccaagatgaagctgacggtgagtgcgcagggtatccgcatggtgcacgccgaggagcgcgcgctgcgccgcccgggccacctctacctgctgcaccgcgtcacctactgcgtggccgacgcgcggctgcccaaggtcttcgcctgggtgtaccggcacgagctgaagcacaaggccgtgatgctgcgctgccacgccgtgctggtgtccaagcccgaaaaggcgcaggccatggccctgctgctctaccagacgtcggccaacgcgctggcggaatttaaacgcctcaagcggcgggacgacgcgcgtcaccagcagcaggagctggtgggcgcacacaccatcccgctagtgccgctgcgcaagctgctcctacacggaccctgctgctataaaccgccggtggagcgcagccgcagcgcgcccaagcttggctccatcaccgaggacctgctcggcgaacagctggagcaggagctgcaggaggaagaggaagaggagcaacccgagggctgcccggaggaggaggagaaccgtgcggcagagggagatccagcagaggaggaggccgaggcgcagcgtgcgctagtggtcgccatgcactttgagtgcggggacttgttggatactctggagaatggccgtggggaggcgctaggaggcggcgggggctccctgggcccgggggccgggccgccgcctctgctgctgggcagcgcctccgacatgaaggctgagctgtcgcaacttattagcgacctgggcgagctcagcttcggcaacgacgtgcgcaccctgcaggccgacttgcgggtgacgcgcctgctgtcaggcgacagcacgggcagcgagagctccatcgagggcgggggccctgacgccacctccgccaccgccggggactcgtcccgccaggccgacggcgccagtgcagacgagccccactcgggctgagctcctccgcgcgtcgccggcgctccaccgtggctacccatccgtggtcccgacaacctccctgtcccttgcccgcccccaggaagggggaaatggggcatttggggcccagacctacacttggagcccaggtccagcgttcccccgaccgctttcccctacctcccggcccccgctcccgccccagcacttttggctctgttgcgcgtggggatgcggggagatttgagaggggaaaaccccgccaggagggagagagaggcacccctctgggatgcgggtgagggaaggttggctgaagttcctagtctcaggccgtaggtgcctggccagtttcctgtttgtggggcagctggggcctgaggaggaggggttcacttcctcctcccaccccctgggagcggccctgcgctgtcactgacatctcattaaaaaaaaaaaaaaatttgctctcaaggtgtttgaggctttaatgcaaccctttagcccttggttctttttggtgcaagaattctggctgtttacctcagactcagacccctgaaatgttgccaaattcttcaaataactgtttggggggtggggggagatgaaagagagtcgcgttttgtttacagttaaagacatccaatatcttaaaaaggagttttcctttagaaacacacacacccttcctcttgctcaaaagatctcactccatgatactgtgtaaaatatttttgcactgttgtgaagtatttttgacttttttctgtacataactgtgttctcagagctgaatgtttatatcttttgctgtgcaaaagaaacatgtaaaatgttgttcagttgtatatacagaaatgtgtataaaacattttgttattttttaaaagtagcactgttctggttctgtttgcacgccagtggggagagaataaagaggaaaatttaacagaa

SEQ ID NO: 7123 - DNA, 546 bp, Homo sapiens
  source 1..546: mol_type = unassigned DNA; mol_type = unassigned DNA
gaagcgcattggcgtccgcgacgtgcgcctcaacggctcggcagccagccatgtcctgcaccaggacagcggcctgggctacaaggacctggacctcatcttctgcgccgacctgcgcggggaaggggagtttcagactgtgaaggacgtcgtgctggactgcctgttggacttcttacccgagggggtgaacaaagagaagatcacaccactcacgctcaaggaagaaagtcacacaaccacatattttctgaacataagctgaacttctacttccatggagtgagttacttcacctcattggcaaaagacaacagaagagtccaaagtctgaggggactgggcaagcttctgtcacatgctttcagaatgaagacaatctgcaagaattttaagttgtgacctctacagagaaaagaatgaaaagtagccaaatctccacatgagagattttggactattttgcagtgtaaaccccatctgatttatatgaagtaagcagactttctctccaagagttcaaaataaattaattctaatgctaaa

SEQ ID NO: 7124 - DNA, 5664 bp, Homo sapiens
  source 1..5664: mol_type = unassigned DNA; mol_type = unassigned DNA
aaaaaaagtactgaagacattttccccgcacaactgctaaagctccagagacacgagcgtgtgtggcagcaagagccgccagttcgggaccaccgcagctggggtggcagcggcgcaggaggggtcgcggggagggagtggtgagcgcaggcggcaggggtctgggaaagacgaagtcgctatttgctgtctgagcgcgctcgcagctcctggaagtgttgccgcctctcggtttcgctctcgctcgctgcgctcctagaaggggcggccgcctccaggtgacacagacgggactctcgcttgcgctttccagatgcatcagagatacttttggactgaccagggccaagtggcgctcggcgggcactacatggcggagggtgaagggtacttcgccatgtctgaggacgagctggcctgcagcccctacatccccctaggcggcgacttcggcggcggcgacttcggcggcggcgacttcggcggcggcgacttcggcggtggcggcagcttcggtgggcattgcttggactattgcgaaagccctacggcgcactgcaatgtgctgaactgggagcaagtgcagcggctggacggcatcctgagcgagaccattccgattcacgggcgcggcaacttccccacgctcgagctgcagccgagcctgatcgtgaaggtggtgcggcggcgcctggccgagaagcgcattggcgtccgcgacgtgcgcctcaacggctcggcagccagccatgtcctgcaccaggacagcggcctgggctacaaggacctggacctcatcttctgcgccgacctgcgcggggaaggggagtttcagactgtgaaggacgtcgtgctggactgcctgttggacttcttacccgagggggtgaacaaagagaagatcacaccactcacgctcaaggaagcttatgtgcagaaaatggttaaagtgtgcaatgactctgaccgatggagtcttatatccctgtcaaacaacagtggcaaaaatgtggaactgaaatttgtggattccctccggaggcagtttgaattcagtgtagattcttttcaaatcaaattagactctcttctgctcttttatgaatgttcagagaacccaatgactgagacatttcaccccacaataatcggggagagcgtctatggcgatttccaggaagcctttgatcacctttgtaacaagatcattgccaccaggaacccagaggaaatccgagggggaggcctgcttaagtactgcaacctcttggtgaggggctttaggcccgcctctgatgaaatcaagacccttcaaaggtatatgtgttccaggtttttcatcgacttctcagacattggagagcagcagagaaaactggagtcctatttgcagaaccactttgtgggattggaagaccgcaagtatgagtatctcatgacccttcatggagtggtaaatgagagcacagtgtgcctgatgggacatgaaagaagacagactttaaaccttatcaccatgctggctatccgggtgttagctgaccaaaatgtcattcctaatgtggctaatgtcacttgctattaccagccagccccctatgtagcagatgccaactttagcaattactacattgcacaggttcagccagtattcacgtgccagcaacagacctactccacttggctaccctgcaattaagaatcatttaaaaatgtcctgtggggaagccatttcagacaagacaggagagaaaaaaaaaaaaaagaaaaaaaaaagagtgatccagcccttattagggatgtgttttgtgcaatgatgatatgctcctggttttaagtttggcaaagcttatgtatcttttaatagatgtgggagcatgatctcgaaaggatccttttcccttctcttattctcctacccaattggattctatcctgcaaaaaaagagagacctgtcattagaagcaaccaggttctcctgatacaagagaagaaatgtgtgatgacaatatgggtttgctgtatctgctcccatagctttgccataggaaaaaaaaaagtggaaagtttcttttaagatggaattcataaaagggaaaatacggaggaaaaaaggtctcactccaacttgtgaatcagtttaggagttcagatattaatagtaacaatacaggaaaaaggggaactccaacgttgggattactgtctgaggcttgtagcaagtgctttctgtggaatgatcttgttttgctaacaaacggcttgctccaaatgaacagtagtaggttggtgcagttctcgtaacaatcagcagaacttatgatgacacaatccattaattccagctgcgtgcatagatcacatttttaaaatgtaaaaatgcaagcaaaaacagctgtaacaaagaaagtgtgctcaaggaccaaagatttaacagataaaaatacccaattagaagagatatagtagactatatgaagagagattatatttgttacacaccaatatacatcaaagtgcctgttgccttctgaaaatttgaagtggcaaaattattttatggtttaatgattattttattttatcagggactgcctcaagaagaaaataacataagcttgtgaatggtggagaaaatgccctattttttcttgcaaatacttgtataaagttaacatttgttgatctgatattatcataggtacatgtgtatgtgtgtataaattatatgtgtgtgtgtatatatacattttatatatacattttatatgtatatatacacagtagattgactatgatctagaataatgtctcaaataggaaatgtttaaatactgtgtgtttttatgttttcaacaggataacatgagacgtgggcatattgcaatgatgaattaaatccacatctaaaaaaattaaatgaaggagggaaccaagtaatatatttcataggaagagcagaaattatactgttttagtgggatttttttttctttttttttttttctttggtgagccataaaattccacaaatgggagaatatttgtttggcagagcactcttttttatattgaactgccattttgacagttggaacccatttattaaaaaaaaaattgcattcctctatgatgtttaatctagtggatcatggatcagtaataggctacttaaatccctgactgctaaaaaggatttccggtgatctaaacactacttgctaatgtttaaatgaattttaatgaatgcattctgcatttctggaccactagaatttagtaatgtgaaatgaccctttttacagaatatttgcacaattgcttaaaatttatatatgagatatatattatatataacattttataaatcatgtcaatatgaaacatctttgatctggttgtcacactgcatttaaatatttagtactgtactttaaatcgctttccattaaatcaaatccaactttattttctttcttacaaaaataccagttatacctttgtgaaatgaactggcattactatttcagttcaataacagctaatcctaaaaccaccctttctcctagccagtagttcctctagatactggtctctgaaaatgcatttgttaaaaacaaaacaaaactaacacataagaaccttccctttgtgttgtgaaacaaccacataatctccacaaccttagtggatgactgcttgctatgataattcctcgaagacccaattagaagattttcatcatcagttaaagagagaccacgggagaaaaaaatatcctcctgttggcagtataatttgtttgtttgtttatctagggatcctcagatgcttagtgctaggttaatccaggttaatccgtctggactaccttttgtgcatctttctttgaagccttaatgggaacctgatgggtttgctgtagcagcttccttgtgaattctgtcagagctgcaacagccgctgcactgccactcagttttctaaggaactcctcctactaccatcttggctcagtctccctcacttaagccctgggtttgaaaaattaattgcaacttcccaggaaacattgttcagtttgcagattaagcctggcactcacctatcagaaaccagagctccgcctgcttagttgtttcaaagttttctgaaagaaaactaggggagcacttgtgaacacaggagcagctggtgatctgctttcttaccctaactcttgacaaatgagtcgtctactattttaaagagtctggaggtctctgactctgccataacaataacctgctgttaatttataacacagatttttgtttggaagagccttatttgaaatacactttgatttattttcttaaatatttatattcttttcttgcttacttcagggttggtagcttagttggaagtgccagcacctggcacctattcatatagaacaggctgtactcaagacaacttctagcatttactttaagacttatataatttatttctattttgtgtgtactatagtcttgtgcatatgtagttgaacacacagtgaaatatatgtctctctttgtggatgtgcggcctaaaaatttgaatgtctggtgagagagagccatgtgtataggtcagagaaaagaacagctcccgactccctattagcgcctgtgatttgtttccttttgtgtttatctggcctagtgtgctgtttctttaaaccaggaagaagttttgtcttttggaggctcttctcacctgtccagcctggcatgtcagagaacacatagcctgtgacaatgccgtttttaaaggtttacttaatttgcagtaaatccagctgcctcaagaactcctacaccaagatggacatttcctttccagaaatgggatcaagtatctgctcactttggtattggatggactaataatgtagctccaaaaatgcaaggatggaagaatatgtgtaatccaaaccaaggaaggaaatgaaaagtgaacgtactgtttttaccacccctttctgtttgcttattgttggttgcttcactgtgcataaagttgttttcaatgcaacgcttgttaaataaatattgtgaactattttgtaaatgaaatgtattatgttgaaagctgtcagttcaaaaataagcttttttgttgttgttgaagatgaagtgtgttaggtgaaaccaaaaagccaaaaaaagtaatttcatatatagcatctatttgaatataatctttctttaaaatttcttttagcatagcattttcagtgctaagaaagaatctctatgttatattttgttaaaataatggctttctaacaaagcaaatggtaaagtacaaagttggaagatgtcaagttaacgagacttgctgcaaagccttgcagaacggaggaggctctgcctgctggctgtctctccctccaacctctctacaatcatgcctgctttgaggtgttctgttgcagcaagctgcaccttgggtcactcttttggaatattttgactataggctgcgtcacaggcagaaaaggagttgatggaaaatggactaaaaaactgacatgtttgaatcagtgctagagggaacagattgtgaattttgtttacagcatccaatatttggatttttttgtaaataaaaaagttatttttttctattga

SEQ ID NO: 7125 - DNA, 5609 bp, Homo sapiens
  source 1..5609: mol_type = unassigned DNA; mol_type = unassigned DNA
aaaaaaagtactgaagacattttccccgcacaactgctaaagctccagagacacgagcgtgtgtggcagcaagagccgccagttcgggaccaccgcagctggggtggcagcggcgcaggaggggtcgcggggagggagtggtgagcgcaggcggcaggggtctgggaaagacgaagtcgctatttgctgtctgagcgcgctcgcagctcctggaagtgttgccgcctctcggtttcgctctcgctcgctgcgctcctagaaggggcggccgcctccaggactgaccagggccaagtggcgctcggcgggcactacatggcggagggtgaagggtacttcgccatgtctgaggacgagctggcctgcagcccctacatccccctaggcggcgacttcggcggcggcgacttcggcggcggcgacttcggcggcggcgacttcggcggtggcggcagcttcggtgggcattgcttggactattgcgaaagccctacggcgcactgcaatgtgctgaactgggagcaagtgcagcggctggacggcatcctgagcgagaccattccgattcacgggcgcggcaacttccccacgctcgagctgcagccgagcctgatcgtgaaggtggtgcggcggcgcctggccgagaagcgcattggcgtccgcgacgtgcgcctcaacggctcggcagccagccatgtcctgcaccaggacagcggcctgggctacaaggacctggacctcatcttctgcgccgacctgcgcggggaaggggagtttcagactgtgaaggacgtcgtgctggactgcctgttggacttcttacccgagggggtgaacaaagagaagatcacaccactcacgctcaaggaagcttatgtgcagaaaatggttaaagtgtgcaatgactctgaccgatggagtcttatatccctgtcaaacaacagtggcaaaaatgtggaactgaaatttgtggattccctccggaggcagtttgaattcagtgtagattcttttcaaatcaaattagactctcttctgctcttttatgaatgttcagagaacccaatgactgagacatttcaccccacaataatcggggagagcgtctatggcgatttccaggaagcctttgatcacctttgtaacaagatcattgccaccaggaacccagaggaaatccgagggggaggcctgcttaagtactgcaacctcttggtgaggggctttaggcccgcctctgatgaaatcaagacccttcaaaggtatatgtgttccaggtttttcatcgacttctcagacattggagagcagcagagaaaactggagtcctatttgcagaaccactttgtgggattggaagaccgcaagtatgagtatctcatgacccttcatggagtggtaaatgagagcacagtgtgcctgatgggacatgaaagaagacagactttaaaccttatcaccatgctggctatccgggtgttagctgaccaaaatgtcattcctaatgtggctaatgtcacttgctattaccagccagccccctatgtagcagatgccaactttagcaattactacattgcacaggttcagccagtattcacgtgccagcaacagacctactccacttggctaccctgcaattaagaatcatttaaaaatgtcctgtggggaagccatttcagacaagacaggagagaaaaaaaaaaaaaagaaaaaaaaaagagtgatccagcccttattagggatgtgttttgtgcaatgatgatatgctcctggttttaagtttggcaaagcttatgtatcttttaatagatgtgggagcatgatctcgaaaggatccttttcccttctcttattctcctacccaattggattctatcctgcaaaaaaagagagacctgtcattagaagcaaccaggttctcctgatacaagagaagaaatgtgtgatgacaatatgggtttgctgtatctgctcccatagctttgccataggaaaaaaaaaagtggaaagtttcttttaagatggaattcataaaagggaaaatacggaggaaaaaaggtctcactccaacttgtgaatcagtttaggagttcagatattaatagtaacaatacaggaaaaaggggaactccaacgttgggattactgtctgaggcttgtagcaagtgctttctgtggaatgatcttgttttgctaacaaacggcttgctccaaatgaacagtagtaggttggtgcagttctcgtaacaatcagcagaacttatgatgacacaatccattaattccagctgcgtgcatagatcacatttttaaaatgtaaaaatgcaagcaaaaacagctgtaacaaagaaagtgtgctcaaggaccaaagatttaacagataaaaatacccaattagaagagatatagtagactatatgaagagagattatatttgttacacaccaatatacatcaaagtgcctgttgccttctgaaaatttgaagtggcaaaattattttatggtttaatgattattttattttatcagggactgcctcaagaagaaaataacataagcttgtgaatggtggagaaaatgccctattttttcttgcaaatacttgtataaagttaacatttgttgatctgatattatcataggtacatgtgtatgtgtgtataaattatatgtgtgtgtgtatatatacattttatatatacattttatatgtatatatacacagtagattgactatgatctagaataatgtctcaaataggaaatgtttaaatactgtgtgtttttatgttttcaacaggataacatgagacgtgggcatattgcaatgatgaattaaatccacatctaaaaaaattaaatgaaggagggaaccaagtaatatatttcataggaagagcagaaattatactgttttagtgggatttttttttctttttttttttttctttggtgagccataaaattccacaaatgggagaatatttgtttggcagagcactcttttttatattgaactgccattttgacagttggaacccatttattaaaaaaaaaattgcattcctctatgatgtttaatctagtggatcatggatcagtaataggctacttaaatccctgactgctaaaaaggatttccggtgatctaaacactacttgctaatgtttaaatgaattttaatgaatgcattctgcatttctggaccactagaatttagtaatgtgaaatgaccctttttacagaatatttgcacaattgcttaaaatttatatatgagatatatattatatataacattttataaatcatgtcaatatgaaacatctttgatctggttgtcacactgcatttaaatatttagtactgtactttaaatcgctttccattaaatcaaatccaactttattttctttcttacaaaaataccagttatacctttgtgaaatgaactggcattactatttcagttcaataacagctaatcctaaaaccaccctttctcctagccagtagttcctctagatactggtctctgaaaatgcatttgttaaaaacaaaacaaaactaacacataagaaccttccctttgtgttgtgaaacaaccacataatctccacaaccttagtggatgactgcttgctatgataattcctcgaagacccaattagaagattttcatcatcagttaaagagagaccacgggagaaaaaaatatcctcctgttggcagtataatttgtttgtttgtttatctagggatcctcagatgcttagtgctaggttaatccaggttaatccgtctggactaccttttgtgcatctttctttgaagccttaatgggaacctgatgggtttgctgtagcagcttccttgtgaattctgtcagagctgcaacagccgctgcactgccactcagttttctaaggaactcctcctactaccatcttggctcagtctccctcacttaagccctgggtttgaaaaattaattgcaacttcccaggaaacattgttcagtttgcagattaagcctggcactcacctatcagaaaccagagctccgcctgcttagttgtttcaaagttttctgaaagaaaactaggggagcacttgtgaacacaggagcagctggtgatctgctttcttaccctaactcttgacaaatgagtcgtctactattttaaagagtctggaggtctctgactctgccataacaataacctgctgttaatttataacacagatttttgtttggaagagccttatttgaaatacactttgatttattttcttaaatatttatattcttttcttgcttacttcagggttggtagcttagttggaagtgccagcacctggcacctattcatatagaacaggctgtactcaagacaacttctagcatttactttaagacttatataatttatttctattttgtgtgtactatagtcttgtgcatatgtagttgaacacacagtgaaatatatgtctctctttgtggatgtgcggcctaaaaatttgaatgtctggtgagagagagccatgtgtataggtcagagaaaagaacagctcccgactccctattagcgcctgtgatttgtttccttttgtgtttatctggcctagtgtgctgtttctttaaaccaggaagaagttttgtcttttggaggctcttctcacctgtccagcctggcatgtcagagaacacatagcctgtgacaatgccgtttttaaaggtttacttaatttgcagtaaatccagctgcctcaagaactcctacaccaagatggacatttcctttccagaaatgggatcaagtatctgctcactttggtattggatggactaataatgtagctccaaaaatgcaaggatggaagaatatgtgtaatccaaaccaaggaaggaaatgaaaagtgaacgtactgtttttaccacccctttctgtttgcttattgttggttgcttcactgtgcataaagttgttttcaatgcaacgcttgttaaataaatattgtgaactattttgtaaatgaaatgtattatgttgaaagctgtcagttcaaaaataagcttttttgttgttgttgaagatgaagtgtgttaggtgaaaccaaaaagccaaaaaaagtaatttcatatatagcatctatttgaatataatctttctttaaaatttcttttagcatagcattttcagtgctaagaaagaatctctatgttatattttgttaaaataatggctttctaacaaagcaaatggtaaagtacaaagttggaagatgtcaagttaacgagacttgctgcaaagccttgcagaacggaggaggctctgcctgctggctgtctctccctccaacctctctacaatcatgcctgctttgaggtgttctgttgcagcaagctgcaccttgggtcactcttttggaatattttgactataggctgcgtcacaggcagaaaaggagttgatggaaaatggactaaaaaactgacatgtttgaatcagtgctagagggaacagattgtgaattttgtttacagcatccaatatttggatttttttgtaaataaaaaagttatttttttctattga

SEQ ID NO: 7126 - DNA, 5537 bp, Homo sapiens
  source 1..5537: mol_type = unassigned DNA; mol_type = unassigned DNA
atgcagatgaggagggtgtggcgaacgtgccgctctgggccccggaagcgcagagaagcccggtataaaaaaagtactgaagacattttccccgcacaactgctaaagctccagagacacgagcgtgtgtggcagcaagagccgccagttcgggaccaccgcagctggggtggcagcggcgcaggaggggtcgcggggagggagtggactgaccagggccaagtggcgctcggcgggcactacatggcggagggtgaagggtacttcgccatgtctgaggacgagctggcctgcagcccctacatccccctaggcggcgacttcggcggcggcgacttcggcggcggcgacttcggcggcggcgacttcggcggtggcggcagcttcggtgggcattgcttggactattgcgaaagccctacggcgcactgcaatgtgctgaactgggagcaagtgcagcggctggacggcatcctgagcgagaccattccgattcacgggcgcggcaacttccccacgctcgagctgcagccgagcctgatcgtgaaggtggtgcggcggcgcctggccgagaagcgcattggcgtccgcgacgtgcgcctcaacggctcggcagccagccatgtcctgcaccaggacagcggcctgggctacaaggacctggacctcatcttctgcgccgacctgcgcggggaaggggagtttcagactgtgaaggacgtcgtgctggactgcctgttggacttcttacccgagggggtgaacaaagagaagatcacaccactcacgctcaaggaagcttatgtgcagaaaatggttaaagtgtgcaatgactctgaccgatggagtcttatatccctgtcaaacaacagtggcaaaaatgtggaactgaaatttgtggattccctccggaggcagtttgaattcagtgtagattcttttcaaatcaaattagactctcttctgctcttttatgaatgttcagagaacccaatgactgagacatttcaccccacaataatcggggagagcgtctatggcgatttccaggaagcctttgatcacctttgtaacaagatcattgccaccaggaacccagaggaaatccgagggggaggcctgcttaagtactgcaacctcttggtgaggggctttaggcccgcctctgatgaaatcaagacccttcaaaggtatatgtgttccaggtttttcatcgacttctcagacattggagagcagcagagaaaactggagtcctatttgcagaaccactttgtgggattggaagaccgcaagtatgagtatctcatgacccttcatggagtggtaaatgagagcacagtgtgcctgatgggacatgaaagaagacagactttaaaccttatcaccatgctggctatccgggtgttagctgaccaaaatgtcattcctaatgtggctaatgtcacttgctattaccagccagccccctatgtagcagatgccaactttagcaattactacattgcacaggttcagccagtattcacgtgccagcaacagacctactccacttggctaccctgcaattaagaatcatttaaaaatgtcctgtggggaagccatttcagacaagacaggagagaaaaaaaaaaaaaagaaaaaaaaaagagtgatccagcccttattagggatgtgttttgtgcaatgatgatatgctcctggttttaagtttggcaaagcttatgtatcttttaatagatgtgggagcatgatctcgaaaggatccttttcccttctcttattctcctacccaattggattctatcctgcaaaaaaagagagacctgtcattagaagcaaccaggttctcctgatacaagagaagaaatgtgtgatgacaatatgggtttgctgtatctgctcccatagctttgccataggaaaaaaaaaagtggaaagtttcttttaagatggaattcataaaagggaaaatacggaggaaaaaaggtctcactccaacttgtgaatcagtttaggagttcagatattaatagtaacaatacaggaaaaaggggaactccaacgttgggattactgtctgaggcttgtagcaagtgctttctgtggaatgatcttgttttgctaacaaacggcttgctccaaatgaacagtagtaggttggtgcagttctcgtaacaatcagcagaacttatgatgacacaatccattaattccagctgcgtgcatagatcacatttttaaaatgtaaaaatgcaagcaaaaacagctgtaacaaagaaagtgtgctcaaggaccaaagatttaacagataaaaatacccaattagaagagatatagtagactatatgaagagagattatatttgttacacaccaatatacatcaaagtgcctgttgccttctgaaaatttgaagtggcaaaattattttatggtttaatgattattttattttatcagggactgcctcaagaagaaaataacataagcttgtgaatggtggagaaaatgccctattttttcttgcaaatacttgtataaagttaacatttgttgatctgatattatcataggtacatgtgtatgtgtgtataaattatatgtgtgtgtgtatatatacattttatatatacattttatatgtatatatacacagtagattgactatgatctagaataatgtctcaaataggaaatgtttaaatactgtgtgtttttatgttttcaacaggataacatgagacgtgggcatattgcaatgatgaattaaatccacatctaaaaaaattaaatgaaggagggaaccaagtaatatatttcataggaagagcagaaattatactgttttagtgggatttttttttctttttttttttttctttggtgagccataaaattccacaaatgggagaatatttgtttggcagagcactcttttttatattgaactgccattttgacagttggaacccatttattaaaaaaaaaattgcattcctctatgatgtttaatctagtggatcatggatcagtaataggctacttaaatccctgactgctaaaaaggatttccggtgatctaaacactacttgctaatgtttaaatgaattttaatgaatgcattctgcatttctggaccactagaatttagtaatgtgaaatgaccctttttacagaatatttgcacaattgcttaaaatttatatatgagatatatattatatataacattttataaatcatgtcaatatgaaacatctttgatctggttgtcacactgcatttaaatatttagtactgtactttaaatcgctttccattaaatcaaatccaactttattttctttcttacaaaaataccagttatacctttgtgaaatgaactggcattactatttcagttcaataacagctaatcctaaaaccaccctttctcctagccagtagttcctctagatactggtctctgaaaatgcatttgttaaaaacaaaacaaaactaacacataagaaccttccctttgtgttgtgaaacaaccacataatctccacaaccttagtggatgactgcttgctatgataattcctcgaagacccaattagaagattttcatcatcagttaaagagagaccacgggagaaaaaaatatcctcctgttggcagtataatttgtttgtttgtttatctagggatcctcagatgcttagtgctaggttaatccaggttaatccgtctggactaccttttgtgcatctttctttgaagccttaatgggaacctgatgggtttgctgtagcagcttccttgtgaattctgtcagagctgcaacagccgctgcactgccactcagttttctaaggaactcctcctactaccatcttggctcagtctccctcacttaagccctgggtttgaaaaattaattgcaacttcccaggaaacattgttcagtttgcagattaagcctggcactcacctatcagaaaccagagctccgcctgcttagttgtttcaaagttttctgaaagaaaactaggggagcacttgtgaacacaggagcagctggtgatctgctttcttaccctaactcttgacaaatgagtcgtctactattttaaagagtctggaggtctctgactctgccataacaataacctgctgttaatttataacacagatttttgtttggaagagccttatttgaaatacactttgatttattttcttaaatatttatattcttttcttgcttacttcagggttggtagcttagttggaagtgccagcacctggcacctattcatatagaacaggctgtactcaagacaacttctagcatttactttaagacttatataatttatttctattttgtgtgtactatagtcttgtgcatatgtagttgaacacacagtgaaatatatgtctctctttgtggatgtgcggcctaaaaatttgaatgtctggtgagagagagccatgtgtataggtcagagaaaagaacagctcccgactccctattagcgcctgtgatttgtttccttttgtgtttatctggcctagtgtgctgtttctttaaaccaggaagaagttttgtcttttggaggctcttctcacctgtccagcctggcatgtcagagaacacatagcctgtgacaatgccgtttttaaaggtttacttaatttgcagtaaatccagctgcctcaagaactcctacaccaagatggacatttcctttccagaaatgggatcaagtatctgctcactttggtattggatggactaataatgtagctccaaaaatgcaaggatggaagaatatgtgtaatccaaaccaaggaaggaaatgaaaagtgaacgtactgtttttaccacccctttctgtttgcttattgttggttgcttcactgtgcataaagttgttttcaatgcaacgcttgttaaataaatattgtgaactattttgtaaatgaaatgtattatgttgaaagctgtcagttcaaaaataagcttttttgttgttgttgaagatgaagtgtgttaggtgaaaccaaaaagccaaaaaaagtaatttcatatatagcatctatttgaatataatctttctttaaaatttcttttagcatagcattttcagtgctaagaaagaatctctatgttatattttgttaaaataatggctttctaacaaagcaaatggtaaagtacaaagttggaagatgtcaagttaacgagacttgctgcaaagccttgcagaacggaggaggctctgcctgctggctgtctctccctccaacctctctacaatcatgcctgctttgaggtgttctgttgcagcaagctgcaccttgggtcactcttttggaatattttgactataggctgcgtcacaggcagaaaaggagttgatggaaaatggactaaaaaactgacatgtttgaatcagtgctagagggaacagattgtgaattttgtttacagcatccaatatttggatttttttgtaaataaaaaagttatttttttctattga

SEQ ID NO: 7127 - DNA, 356 bp, Homo sapiens
  source 1..356: mol_type = unassigned DNA; mol_type = unassigned DNA
accaggacagcggcctgggctacaaggacctggacctcatcttctgcgccgacctgcgcggggaaggggagtttcagactgtgaaggacgtcgtgctggactgcctgttggacttcttacccgagggggtgaacaaagagaagatcacaccactcacgctcaaggtttttcatcgacttctcagacattggagagcagcagagaaaactggagtcctatttgcagaaccactttgtgggattggaagaccgcaagtatgagtatctcatgacccttcatggagtggtaaatgagagcacagtgtgcctgatgggacatgaaagaagacagactttaaaccttatcaccatgctggc

SEQ ID NO: 7128 - DNA, 5751 bp, Homo sapiens
  source 1..5751: mol_type = unassigned DNA; mol_type = unassigned DNA
ccgaggggactggctccgccacgccccgcccctggctcccccgggagggcggctcaggggcggggacgggggcgtggtcccgccgtataagaacggagggggcggcggcgggacggctcactcggtgccgctgcctaggggctgtagaggtcgcgccgctcctgctggggcctgcccacgccaaggacctgcctctgtcgcctcctcttctattgcccagtttccccagccagaacatcccctgaagatggcagaggagagcagctgtaccagggattgcatgtccttcagcgtgctcaactgggatcaggttagccggctgcatgaggtcctcactgaagttgtacctatccacggacgaggcaactttccaaccttggagataactctgaaggacatcgtccagaccgtccgcagtcggctggaggaggcaggcatcaaagtgcacgacgtccggctgaatggctccgcagctggccacgttttggtcaaagacaatggcttgggctgcaaagacctggacctaatcttccatgtggctcttccaacagaggcagaatttcagctggttagagatgtggttctgtgttcccttctgaacttcctgccagagggtgtgaacaagctcaaaatcagtccagtcactctgaaggaggcatatgtgcagaagctagtgaaggtttgcacggacactgaccgctggagcctgatctccctctccaacaagaacgggaagaacgtggagctgaagtttgtcgactccattcggcgtcagtttgagttcagtgtggactctttccaaatcatcctggattctttgcttttcttctatgactgttccaataatcccatctctgagcacttccaccccaccgtgattggggagagcatgtacggggactttgaggaagcttttgaccatctgcagaacagactgatcgccaccaagaacccagaagaaatcagaggcgggggacttctcaagtacagcaaccttcttgtgcgggacttcaggcccacagaccaggaagaaatcaaaactctagagcgctacatgtgctccaggttcttcatcgacttcccggacatccttgaacagcagaggaagttggagacttaccttcaaaaccacttcgctgaagaagagagaagcaagtacgactacctcatgatccttcgcagggtggtgaacgagagcaccgtgtgtctcatggggcatgaacgcaggcagactctgaacctcatctccctcctggccttgcgtgtgctggcggaacaaaacatcatccccagtgccaccaacgtcacctgttactaccagccggccccttacgtcagtgatggcaacttcagcaactactacgttgcccatcctccagtcacctacagccagccttaccctacctggctgccctgtaactaaccttgagacctgagggtttccacagtgggaaccccaatagggctagggctctcaggtaggggagcctccttctagatgtaggcatttggcttttaaaggggaactcagctctgattctgcttttttttttttttttcctttgtgtacccattggaatgggtctacagtgtatcatgagccaaccctcaaaggacccgtattacagtgccacgttggaaaacgctacaggaagcatgacctatccacatctttccaagatagacactaacatgtcatgtcccaaacattagcacgtgggggttgagctctgtgcagtaatcgagattgggagaatttgggcagcgcgtgagaagtgctaagctacttgttttctcacttgagcccgggtaggctgtgttggccctcacttgggattctcagcagttacatgaaagttgtgctgataatctcttctcttgtaccaattttagtcaggcagaaaatggtaaacatgagggtgctcttgtgacttaatttttgttcaagggactaaattgcttatgtttattccctgtcagcggagtggagaatgtcattcatcaataaaccaaagccaatagctggagaattgagatctggttgaaagtggtttatggtttacatgctgtactatcctgaggaattgcgagatattgctgaggggaaaaaaaaatgaccttttcttgaaatgtaacttgaaaacaaaataaaatgtggaacataatgtttaattagaattgtggtggtggtagtggaaggggataattgtaaataggaaacatgaatgttcatttttttctttaaagaattcttattaaatggctccctgccttttttttcttttttcctcatcagctctttcatggctgaattttgttttattcttcctaagactgaggattgtgctgagtccagagtcattgtggtaactgacatgagggtcttcccatgttttaactggaaacccactttggtcacattccaagtatgacacagctgttcttctggagtactttagctattttttgtttttgttcttttcgttttttttttttccaaaaatagtgacttccttctccaggtgtgtttgacagcaactcaattcaggaatttcggtagaactgagtgacctgtggaactgctttagaatctaacctgctgtcttcgtgctctgtgtgaaggggaagctggggggttagcatgaagtctggccttgtgtgcattggagcttccaaggcactttgaaatcattccagtatatttgggaagaattgagtgaatgagaatgctcttccttattctggtagatttgacttgtttataattctgcactttagaagaaaaacagtgttaatctgtagttgaaagaaagcttagtagatgagagagttctaggctactgtggctttttccagtagatttagatgagattatgtgttttgaaatgttttgtgggatcccttagaaagcatcacttcagggcagagacactcaatattgccagccagcttgggttctaaagtgatttaatcaaattcatgctcctgatcttttttttcccccttcctttggctatgaaaacccaaagcccggagtgattgttttctccttgctttaagcagtgaagttatcctaatgcaaaagagcttagtagaaaatgagtggtttacctttttttctaaaagtatattttcaagtttattctggaatgtgatgtcttggtcctcttaaaagcagatcagccatgactgaaactcaaggcttagctggtatctatgttgtgctacattaggtgactagaagccacttcttagtgtaatcagctcctgtttccctgtgagccttagttatattttaattcagtggctttgagtcaaggccggttctaattgaggggacccagtgtgcttcagtgttaagagtggggcaatgaagagtgaaccccaatgaagagtgatcccaactttggaaactatctggtcattcatgaccttaaaaagctgccatggtggtcaaatggcatgtgtttgcacaaaaatgaccgatgtgtttaaccaaagctttgaaatgtgatgaagccaccaacataagcacttgcctaacagaaatcagtatttcttctacttagaaggcttggggcccagggtaatgaggcaccagatgaagataagatctgcatcaaggaattaaatttccagtttgtccttggggttctttctgcttatgttttttcccccccatctggtaatagtcctcttctgagaatgaaaggaggcacagaagttgcgagaaagacccagtccccagtctttgccaccattgcaccatggttgtctcggagtcccttcacctgacctttttagtcagctcagatctttttgtagtttgagaatagacctattcaagagctatcagggttaaaagctgcactgaccaaagctgtacttttaaaacacaacccctgggctagtgatgtctctacttgctctatgagccttttgccagcctcagaataggcgaggtaaccttgaatttcagggccctggaaactctagctgaaacctgcctttcctaatgctcacacaagcaccaggtaccctgagcttatactgagtccagtggttcctattttatgtgtgtgtgtatgtgtgtgtgttgagtaacatgaaacttggcagtagcagagagcactgaagttcacatgcaagttctaatctaaagttaagcagtctcttatttgtttcgggactctgatttgactctttttctgatgctttcggcatgtctgcagcctgttctcctagcctgctgcttggagtcaggttgagcatcagtgagatgaagacagtaccttttcctctcacattggcagaatagcacgcactagatgcctgaccttgagctctagtctcccctttaaatcttaccttggcagtaacacattattcctcattcaataatttcaatgctgaaactgaactctattactaatgccttccaatcagagttcctgatggggatgcctgtgggatggcccacacctgggggacctggcagatggggtgagttgggtaaggaagatgatgcttagttcctgatagatgctacagatgtagtttggcatttcagtttttgtccagtttgattttcactggggtttgagtcacagcaagctgtgtatgaacttgtgttttgtggtgacacattaataatcaaattgctaaaaccctgaatctgcttattcttcagcttcacctctgcactaaccccttacccttatggtacgtcaggattttaactagtactgctttgttgactttgggaaatggtgccactcaaaagcaacttcctaacttgaggaataactcctttgtagtttactttctggtactggttggtgccttgtattgggatacagctatattcttagctcaaatgtcctctttttgagagcaaagtagttatccaatggtgagacgagaccctgacgctcatagaggccattccttcctgggtgtcggaccagggctctgtgtcagggaaaaccttctgggtggactttgtaagaatccagtttccaaggttagattcacatccttaatcttgcagagactagaatttcacagctcgctttggaacatattccaattcaaccagttaaaatcagaggaccaagtcgtgggggaggggggcggtgttgaggagaggtatttttaaagatctggcaacttttcaggattatttgtggagaactctaaggttaagatcaggaaataaaagactgtgtgtgtgtgtgtgtgtgcgtgtgtgtgttcaagtgcctaaatcttgtttacctatcactttaaaaaaataattgaagtgtaagctaaataaaatgcttggagttttgcctgggctagtgagagttggtgcaaattcttgtgtgtgtttgcataggaaggtgagatgaccatctactaaagaggaagtagctaaatacagatctgtgggtgtttttaaaaaaactcaacctatctggtgttttattttaatggataaaaatgtaatttttctaaggtagcaacttatttccaaattaatatagatgaaaaatagataccaattagactaaattgaaagctttttgttctatatttgcatagcctttgaaatatttcttagtgcctaggaggtctggggattcctctttcgtggtggtcactaaccttacttgatgcagataaaatcacttgtcaatgcaaaatgtgttagaacttgataaagctttgagtttgagaaataaaggtatatttaaaatttaaataaaa

SEQ ID NO: 7129 - DNA, 3798 bp, Homo sapiens
  source 1..3798: mol_type = unassigned DNA; mol_type = unassigned DNA
gtcgttaccctgtacatccgggtcacttgccctccccgctcggagctgccgcctggcttgtcgcggctctgccacaggggcaggtgttgaggggctcccggtccggctgccgccgctcccccgctccggacccggggctccccctagcgccgctgaggagccgcctctgcggctccaggagggcgcaggagcgggactgagagcgcctggaggctcgagcggaggatagaaggacaaggacagaatcaccagcactggctgaaggtaccttaacatggggaatcttcttaaagttttgacatgcacagaccttgagcaggggccaaattttttccttgattttgaaaatgcccagcctacagagtctgagaaggaaatttataatcaggtgaatgtagtattaaaagatgcagaaggcatcttggaggacttgcagtcatacagaggagctggccacgaaatacgagaggcaatccagcatccagcagatgagaagttgcaagagaaggcatggggtgcagttgttccactagtaggcaaattaaagaaattttacgaattttctcagaggttagaagcagcattaagaggtcttctgggagccttaacaagtaccccatattctcccacccagcatctagagcgagagcaggctcttgctaaacagtttgcagaaattcttcatttcacactccggtttgatgaactcaagatgacaaatcctgccatacagaatgatttcagctattatagaagaacattgagtcgtatgaggattaacaatgtaccggcagaaggagaaaatgaagtaaataatgaattggcaaatcgaatgtctttgttttatgctgaggcaactccaatgctgaaaaccttgagtgatgccacaacaaaatttgtatcagagaataaaaatttaccaatagaaaataccacagattgtttaagcacaatggctagtgtatgcagagtcatgctggaaacaccggaatacagaagcagatttacaaatgaagagacagtgtcattctgcttgagggtaatggtgggtgtcataatactctatgaccacgtacatccagtgggagcatttgctaaaacttccaaaattgatatgaaaggttgtatcaaagttcttaaggaccaacctcctaatagtgtggaaggtcttctaaatgctctcaggtacacaacaaaacatttgaatgatgagactacctccaagcaaattaaatccatgctgcaataacaattctggaataagcacctgctgtagacagaagacagtattctgcaatgactgagaatgcagttttttagtgattgcaattactatctcatttattcttgcttttatttctttcctctgttcctcttccctcttttttaatcatgttcttaagacttcttttctgtgccaaaatcagtaaagttacactctgaagggatatcatcctttcaaacgggccatctaaggcagctaattatgcattgcattggggtctctactgagaaaaattctgtgacttgaactaaatatttttaaatgtggattttttttgaaactaatatttaatattgcttctcctgcatggcaaaactgcctattctgctatttaaaaaccctcaatgactttattttctactgccgcctttttcatgtgcaaccaaaatgaaaatgtttaaattaactgtgttgtacaaatggtacccaacacaaactttttttaaattagtaatacttttgtttaaagttttaagtttgcattttgactttttttgtaaggatgtatgttgtgtgtttaacctttattaactaacgttaaaagctgtgatgtgtgcgtagaatattacgtatgcatgttcatgtctaaagaatggctgttgatgataaaataaaaatcagctttcatttttctaagtgtggcttggtttactgatgttttgtttttaggcttctgaagttttccccatgtatgtttttatggaatgcatatatacattacatgattttttcttcttttaggggagagccgggtcttttcattagaattttgatcattgtctatgtatatacttttaattgcctttaaaattttgctaagtatattaagaccagtgatcttttcattaactggacttttattcttgatttactcttgtatggatgtagtaatggaaggaaaaccgcatccttgcttgattctccatttccaggggagcgggtagcaacatgaaggcagagtagccctttaatcatgggaagagagtgattataagagggacttcccaggagaaaagcagaggccatgatctcactagtggtagaaaactaacaggtttcagtttaagatcataaaacctaaatcatgaaatctaaatctcatggttggaacaaactacttaaaggttgtctagttcaaccatgccagtgttttaaatatttaggaatatccgaggtataatacaattaaaatgtttaaccatggaagagaatcacagaggcttccatcagacccttctggattaatagggccagatcatggcacacacagcttctcaagatcacatccctgctgatctctctggccctcctgatcactgctcccccacttcacaccctgtcctgcagccaggccctactgcttgctgttcacaaattgttccatgtgatgtcacttccttagctctggtctggctggtccctgaacctgacattcccttcctccccttgtgaccctctaatgaacgccaactttcatctttgaagggttagcttctattacctccttcatgaagccttctggataacattggccatatccttctaggcatcttctaagaatagtgtaataggctgaatagtggcccccaggagatacattcactgggaatctccacgtgtgacattatttggaaaaagtttttgcagatgaaatcaaggacctggaaatgagatcaacctgtagtagggtgggccctaaattcaatgactagctcttagaaaagaaggggaaatagacacacagagctgaaggccatgggaagatggaggcagagattagagcaatgcatctatgagccaaagaaccctaagaattggaggaagtcactagaagctaggaaaacaggcatgtcacagattctccctcagagtctcgagaaggaaccaaccctaccaatatcttgatttcagacatctggcctccaggattgtgagggaataaatttctgttgttttaagccatgcagtttgtggtattttggtacagcagccttaagaatctgatacatgtatctcgtaaaacacctctgatacttacctgcgcttgtggctgtgttttctgatactatgagagccgtagtatctggataccggagagtctgcgaacttgagagaagggccgtgtctgattttccttcagtgtcccaaggaaggatcttgcacagtacccagatttggagaggtgccaagtgaatgcttcggtggactgaatgaatacaaatcaaaaataatgatgcagcgggaatggatgcagtaagattgctgtggcctatgcagttcacacagttcacactctgcatgttgaggagtaagtggacagatctcttaagcccaggggctagcaaaccggtctgtgggccaatttactcaccgtctgtttttgtacagcttgtgagctaaaaatggtttttaaaaaggttgaatacaatcaaaagaataatattttgtggcatgagaaaagcatatgaaattcaaattttagtgttcataaataaaattttattggaacctaa

SEQ ID NO: 7130 - DNA, 2196 bp, Homo sapiens
  source 1..2196: mol_type = unassigned DNA; mol_type = unassigned DNA
ggcaggtgttgaggggctcccggtccggctgccgccgctcccccgctccggacccggggctccccctagcgccgctgaggagccgcctctgcggctccaggagggcgcaggagcgggactgagagcgcctggaggctcgagcggagggtaattcatttgcacacctgttagcaagaaacagaagttgaaggactggaacaagtgaactaggaaagagggaacgccaatccaaggatagaaggacaaggacagaatcaccagcactggctgaaggcctcctgtttcctgcgctttctccttttcctgtgaaatctccgaggagaagaaagaatgatggacagtttatcctttcactgccacaaggcctgtttacttggcagtaggtccttaagttccttgcttttttgctgctgtttggtgactggaagaggcaccagagactctcactctggggaggtttgctggcatgggtaatctcattaaggtgctaaccagggacatagaccacaatgcagcacattttttcttggactttgaaagtaccttaacatggggaatcttcttaaagttttgacatgcacagaccttgagcaggggccaaattttttccttgattttgaaaatgcccagcctacagagtctgagaaggaaatttataatcaggtgaatgtagtattaaaagatgcagaaggcatcttggaggacttgcagtcatacagaggagctggccacgaaatacgagaggcaatccagcatccagcagatgagaagttgcaagagaaggcatggggtgcagttgttccactagtaggcaaattaaagaaattttacgaattttctcagaggttagaagcagcattaagaggtcttctgggagccttaacaagtaccccatattctcccacccagcatctagagcgagagcaggctcttgctaaacagtttgcagaaattcttcatttcacactccggtttgatgaactcaagatgacaaatcctgccatacagaatgatttcagctattatagaagaacattgagtcgtatgaggattaacaatgtaccggcagaaggagaaaatgaagtaaataatgaattggcaaatcgaatgtctttgttttatgctgaggcaactccaatgctgaaaaccttgagtgatgccacaacaaaatttgtatcagagaataaaaatttaccaatagaaaataccacagattgtttaagcacaatggctagtgtatgcagagtcatgctggaaacaccggaatacagaagcagatttacaaatgaagagacagtgtcattctgcttgagggtaatggtgggtgtcataatactctatgaccacgtacatccagtgggagcatttgctaaaacttccaaaattgatatgaaaggttgtatcaaagttcttaaggaccaacctcctaatagtgtggaaggtcttctaaatgctctcaggtacacaacaaaacatttgaatgatgagactacctccaagcaaattaaatccatgctgcaataacaattctggaataagcacctgctgtagacagaagacagtattctgcaatgactgagaatgcagttttttagtgattgcaattactatctcatttattcttgcttttatttctttcctctgttcctcttccctcttttttaatcatgttcttaagacttcttttctgtgccaaaatcagtaaagttacactctgaagggatatcatcctttcaaacgggccatctaaggcagctaattatgcattgcattggggtctctactgagaaaaattctgtgacttgaactaaatatttttaaatgtggattttttttgaaactaatatttaatattgcttctcctgcatggcaaaactgcctattctgctatttaaaaaccctcaatgactttattttctactgccgcctttttcatgtgcaaccaaaatgaaaatgtttaaattaactgtgttgtacaaatggtacccaacacaaactttttttaaattagtaatacttttgtttaaagttttaagtttgcattttgactttttttgtaaggatgtatgttgtgtgtttaacctttattaactaacgttaaaagctgtgatgtgtgcgtagaatattacgtatgcatgttcatgtctaaagaatggctgttgatgataaaataaaaatcagctttcatttttctaa

SEQ ID NO: 7131 - DNA, 1968 bp, Homo sapiens
  source 1..1968: mol_type = unassigned DNA; mol_type = unassigned DNA
ccgcgccgcgctcccctcgcccgcccgggccgccaggagaagaaactgaggcctggaatttgattaactcattcaaggttacccagttgatagaaggacaaggacagaatcaccagcactggctgaaggcctcctgtttcctgcgctttctccttttcctgtgaaatctccgaggagaagaaagaatgatggacagtttatcctttcactgccacaaggcctgtttacttggcagtaggtccttaagttccttgcttttttgctgctgtttggtgactggaagaggcaccagagactctcactctggggaggtaccttaacatggggaatcttcttaaagttttgacatgcacagaccttgagcaggggccaaattttttccttgattttgaaaatgcccagcctacagagtctgagaaggaaatttataatcaggtgaatgtagtattaaaagatgcagaaggcatcttggaggacttgcagtcatacagaggagctggccacgaaatacgagaggcaatccagcatccagcagatgagaagttgcaagagaaggcatggggtgcagttgttccactagtaggcaaattaaagaaattttacgaattttctcagaggttagaagcagcattaagaggtcttctgggagccttaacaagtaccccatattctcccacccagcatctagagcgagagcaggctcttgctaaacagtttgcagaaattcttcatttcacactccggtttgatgaactcaagatgacaaatcctgccatacagaatgatttcagctattatagaagaacattgagtcgtatgaggattaacaatgtaccggcagaaggagaaaatgaagtaaataatgaattggcaaatcgaatgtctttgttttatgctgaggcaactccaatgctgaaaaccttgagtgatgccacaacaaaatttgtatcagagaataaaaatttaccaatagaaaataccacagattgtttaagcacaatggctagtgtatgcagagtcatgctggaaacaccggaatacagaagcagatttacaaatgaagagacagtgtcattctgcttgagggtaatggtgggtgtcataatactctatgaccacgtacatccagtgggagcatttgctaaaacttccaaaattgatatgaaaggttgtatcaaagttcttaaggaccaacctcctaatagtgtggaaggtcttctaaatgctctcaggtacacaacaaaacatttgaatgatgagactacctccaagcaaattaaatccatgctgcaataacaattctggaataagcacctgctgtagacagaagacagtattctgcaatgactgagaatgcagttttttagtgattgcaattactatctcatttattcttgcttttatttctttcctctgttcctcttccctcttttttaatcatgttcttaagacttcttttctgtgccaaaatcagtaaagttacactctgaagggatatcatcctttcaaacgggccatctaaggcagctaattatgcattgcattggggtctctactgagaaaaattctgtgacttgaactaaatatttttaaatgtggattttttttgaaactaatatttaatattgcttctcctgcatggcaaaactgcctattctgctatttaaaaaccctcaatgactttattttctactgccgcctttttcatgtgcaaccaaaatgaaaatgtttaaattaactgtgttgtacaaatggtacccaacacaaactttttttaaattagtaatacttttgtttaaagttttaagtttgcattttgactttttttgtaaggatgtatgttgtgtgtttaacctttattaactaacgttaaaagctgtgatgtgtgcgtagaatattacgtatgcatgttcatgtctaaagaatggctgttgatgataaaataaaaatcagctttcatttttctaa

SEQ ID NO: 7132 - DNA, 2024 bp, Homo sapiens
  source 1..2024: mol_type = unassigned DNA; mol_type = unassigned DNA
aaacggcggcggcggcggcaccggaggctccgaggctcctgcgctcccgcgccgcgctcccctcgcccgcccgggccgccaggagaagaaactgaggcctggaatttgattaactcattcaaggttacccagttggtaattcatttgcacacctgttagcaagaaacagaagttgaaggactggaacaagtgaactaggaaagagggaacgccaatccaaggatagaaggacaaggacagaatcaccagcactggctgaaggcctcctgtttcctgcgctttctccttttcctgtgaaatctccgaggagaagaaagaatgatggacagtttatcctttcactgccacaaggcctgtttacttggcagtaccttaacatggggaatcttcttaaagttttgacatgcacagaccttgagcaggggccaaattttttccttgattttgaaaatgcccagcctacagagtctgagaaggaaatttataatcaggtgaatgtagtattaaaagatgcagaaggcatcttggaggacttgcagtcatacagaggagctggccacgaaatacgagaggcaatccagcatccagcagatgagaagttgcaagagaaggcatggggtgcagttgttccactagtaggcaaattaaagaaattttacgaattttctcagaggttagaagcagcattaagaggtcttctgggagccttaacaagtaccccatattctcccacccagcatctagagcgagagcaggctcttgctaaacagtttgcagaaattcttcatttcacactccggtttgatgaactcaagatgacaaatcctgccatacagaatgatttcagctattatagaagaacattgagtcgtatgaggattaacaatgtaccggcagaaggagaaaatgaagtaaataatgaattggcaaatcgaatgtctttgttttatgctgaggcaactccaatgctgaaaaccttgagtgatgccacaacaaaatttgtatcagagaataaaaatttaccaatagaaaataccacagattgtttaagcacaatggctagtgtatgcagagtcatgctggaaacaccggaatacagaagcagatttacaaatgaagagacagtgtcattctgcttgagggtaatggtgggtgtcataatactctatgaccacgtacatccagtgggagcatttgctaaaacttccaaaattgatatgaaaggttgtatcaaagttcttaaggaccaacctcctaatagtgtggaaggtcttctaaatgctctcaggtacacaacaaaacatttgaatgatgagactacctccaagcaaattaaatccatgctgcaataacaattctggaataagcacctgctgtagacagaagacagtattctgcaatgactgagaatgcagttttttagtgattgcaattactatctcatttattcttgcttttatttctttcctctgttcctcttccctcttttttaatcatgttcttaagacttcttttctgtgccaaaatcagtaaagttacactctgaagggatatcatcctttcaaacgggccatctaaggcagctaattatgcattgcattggggtctctactgagaaaaattctgtgacttgaactaaatatttttaaatgtggattttttttgaaactaatatttaatattgcttctcctgcatggcaaaactgcctattctgctatttaaaaaccctcaatgactttattttctactgccgcctttttcatgtgcaaccaaaatgaaaatgtttaaattaactgtgttgtacaaatggtacccaacacaaactttttttaaattagtaatacttttgtttaaagttttaagtttgcattttgactttttttgtaaggatgtatgttgtgtgtttaacctttattaactaacgttaaaagctgtgatgtgtgcgtagaatattacgtatgcatgttcatgtctaaagaatggctgttgatgataaaataaaaatcagctttcatttttctaa

SEQ ID NO: 7133 - DNA, 1902 bp, Homo sapiens
  source 1..1902: mol_type = unassigned DNA; mol_type = unassigned DNA
ggggaggcgcgtcgcgaggcgagcgtcctccttttgtgcgagcgccggcggctcggcttctcgaaggagaagaaactgaggcctggaatttgattaactcattcaaggttacccagttggtaattcatttgcacacctgttagcaagaaacagaagttgaaggactggaacaagtgaactaggaaagagggaacgccaatccaaggatagaaggacaaggacagaatcaccagcactggctgaaggtaccttaacatggggaatcttcttaaagttttgacatgcacagaccttgagcaggggccaaattttttccttgattttgaaaatgcccagcctacagagtctgagaaggaaatttataatcaggtgaatgtagtattaaaagatgcagaaggcatcttggaggacttgcagtcatacagaggagctggccacgaaatacgagaggcaatccagcatccagcagatgagaagttgcaagagaaggcatggggtgcagttgttccactagtaggcaaattaaagaaattttacgaattttctcagaggttagaagcagcattaagaggtcttctgggagccttaacaagtaccccatattctcccacccagcatctagagcgagagcaggctcttgctaaacagtttgcagaaattcttcatttcacactccggtttgatgaactcaagatgacaaatcctgccatacagaatgatttcagctattatagaagaacattgagtcgtatgaggattaacaatgtaccggcagaaggagaaaatgaagtaaataatgaattggcaaatcgaatgtctttgttttatgctgaggcaactccaatgctgaaaaccttgagtgatgccacaacaaaatttgtatcagagaataaaaatttaccaatagaaaataccacagattgtttaagcacaatggctagtgtatgcagagtcatgctggaaacaccggaatacagaagcagatttacaaatgaagagacagtgtcattctgcttgagggtaatggtgggtgtcataatactctatgaccacgtacatccagtgggagcatttgctaaaacttccaaaattgatatgaaaggttgtatcaaagttcttaaggaccaacctcctaatagtgtggaaggtcttctaaatgctctcaggtacacaacaaaacatttgaatgatgagactacctccaagcaaattaaatccatgctgcaataacaattctggaataagcacctgctgtagacagaagacagtattctgcaatgactgagaatgcagttttttagtgattgcaattactatctcatttattcttgcttttatttctttcctctgttcctcttccctcttttttaatcatgttcttaagacttcttttctgtgccaaaatcagtaaagttacactctgaagggatatcatcctttcaaacgggccatctaaggcagctaattatgcattgcattggggtctctactgagaaaaattctgtgacttgaactaaatatttttaaatgtggattttttttgaaactaatatttaatattgcttctcctgcatggcaaaactgcctattctgctatttaaaaaccctcaatgactttattttctactgccgcctttttcatgtgcaaccaaaatgaaaatgtttaaattaactgtgttgtacaaatggtacccaacacaaactttttttaaattagtaatacttttgtttaaagttttaagtttgcattttgactttttttgtaaggatgtatgttgtgtgtttaacctttattaactaacgttaaaagctgtgatgtgtgcgtagaatattacgtatgcatgttcatgtctaaagaatggctgttgatgataaaataaaaatcagctttcatttttctaa

SEQ ID NO: 7134 - DNA, 4552 bp, Homo sapiens
  source 1..4552: mol_type = unassigned DNA; mol_type = unassigned DNA
gcgatgcggcggggactgggcgcggggggaggcgcgtcgcgaggcgagcgtcctccttttgtgcgagcgccggcggctcggcttctcgaaggagaagaaactgaggcctggaatttgattaactcattcaaggttacccagttgatagaaggacaaggacagaatcaccagcactggctgaaggtaccttaacatggggaatcttcttaaagttttgacatgcacagaccttgagcaggggccaaattttttccttgattttgaaaatgcccagcctacagagtctgagaaggaaatttataatcaggtgaatgtagtattaaaagatgcagaaggcatcttggaggacttgcagtcatacagaggagctggccacgaaatacgagaggcaatccagcatccagcagatgagaagttgcaagagaaggcatggggtgcagttgttccactagtaggcaaattaaagaaattttacgaattttctcagaggttagaagcagcattaagaggtcttctgggagccttaacaagtaccccatattctcccacccagcatctagagcgagagcaggctcttgctaaacagtttgcagaaattcttcatttcacactccggtttgatgaactcaagatgacaaatcctgccatacagaatgatttcagctattatagaagaacattgagtcgtatgaggattaacaatgtaccggcagaaggagaaaatgaagtaaataatgaattggcaaatcgaatgtctttgttttatgctgaggcaactccaatgctgaaaaccttgagtgatgccacaacaaaatttgtatcagaggtaagcattgcctaggcaggtactctgtgttgttatttatgcccctgttggcagacgtgatgtcagcaagcccaagacattaaataccatcttgaaaccaacagactcccagatgtatgtgttgagtcctgacttttttctgaggcccacatgtgcacacctgtccacgtatttgcagtttctctggagggatggtggaaacctcagtgatagctgatggcatggccaaaccaaactctgggttgcgttttctaaccctgccctttctttagtttttgctttctcaattaacagtaccagtgcaggcaaaaacttacaacttatgtcatcctaaattcctttcttttttttttgagacagagtttcactcttgttgcccaggctggagtgcaatggcgtgatctcagctcaccacaaactccgcctcccgggttcaagcgattctcctgcctcagcctccctagtagctggggttacaggcatgtgccaccacgcccggctaattttgtatttttagtagagatggggtttctgcatgttggtcaggctggtctcgaactcccgacctcaggtgatccgcctgcctccgcctcccaaagtgctggaattataggcatgagccaccgcgcctggccatcatcctaaattcctttctatacctcactccctacatgtattccatcaaacagtctcattggctttccctccaaaatactaatatatcatgattctgaaaacttaagttgctttcttgccaccagccacatcagacttctcatctggattactgcattcgtgtcctgaccattcttacttcctccactcttgccccaatatagtcctttctccatagagcaaccaagtaatcttaaaacataaaccatgttccctccctcctccatgtaaaatgttcccagtgacttcctagtacccttaggataaaatccaactatttcatagcctataaaactctacacctttgaccccctgtctgcattgttgcagttgttcttacattgctggaatgcaggtgcctttcagaagagtcctgccttcgctgtcttgctcatagctgtatccccagtgcttggaacagttgcttagagtctagtgcattatttagaaaattaggagtaggaaccaggttttaaagttgctaatttttcatattacgctaaattttaaattgtgcttaagtaataacgtttgttacttttactttttttgttcttcatatacttctacagaataaaaatttaccaatagaaaataccacagattgtttaagcacaatggctagtgtatgcagagtcatgctggaaacaccgtgagtatcagctgatctttttcactttaacagtgctgttgagatgactgatatttcaaaacatgttcatatatgaacatgttaacatgttttatctggaaggtggaaagtaagtatattccaaatattgaatgttaatatatgaacaaacttaaaataatttggctatttaacgtaacttctggttaagtataaaatagagttagttggtcttcaggtacctcagaccactcagactgactcagactcttagttctcttctcagaacagaagtggtggtggtgttttggtggctgggatgtaggagaagaactttaaagttccttggttatacttaccataaatgttctttttccatatttagtaaagaatcttacccttttgccaaagggctggaattattcttctgtttatccctttttctctcaataattaattgtcactcttttcttttttttttccaacacgaacctgaattctgtttttttttctctcctctctaaacatttatgatgtatgatacagtgtgtcctggctggatttttcctgttagcaggcagaaagaatccctcctggattccagaataataaatacagtcatgtgctgcttaatgacgttttggtcaacaatgggccacatatatgatggtccaaagcactatactgtacatcatctcattggaaaaccttatgaaataggagggcaactatcatcataatcatcttccttccccccaccaccaacttcagggagtgaggtcctgggaaatgaagggacactatccatgtgcttggatgtctctatcctggttccgtactctttccgctatgatatactgccttctatatatagataaaagttcaattttctttttcacaaatgagaggagaatatgattgagttttagtaaaattgatatccagtaatactataatgtatttagatcaagttagcacctaaatagcaaacctgcttgctctattaagctagtgatttttcactataggtgctaacaaccattacgtagcatctattctctaaaattgttgctatcggtctagcagaggagcagtgcactaatgtgggtgcagatattatagaaaccagaatacatgggtgatgactgttccactcaccatcttctcatatctctggggatctcattgtggagtaaggggcataatgttagtataccttttagagatcaaaggggcaagtcagcatcagctgaaagttgaatcacctcattaaagaattttatatccctttcagggggttgatttggaaaggaaaacagacataagatttgaatgtatcagtgtggctacttgtgaacatactgcattcaactaatggatagaaatttgaataaaatatttcagaagaggtttttcttgtgtgtgtgtgtttttaaaaagaattttgtaatgcacttcttccatgcatatcttatctactcttcagggaatacagaagcagatttacaaatgaagagacagtgtcattctgcttgagggtaatggtgggtgtcataatactctatgaccacgtacatccagtgggagcatttgctaaaacttccaaaattgatatgaaaggttgtatcaaagttcttaaggaccaacctcctaatagtgtggaaggtcttctaaatgctctcaggtacacaacaaaacatttgaatgatgagactacctccaagcaaattaaatccatgctgcaataacaattctggaataagcacctgctgtagacagaagacagtattctgcaatgactgagaatgcagttttttagtgattgcaattactatctcatttattcttgcttttatttctttcctctgttcctcttccctcttttttaatcatgttcttaagacttcttttctgtgccaaaatcagtaaagttacactctgaagggatatcatcctttcaaacgggccatctaaggcagctaattatgcattgcattggggtctctactgagaaaaattctgtgacttgaactaaatatttttaaatgtggattttttttgaaactaatatttaatattgcttctcctgcatggcaaaactgcctattctgctatttaaaaaccctcaatgactttattttctactgccgcctttttcatgtgcaaccaaaatgaaaatgtttaaattaactgtgttgtacaaatggtacccaacacaaactttttttaaattagtaatacttttgtttaaagttttaagtttgcattttgactttttttgtaaggatgtatgttgtgtgtttaacctttattaactaacgttaaaagctgtgatgtgtgcgtagaatattacgtatgcatgttcatgtctaaagaatggctgttgatgataaaataaaaatcagctttcatttttctaa

SEQ ID NO: 7135 - DNA, 1647 bp, Homo sapiens
  source 1..1647: mol_type = unassigned DNA; mol_type = unassigned DNA
tccccctagcgccgctgaggagccgcctctgcggctccaggagggcgcaggagcgggactgagagcgcctggaggctcgagcggaggatgcccagcctacagagtctgagaaggaaatttataatcaggtgaatgtagtattaaaagatgcagaaggcatcttggaggacttgcagtcatacagaggagctggccacgaaatacgagaggcaatccagcatccagcagatgagaagttgcaagagaaggcatggggtgcagttgttccactagtaggcaaattaaagaaattttacgaattttctcagaggttagaagcagcattaagaggtcttctgggagccttaacaagtaccccatattctcccacccagcatctagagcgagagcaggctcttgctaaacagtttgcagaaattcttcatttcacactccggtttgatgaactcaagatgacaaatcctgccatacagaatgatttcagctattatagaagaacattgagtcgtatgaggattaacaatgtaccggcagaaggagaaaatgaagtaaataatgaattggcaaatcgaatgtctttgttttatgctgaggcaactccaatgctgaaaaccttgagtgatgccacaacaaaatttgtatcagagaataaaaatttaccaatagaaaataccacagattgtttaagcacaatggctagtgtatgcagagtcatgctggaaacaccggaatacagaagcagatttacaaatgaagagacagtgtcattctgcttgagggtaatggtgggtgtcataatactctatgaccacgtacatccagtgggagcatttgctaaaacttccaaaattgatatgaaaggttgtatcaaagttcttaaggaccaacctcctaatagtgtggaaggtcttctaaatgctctcaggtacacaacaaaacatttgaatgatgagactacctccaagcaaattaaatccatgctgcaataacaattctggaataagcacctgctgtagacagaagacagtattctgcaatgactgagaatgcagttttttagtgattgcaattactatctcatttattcttgcttttatttctttcctctgttcctcttccctcttttttaatcatgttcttaagacttcttttctgtgccaaaatcagtaaagttacactctgaagggatatcatcctttcaaacgggccatctaaggcagctaattatgcattgcattggggtctctactgagaaaaattctgtgacttgaactaaatatttttaaatgtggattttttttgaaactaatatttaatattgcttctcctgcatggcaaaactgcctattctgctatttaaaaaccctcaatgactttattttctactgccgcctttttcatgtgcaaccaaaatgaaaatgtttaaattaactgtgttgtacaaatggtacccaacacaaactttttttaaattagtaatacttttgtttaaagttttaagtttgcattttgactttttttgtaaggatgtatgttgtgtgtttaacctttattaactaacgttaaaagctgtgatgtgtgcgtagaatattacgtatgcatgttcatgtctaaagaatggctgttgatgataaaataaaaatcagc

SEQ ID NO: 7136 - DNA, 1817 bp, Homo sapiens
  source 1..1817: mol_type = unassigned DNA; mol_type = unassigned DNA
aaacggcggcggcggcggcaccggaggctccgaggctcctgcgctcccgcgccgcgctcccctcgcccgcccgggccgccaggagaagaaactgaggcctggaatttgattaactcattcaaggttacccagttgatagaaggacaaggacagaatcaccagcactggctgaaggtaccttaacatggggaatcttcttaaagttttgacatgcacagaccttgagcaggggccaaattttttccttgattttgaaaatgcccagcctacagagtctgagaaggaaatttataatcaggtgaatgtagtattaaaagatgcagaaggcatcttggaggacttgcagtcatacagaggagctggccacgaaatacgagaggcaatccagcatccagcagatgagaagttgcaagagaaggcatggggtgcagttgttccactagtaggcaaattaaagaaattttacgaattttctcagaggttagaagcagcattaagaggtcttctgggagccttaacaagtaccccatattctcccacccagcatctagagcgagagcaggctcttgctaaacagtttgcagaaattcttcatttcacactccggtttgatgaactcaagatgacaaatcctgccatacagaatgatttcagctattatagaagaacattgagtcgtatgaggattaacaatgtaccggcagaaggagaaaatgaagtaaataatgaattggcaaatcgaatgtctttgttttatgctgaggcaactccaatgctgaaaaccttgagtgatgccacaacaaaatttgtatcagagaataaaaatttaccaatagaaaataccacagattgtttaagcacaatggctagtgtatgcagagtcatgctggaaacaccggaatacagaagcagatttacaaatgaagagacagtgtcattctgcttgagggtaatggtgggtgtcataatactctatgaccacgtacatccagtgggagcatttgctaaaacttccaaaattgatatgaaaggttgtatcaaagttcttaaggaccaacctcctaatagtgtggaaggtcttctaaatgctctcaggtacacaacaaaacatttgaatgatgagactacctccaagcaaattaaatccatgctgcaataacaattctggaataagcacctgctgtagacagaagacagtattctgcaatgactgagaatgcagttttttagtgattgcaattactatctcatttattcttgcttttatttctttcctctgttcctcttccctcttttttaatcatgttcttaagacttcttttctgtgccaaaatcagtaaagttacactctgaagggatatcatcctttcaaacgggccatctaaggcagctaattatgcattgcattggggtctctactgagaaaaattctgtgacttgaactaaatatttttaaatgtggattttttttgaaactaatatttaatattgcttctcctgcatggcaaaactgcctattctgctatttaaaaaccctcaatgactttattttctactgccgcctttttcatgtgcaaccaaaatgaaaatgtttaaattaactgtgttgtacaaatggtacccaacacaaactttttttaaattagtaatacttttgtttaaagttttaagtttgcattttgactttttttgtaaggatgtatgttgtgtgtttaacctttattaactaacgttaaaagctgtgatgtgtgcgtagaatattacgtatgcatgttcatgtctaaagaatggctgttgatgataaaataaaaatcagc

SEQ ID NO: 7137 - DNA, 2021 bp, Homo sapiens
  source 1..2021: mol_type = unassigned DNA; mol_type = unassigned DNA
cggcgccctcacttcctggcattccctcctccccctccccgtcgttaccctgtacatccgggtcacttgccctccccgctcggagctgccgcctggcttgtcgcggctctgccacaggggcaggtgttgaggggctcccggtccggctgccgccgctcccccgctccggacccggggctccccctagcgccgctgaggagccgcctctgcggctccaggagggcgcaggagcgggactgagagcgcctggaggctcgagcggagggtaattcatttgcacacctgttagcaagaaacagaagttgaaggactggaacaagtgaactaggaaagagggaacgccaatccaaggatagaaggacaaggacagaatcaccagcactggctgaaggtaccttaacatggggaatcttcttaaagttttgacatgcacagaccttgagcaggggccaaattttttccttgattttgaaaatgcccagcctacagagtctgagaaggaaatttataatcaggtgaatgtagtattaaaagatgcagaaggcatcttggaggacttgcagtcatacagaggagctggccacgaaatacgagaggcaatccagcatccagcagatgagaagttgcaagagaaggcatggggtgcagttgttccactagtaggcaaattaaagaaattttacgaattttctcagaggttagaagcagcattaagaggtcttctgggagccttaacaagtaccccatattctcccacccagcatctagagcgagagcaggctcttgctaaacagtttgcagaaattcttcatttcacactccggtttgatgaactcaagatgacaaatcctgccatacagaatgatttcagctattatagaagaacattgagtcgtatgaggattaacaatgtaccggcagaaggagaaaatgaagtaaataatgaattggcaaatcgaatgtctttgttttatgctgaggcaactccaatgctgaaaaccttgagtgatgccacaacaaaatttgtatcagagaataaaaatttaccaatagaaaataccacagattgtttaagcacaatggctagtgtatgcagagtcatgctggaaacaccggaatacagaagcagatttacaaatgaagagacagtgtcattctgcttgagggtaatggtgggtgtcataatactctatgaccacgtacatccagtgggagcatttgctaaaacttccaaaattgatatgaaaggttgtatcaaagttcttaaggaccaacctcctaatagtgtggaaggtcttctaaatgctctcaggtacacaacaaaacatttgaatgatgagactacctccaagcaaattaaatccatgctgcaataacaattctggaataagcacctgctgtagacagaagacagtattctgcaatgactgagaatgcagttttttagtgattgcaattactatctcatttattcttgcttttatttctttcctctgttcctcttccctcttttttaatcatgttcttaagacttcttttctgtgccaaaatcagtaaagttacactctgaagggatatcatcctttcaaacgggccatctaaggcagctaattatgcattgcattggggtctctactgagaaaaattctgtgacttgaactaaatatttttaaatgtggattttttttgaaactaatatttaatattgcttctcctgcatggcaaaactgcctattctgctatttaaaaaccctcaatgactttattttctactgccgcctttttcatgtgcaaccaaaatgaaaatgtttaaattaactgtgttgtacaaatggtacccaacacaaactttttttaaattagtaatacttttgtttaaagttttaagtttgcattttgactttttttgtaaggatgtatgttgtgtgtttaacctttattaactaacgttaaaagctgtgatgtgtgcgtagaatattacgtatgcatgttcatgtctaaagaatggctgttgatgataa

SEQ ID NO: 7138 - DNA, 1700 bp, Homo sapiens
  source 1..1700: mol_type = unassigned DNA; mol_type = unassigned DNA
ttgaggggctcccggtccggctgccgccgctcccccgctccggacccggggctccccctagcgccgctgaggagccgcctctgcggctccaggagggcgcaggagcgggactgagagcgcctggaggctcgagcggagggtaattcatttgcacacctgttagcaagaaacagaagttgaaggactggaacaagtgaactaggaaagagggaacgccaatccaaggatagaaggacaaggacagaatcaccagcactggctgaagatgcccagcctacagagtctgagaaggaaatttataatcaggtgaatgtagtattaaaagatgcagaaggcatcttggaggacttgcagtcatacagaggagctggccacgaaatacgagagaagcagcattaagaggtcttctgggagccttaacaagtaccccatattctcccacccagcatctagagcgagagcaggctcttgctaaacagtttgcagaaattcttcatttcacactccggtttgatgaactcaagatgacaaatcctgccatacagaatgatttcagctattatagaagaacattgagtcgtatgaggattaacaatgtaccggcagaaggagaaaatgaagtaaataatgaattggcaaatcgaatgtctttgttttatgctgaggcaactccaatgctgaaaaccttgagtgatgccacaacaaaatttgtatcagagaataaaaatttaccaatagaaaataccacagattgtttaagcacaatggctagtgtatgcagagtcatgctggaaacaccggaatacagaagcagatttacaaatgaagagacagtgtcattctgcttgagggtaatggtgggtgtcataatactctatgaccacgtacatccagtgggagcatttgctaaaacttccaaaattgatatgaaaggttgtatcaaagttcttaaggaccaacctcctaatagtgtggaaggtcttctaaatgctctcaggtacacaacaaaacatttgaatgatgagactacctccaagcaaattaaatccatgctgcaataacaattctggaataagcacctgctgtagacagaagacagtattctgcaatgactgagaatgcagttttttagtgattgcaattactatctcatttattcttgcttttatttctttcctctgttcctcttccctcttttttaatcatgttcttaagacttcttttctgtgccaaaatcagtaaagttacactctgaagggatatcatcctttcaaacgggccatctaaggcagctaattatgcattgcattggggtctctactgagaaaaattctgtgacttgaactaaatatttttaaatgtggattttttttgaaactaatatttaatattgcttctcctgcatggcaaaactgcctattctgctatttaaaaaccctcaatgactttattttctactgccgcctttttcatgtgcaaccaaaatgaaaatgtttaaattaactgtgttgtacaaatggtacccaacacaaactttttttaaattagtaatacttttgtttaaagttttaagtttgcattttgactttttttgtaaggatgtatgttgtgtgtttaacctttattaactaacgttaaaagctgtgatgtgtgcgtagaatattacgtatgcatgttcatgtctaaagaatggctgttga

SEQ ID NO: 7139 - DNA, 640 bp, Homo sapiens
  source 1..640: mol_type = unassigned DNA; mol_type = unassigned DNA
taatttttttgtatttttagtagagacggggttttaccgtgttaggcaggatggtctcgaactcctgaccttgtgatccgcccgcctcagcctcccaaagtgttggaattacaggcctgagccaccctgcccagcccattctgtcctttaaatcgccactcagcaccttttccagaagtcttcccttagcaaaccgtttgtttttcattgcatgtgtggtatattagtttgactgattttgttctcaaaaagattttgttttcactaagtgagaataataactcttaggttgggtttttttctgttctaagaataattaatttgacatagtatgtaatctcttgagttccatagttatggtcttgatttattttactattttgaaaaggaatgttacatgaaaaaaatggctgttttaccttttctgttttctttttctttagatgaaaggttgtatcaaagttcttaaggaccaacctcctaatagtgtggaaggtcttctaaatgctctcaggtacacaacaaaacatttgaatgatgagactacctccaagcaaattaaatccatgctgcaataacaattctggaataagcacctgctgtagacagaagacagtattctgcaatgactgagaatgca

SEQ ID NO: 7140 - DNA, 791 bp, Homo sapiens
  source 1..791: mol_type = unassigned DNA; mol_type = unassigned DNA
gcatccagcagatgagaagttgcaagagaaggcatggggtgcagttgttccactagtaggcaaattaaagaaattttacgaattttctcagaggttagaagcagcattaagaggtcttctgggagccttaacaagtaccccatattctcccacccagcatctagagcgagagcaggctcttgctaaacagtttgcagaaattcttcatttcacactccggtttgatgaactcaagatgacaaatcctgccatacagaatgatttcagctattatagaagaacattgagtcgtatgaggattaacaatgtaccggcagaaggagaaaatgaagtaaataatgaattggcaaatcgaatgtctttgttttatgctgaggcaactccaatgctgaaaaccttgagtgatgccacaacaaaatttgtatcagagaataaaaatttaccaatagaaaataccacagattgtttaagcacaatggctagtgtatgcagagtcatgctggaaacaccgtgagtatcagctgatctttttcactttaacagtgctgttgagatgactgatatttcaaaacatgttcatatatgaacatgttaacatgttttatctggaaggtggaaagtaagtatattccaaatattgaatgttaatatatgaacaaacttaaaataatttggctatttaacgtaacttctggttaagtataaaatagagttagttggtcttcaggtacctcagaccactcagactgactcagactcttagttctcttctcagaacagaagtggtggtg

SEQ ID NO: 7141 - DNA, 696 bp, Homo sapiens
  source 1..696: mol_type = unassigned DNA; mol_type = unassigned DNA
gaaactgaggcctggaatttgattaactcattcaaggttacccagttgggtggtgaaaacagtaggtattctgaaccaaccttgcacttctcaggtaattcatttgcacacctgttagcaagaaacagaagttgaaggactggaacaagtgaactaggaaagagggaacgccaatccaaggatagaaggacaaggacagaatcaccagcactggctgaaggtaccttaacatggggaatcttcttaaagttttgacatgcacagaccttgagcaggggccaaattttttccttgattttgaaaatgcccagcctacagagtctgagaaggaaatttataatcaggtgaatgtagtattaaaagatgcagaaggcatcttggaggacttgcagtcatacagaggagctggccacgaaatacgagaggcaatccagcatccagcagatgagaagttgcaagagaaggcatggggtgcagttgttccactagtaggcaaattaaagaaattttacgaattttctcagaggttagaagcagcattaagaggtcttctgggagccttaacaagtaccccatattctcccacccagcatctagagcgagagcaggctcttgctaaacagtttgcagaaattcttcatttcacactccggtttgatgaactcaaggtagaattatctattggccctgattgtt

SEQ ID NO: 7142 - DNA, 820 bp, Homo sapiens
  source 1..820: mol_type = unassigned DNA; mol_type = unassigned DNA
cgcgtcgcgaggcgagcgtcctccttttgtgcgagcgccggcggctcggcttctcgaaggtaaacagcgcttcctcttcctcctcgccgcgcctcttccttttatagttatttctcgcctggcactcgcccgggctgctgctgctgctgctgctgccgccgcggcgggggcagctcgcaaacctgtggcggtgacgtgagccccgccaacccggaaacggcggcggcggcggcaccggaggctccgaggctcctgcgctcccgcgccgcgctcccctcgcccgcccgggccgccaggagaagaaactgaggcctggaatttgattaactcattcaaggttacccagttgggtcccaccctgtcgcccaggccagagtgcaatagtgcaatcacgacccactgcatccttgaccttttgagccaaagcaatcctactgcctcagcctcccaagtaattcatttgcacacctgttagcaagaaacagaagttgaaggactggaacaagtgaactaggaaagagggaacgccaatccaaggatagaaggacaaggacagaatcaccagcactggctgaaggcaatccagcatccagcagatgagaagttgcaagagaaggcatggggtgcagttgttccactagtaggcaaattaaagaaattttacgaattttctcagaggttagaagcagcattaagaggtcttctgggagccttaacaagtaccccatattctcccacccagcatctagagcgagagcaggctcttgctaaacagtttgcagaaattcttcatttcacactccggtttgatgaactcaag

SEQ ID NO: 7143 - DNA, 544 bp, Homo sapiens
  source 1..544: mol_type = unassigned DNA; mol_type = unassigned DNA
gtgcgagcgccggcggctcggcttctcgaaggagaagaaactgaggcctggaatttgattaactcattcaaggttacccagttgggtggtgaaaacagtaggtattctgaaccaaccttgcacttctcaggtaattcatttgcacacctgttagcaagaaacagaagttgaaggactggaacaagtgaactaggaaagagggaacgccaatccaaggatagaaggacaaggacagaatcaccagcactggctgaagatgcccagcctacagagtctgagaaggaaatttataatcaggtgaatgtagtattaaaagatgcagaaggcatcttggaggacttgcagtcatacagaggagctggccacgaaatacgagaggcaatccagcatccagcagatgagaagttgcaagagaaggcatggggtgcagttgttccactagtaggcaaattaaagaaattttacgaattttctcagaggttagaagcagcattaagaggtcttctgggagccttaacaagtaccccatattctcccacccagc

SEQ ID NO: 7144 - DNA, 587 bp, Homo sapiens
  source 1..587: mol_type = unassigned DNA; mol_type = unassigned DNA
ggaaacggcggcggcggcggcaccggaggctccgaggctcctgcgctcccgcgccgcgctcccctcgcccgcccgggccgccaggagaagaaactgaggcctggaatttgattaactcattcaaggttacccagttgggtggtgaaaacagtaggtattctgaaccaaccttgcacttctcaggtaattcatttgcacacctgttagcaagaaacagaagttgaaggactggaacaagtgaactaggaaagagggaacgccaatccaaggatagaaggacaaggacagaatcaccagcactggctgaagatgcccagcctacagagtctgagaaggaaatttataatcaggtgaatgtagtattaaaagatgcagaaggcatcttggaggacttgcagtcatacagaggagctggccacgaaatacgagaggcaatccagcatccagcagatgagaagttgcaagagaaggcatggggtgcagttgttccactagtaggcaaattaaagaaattttacgaattttctcagaggttagaagcagcattaagaggtcttctgggagccttaacaagtaccccatattct

SEQ ID NO: 7145 - DNA, 699 bp, Homo sapiens
  source 1..699: mol_type = unassigned DNA; mol_type = unassigned DNA
tgccacaggggcaggtgttgaggggctcccggtccggctgccgccgctcccccgctccggacccggggctccccctagcgccgctgaggagccgcctctgcggctccaggagggcgcaggagcgggactgagagcgcctggaggctcgagcggaggatagaaggacaaggacagaatcaccagcactggctgaagaatattagcactattggaatacttaaagaatttttcattataaggccattaatgaaacttgtcttgggagaattttgagaagaattagagcaacagttgtgccattgtgtacaggaaaaccacatttcacctctaggtcctacatatcaacaccttgagaacccgttttgctgtctgccagagcacagtctgggtaccttaacatggggaatcttcttaaagttttgacatgcacagaccttgagcaggggccaaattttttccttgattttgaaaatgcccagcctacagagtctgagaaggaaatttataatcaggtgaatgtagtattaaaagatgcagaaggcatcttggaggacttgcagtcatacagaggagctggccacgaaatacgagaggcaatccagcatccagcagatgagaagttgcaagagaaggcatggggtgcagttgttccactagtaggcaaattaaagaaattttacgaattttctcagaggttag

SEQ ID NO: 7146 - DNA, 574 bp, Homo sapiens
  source 1..574: mol_type = unassigned DNA; mol_type = unassigned DNA
gtgcgagcgccggcggctcggcttctcgaaggagaagaaactgaggcctggaatttgattaactcattcaaggttacccagttgataactgcagcattggactagaggtggagagagtggtactgggggagtggtgaagcaggtaattcatttgcacacctgttagcaagaaacagaagttgaaggactggaacaagtgaactaggaaagagggaacgccaatccaaggatagaaggacaaggacagaatcaccagcactggctgaaggtaccttaacatggggaatcttcttaaagttttgacatgcacagaccttgagcaggggccaaattttttccttgattttgaaaatgcccagcctacagagtctgagaaggaaatttataatcaggtgaatgtagtattaaaagatgcagaaggcatcttggaggacttgcagtcatacagaggagctggccacgaaatacgagaggcaatccagcatccagcagatgagaagttgcaagagaaggcatggggtgcagttgttccactagtaggcaaattaaagaaattttacgaattttctcagag

SEQ ID NO: 7147 - DNA, 581 bp, Homo sapiens
  source 1..581: mol_type = unassigned DNA; mol_type = unassigned DNA
aggcccagtaagtatctgcgggagggctgaatgggtgcgtggacagcattcctctcactgaccccgctgcgaggtgagccaggcaggggctgtcaccattcctgaagtccaggagaagaaactgaggcctggaatttgattaactcattcaaggttacccagttggtaattcatttgcacacctgttagcaagaaacagaagttgaaggactggaacaagtgaactaggaaagagggaacgccaatccaaggatagaaggacaaggacagaatcaccagcactggctgaaggtaccttaacatggggaatcttcttaaagttttgacatgcacagaccttgagcaggggccaaattttttccttgattttgaaaatgcccagcctacagagtctgagaaggaaatttataatcaggtgaatgtagtattaaaagatgcagaaggcatcttggaggacttgcagtcatacagaggagctggccacgaaatacgagaggcaatccagcatccagcagatgagaagttgcaagagaaggcatggggtgcagttgttccactagtaggcaaattaaagaaatttt

SEQ ID NO: 7148 - DNA, 579 bp, Homo sapiens
  source 1..579: mol_type = unassigned DNA; mol_type = unassigned DNA
catccgggtcacttgccctccccgctcggagctgccgcctggcttgtcgcggctctgccacaggggcaggtgttgaggggctcccggtccggctgccgccgctcccccgctccggacccggggctccccctagcgccgctgaggagccgcctctgcggctccaggagggcgcaggagcgggactgagagcgcctggaggctcgagcggaggatagaaggacaaggacagaatcaccagcactggctgaaggtttgctggcatgggtaatctcattaaggtgctaaccagggacatagaccacaatgcagcacattttttcttggactttgaaagtaccttaacatggggaatcttcttaaagttttgacatgcacagaccttgagcaggggccaaattttttccttgattttgaaaatgcccagcctacagagtctgagaaggaaatttataatcaggtgaatgtagtattaaaagatgcagaaggcatcttggaggacttgcagtcatacagaggagctggccacgaaatacgagaggcaatccagcatccagcagatgagaagttgcaagagaaggc

SEQ ID NO: 7149 - DNA, 573 bp, Homo sapiens
  source 1..573: mol_type = unassigned DNA; mol_type = unassigned DNA
ttatttctcgcctggcactcgcccgggctgctgctgctgctgctgctgccgccgcggcgggggcagctcgcaaacctgtggcggtgacgtgagccccgccaacccggaaacggcggcggcggcggcaccggaggctccgaggctcctgcgctcccgcgccgcgctcccctcgcccgcccgggccgccaggagaagaaactgaggcctggaatttgattaactcattcaaggttacccagttgatagaaggacaaggacagaatcaccagcactggctgaagttcctcctaacaggaacccagctggcaaagatgtctgggaaatgtcatttgcattctcagccccagcagtgcagaaaggtaccttaacatggggaatcttcttaaagttttgacatgcacagaccttgagcaggggccaaattttttccttgattttgaaaatgcccagcctacagagtctgagaaggaaatttataatcaggtgaatgtagtattaaaagatgcagaaggcatcttggaggacttgcagtcatacagaggagctggccacgaaatacgagaggcaatccag

SEQ ID NO: 7150 - DNA, 421 bp, Homo sapiens
  source 1..421: mol_type = unassigned DNA; mol_type = unassigned DNA
ccgccaacccggaaacggcggcggcggcggcaccggaggctccgaggctcctgcgctcccgcgccgcgctcccctcgcccgcccgggccgccagatagaaggacaaggacagaatcaccagcactggctgaaggtttgctggcatgggtaatctcattaaggtgctaaccagggacatagaccacaatgcagcacattttttcttggactttgaaagtaccttaacatggggaatcttcttaaagttttgacatgcacagaccttgagcaggggccaaattttttccttgattttgaaaatgcccagcctacagagtctgagaaggaaatttataatcaggtgaatgtagtattaaaagatgcagaaggcatcttggaggacttgcagtcatacagaggagctggccacgaaatacgagag

SEQ ID NO: 7151 - DNA, 548 bp, Homo sapiens
  source 1..548: mol_type = unassigned DNA; mol_type = unassigned DNA
ttgattaactcattcaaggttacccagttggtaattcatttgcacacctgttagcaagaaacagaagttgaaggactggaacaagtgaactaggaaagagggaacgccaatccaaggatagaaggacaaggacagaatcaccagcactggctgaagaatattagcactattggaatacttaaagaatttttcattataaggccattaatgaaacttgtcttgggagaattttgagaagaattagagcaacagttgtgccattgtgtacaggaaaaccacatttcacctctaggtcctacatatcaacaccttgagaacccgttttgctgtctgccagagcacagtctgggtaccttaacatggggaatcttcttaaagttttgacatgcacagaccttgagcaggggccaaattttttccttgattttgaaaatgcccagcctacagagtctgagaaggaaatttataatcaggtgaatgtagtattaaaagatgcagaaggcatcttggaggacttgcagtcatacagaggagctggccacgaaata

SEQ ID NO: 7152 - DNA, 561 bp, Homo sapiens
  source 1..561: mol_type = unassigned DNA; mol_type = unassigned DNA
ttgccctccccgctcggagctgccgcctggcttgtcgcggctctgccacaggggcaggtgttgaggggctcccggtccggctgccgccgctcccccgctccggacccggggctccccctagcgccgctgaggagccgcctctgcggctccaggagggcgcaggagcgggactgagagcgcctggaggctcgagcggagggtaattcatttgcacacctgttagcaagaaacagaagttgaaggactggaacaagtgaactaggaaagagggaacgccaatccaaggatagaaggacaaggacagaatcaccagcactggctgaaggtttgctggcatgggtaatctcattaaggtgctaaccagggacatagaccacaatgcagcacattttttcttggactttgaaagtaccttaacatggggaatcttcttaaagttttgacatgcacagaccttgagcaggggccaaattttttccttgattttgaaaatgcccagcctacagagtctgagaaggaaatttataatcaggtgaatgtagtattaaaagatgcagaagg

SEQ ID NO: 7153 - DNA, 367 bp, Homo sapiens
  source 1..367: mol_type = unassigned DNA; mol_type = unassigned DNA
aaacggcggcggcggcggcaccggaggctccgaggctcctgcgctcccgcgccgcgctcccctcgcccgcccgggccgccaggagaagaaactgaggcctggaatttgattaactcattcaaggttacccagttgggtggtgaaaacagtaggtattctgaaccaaccttgcacttctcagatagaaggacaaggacagaatcaccagcactggctgaaggtaccttaacatggggaatcttcttaaagttttgacatgcacagaccttgagcaggggccaaattttttccttgattttgaaaatgcccagcctacagagtctgagaaggaaatttataatcaggtgaatgtagtattaaaagatgc

SEQ ID NO: 7154 - DNA, 554 bp, Homo sapiens
  source 1..554: mol_type = unassigned DNA; mol_type = unassigned DNA
cgcggctctgccacaggggcaggtgttgaggggctcccggtccggctgccgccgctcccccgctccggacccggggctccccctagcgccgctgaggagccgcctctgcggctccaggagggcgcaggagcgggactgagagcgcctggaggctcgagcggaggatagaaggacaaggacagaatcaccagcactggctgaaggtaaatatgtctttgggggaaatgattattcaaatataaatgaaaagttatgatttcaataaaaacttatattaactatatataatttaagggaaatgttctatacacaatattgagttgctaaaaatgttgttaggaaatattgattgtttagtttttggcttagaataggacctggtggggaaaatgtaaattaattagaactttttttaacagctttctttctttaggagaggtatgtgttttcctttgaattaagtcattttagctgtcaccagtatagttgatcaagaaagttctaagccataattttagtagtttaaagtatatatatgtacatatatatttttt

SEQ ID NO: 7155 - DNA, 533 bp, Homo sapiens
  source 1..533: mol_type = unassigned DNA; mol_type = unassigned DNA
gagcgtcctccttttgtgcgagcgccggcggctcggcttctcgaaggagaagaaactgaggcctggaatttgattaactcattcaaggttacccagttggtaagtaacagagctggaatttgaccatggtcatctggctccagagccagcactcttaaccacacttcctatgaggaaaaattaaagtggatggtgatggctacaagatggatttcagttgcatagaaataagaacctcctacctctgttgaaatcagaatacatatacaccccttcattcactctatgaatattcattcattccatgaacctacaaggtttttaggtcaaattattagtttaaataagaactataggctgggcgcagtggctcacacctgtaatcccaacactttgggaggctgaggtgggtggatcacttgaggtcaggagttcaagaccagcctggccaacatggtgaaatcccgtctctactaaaaatacaaaatttactaaaaatactaaaaatacaaaatactcacttgaacccagga

SEQ ID NO: 7156 - DNA, 507 bp, Homo sapiens
  source 1..507: mol_type = unassigned DNA; mol_type = unassigned DNA
atttctcgcctggcactcgcccgggctgctgctgctgctgctgctgccgccgcggcgggggcagctcgcaaacctgtggcggtgacgtgagccccgccaacccggaaacggcggcggcggcggcaccggaggctccgaggctcctgcgctcccgcgccgcgctcccctcgcccgcccgggccgccaggagaagaaactgaggcctggaatttgattaactcattcaaggttacccagttggtaagtaacagagctggaatttgaccatggtcatctggctccagagccagcactcttaaccacacttcctatgaggaaaaattaaagtggatggtgatggctacaagatggatttcagttgcatagaaataagaacctcctacctctgttgaaatcagaatacatatacaccccttcattcactctatgaatattcattcattccatgaacctacaaggtttttaggtcaaattattagtttaaataagaactataggctgggcgca

SEQ ID NO: 7157 - DNA, 750 bp, Homo sapiens
  source 1..750: mol_type = unassigned DNA; mol_type = unassigned DNA
atgcagaaggcatcttggaggacttgcagtcatacagaggagctggccacgaaatacgagagggcaatccagcatccagcagatgagaagttgcaagagaaggcatggggtgcagttgttccactagtaggcaaagaaattttacgaattttctcagaggttagaagcagcattaagaggtcttctgggagccttaacaagtaccccatattctcccacccagcatctagagcgagacaggctcttgctaaacagtttgcagaaattcttcatttcacactccggtttgatgaactcaagatgacaaatcctgccatacagaatgatttcagctattatagaagaacattgagtcgtatgaggattacaatgtaccgggcagaaggagaaaatgaagtaaataatgaattggcaaatcgaatgtctttgttttatgctgaggcaactccaatgctgaaaaccttgagtgatgccacaacaaaatttgtatcagagaataaaaatttaccaatagaaaataccacagattgtttaagcacaatggctagtgtatgcagagtcatgctggaaacaccggaatacagaagcagatttacaaatgaagagacagtgtcattccttgagggtaatggtgggtgtcataatactctatgaccacgtacatccagtgggagcatttgctaaaacttccaaaattgatatgaaaggttgtatcaaagttcttaaggaccaacctcctaatagtgtgga

SEQ ID NO: 7158 - DNA, 837 bp, Homo sapiens
  source 1..837: mol_type = unassigned DNA; mol_type = unassigned DNA
gatagaaggacaaggacagaatcaccagcactggctgaaggtaccttaacatggggaatcttcttaaagttttgacatgcacagaccttgagcaggggccaaattttttccttgattttgaaaatgcccagcctacagagtctgagaaggaaatttataatcaggtgaatgtagtattaaaagatgcagaaggcatcttggaggacttgcagtcatacagaggagctggccacgaaatacgagagggcaatccagcatccagcagatgagaagttgcaagagaaggcatggggtgcagttgttccactagtaggcaaaaaagaaattttacgaattttctcagaggttagaagcagcattaagaggtcttctgggagccttaacaagtaccccatattctcccacccagcatctagagcgagacaggctcttgctaaacagtttgcagaaattcttcatttcacactccggtttgatgaactcaagatgacaaatcctgccatacagaatgatttcagctattatagaagaacattgagtcgtatgaggattaacaatgtaccggcagaaggagaaaatgaagtaaataatgaattggcaaatcgaatgtctttgttttatgctgaggcaactccaatgctgaaaaccttgagtgatgccacaacaaaatttgtatcagagaataaaaatttaccaatagaaaataccacagattgtttaagcacaatggctagtgtatgcagagtcatgctggaaacaccggaatacagaagcagatttacaaatgaagagacagtgtcattccttgagggtaatggtgggtgtcataatactcta

SEQ ID NO: 7159 - DNA, 628 bp, Homo sapiens
  source 1..628: mol_type = unassigned DNA; mol_type = unassigned DNA
ggcggtgcgacagcggcgggagtgccacgcggcagggaagccccggcgccgtcctgccgaggagtgctgtgtggtcgaccggtcccacctcgcccgccacgccccggccgtcctccgccagcggcggcttcgtggacagcagcgagggcagtgcgggctcaggcccgctctggtgttccgcggagtcctgcttgccctccacgaggcgccgcccgtccctctcacaggagcgactcgcgggtgcgggcactcccctgccctgggccagcagcagccccacgtccacgcctgcgctgggcgggcgccgtgggctgctccggtgccgctcacagccttgcgtgctcagtgggaagaggagccggcgcaaacggaggcgtgaggaggacgccaggtggacacgcccatccttggacttcctgaaaatgacccaggttgcctcacggactgtttcaccaagtatgttgccatgacatagcacggccctccatcttcccatcttcacggcatctgacagccgtctcctcactggtcggctctatgccaagcattcgtgacacacgtcagttctgttgtggtggcaccatcgcagcgacttctctcttggtgaaggagttgctgctgctcacca

SEQ ID NO: 7160 - DNA, 2776 bp, Homo sapiens
  source 1..2776: mol_type = unassigned DNA; mol_type = unassigned DNA
cgggcggtcgtgggcgcggggccctgcgctccgagctgggcgcgtggactacgtccccctgcctccgccgtctgcgccgcccgtcgaggcgacttttccgcacgaggcgaggcccgccctggtggccccgcgccgtggttcggtggcgcgagaggcggggagtcgccgtggtaaacggggccttggggcgtcccgaaggggacccagacgcgggaggccagacttccccggcgacccgaggaggggacttgcggcggattccgaagccgctttttctgcgtagcctgggggtgtaaatcgccgagattctcctgtgtggagaaggcgccggtgcccgcccgctgctgccggactctagaggggtgtctttttccgttaatctgagcgcagtcgcggagcccctgtttcccacgcagcctgtgttaagtggcctcgcacaaatcctgaagagcccgtgggcgtggactgctcatctgtaaagaaagtggagacatgaccttgagatttggctgacccagcaatgctggggccttcgcaagtctgatgttccaggactccagtgcctgttggtgtggacggaggacacggggccccgaccatggtcacactcatcactgagaagctgcagagccagagcctggacgacctcacctgcaaggcggaggctggcccgttgcagtattctgcggaaaccctgaacaagagcggtcgtctgttccctttggagctcaacgaccagagtccctggaaggtcttcagtggaggaccgcccgtcagaagccaggcagccacgggccctgatttctccttcctgccgggcctgtctgctgccgctcacaccatgggtcttcagtggcagccacagtccccgcgcccaggcgcaggcctgggtgcagccagcaccgtggaccccagtgaaagcacaggctcgtccacggccccaccgaccaagcggcattgccggtccttgtcagaacccgaggagcttgtgcgctgccggtccccctggcgccccggcagctccaaggtctggactccagtctccaagaggcggtgcgacagcggcgggagtgccacgcggcagggaagccccggcgccgtcctgccgaggagtgctgtgtggtcgaccggtcccacctcgcccgccacgccccggccgtcctccgccagcggcggcttcgtggacagcagcgagggcagtgcgggctcaggcccgctctggtgttccgcggagtcctgcttgccctccacgaggcgccgcccgtccctctcacaggagcgactcgcgggtgcgggcactcccctgccctgggccagcagcagccccacgtccacgcctgcgctgggcgggcgccgtgggctgctccggtgccgctcacagccttgcgtgctcagtgggaagaggagccggcgcaaacggaggcgtgaggaggacgccaggtggacacgcccatccttggacttcctgaaaatgacccagccgcacagctgtgcccgcgagtgcgagtcccgcgtccgaggcctcggcgtgagcttacagcatctgtcgggtccgagcagtcagtccagagggtcgactctgaatgaaaacaaaacgccgtggtttgaaatggaaggaaacctggcccctgaagactttaaaaaattcaaaaagcctttgctccctcaattacgaagatgacgatgaggatgacaccccagtgaagacggttctgtcctccccatgtgactcccggggcctccctggcatcaccatgcctggctgcagccagaggggcctcaggaccagccctgtccaccccaacctgtgggcctctagggagtcggtgaccagtgatggctcccgcaggagcagcggggacccccgtgatggggacagtgtcggggaggagggcgtcttcccccgggcccgctgggagctggacctggagcagatcgagaacaactgaggctggtgggggctggtcggggccatggctgccgcctgcacctgccctggggcacagagtaggtttcctgtgagctggtcggggccacggcccggcacctgccctggggcacagagtaggtttcctgtgagctggtcggggccacggctgccgccggcacctgccctggggcacagagtaggtttcctgtgagctggtcggggccacggctgccgccggcacctgccctggggcacagagtaggtttcctgtgagctggtcggggccacggctgccaccggcacctgccctggggcacagagtaggtttcctgtgagctggtcggggccacggctgccgcctgcactgccctggggcacagactaggtttcctgtgagctggtcggggccatggctgctgcctgcacctgccccagggcacagagtaggtttcctgtgagctggtcggggccatggctgccgcctgcacctgccccggggcacagagtaggtttcctgtgagctggtcggggccatggctgccaccggcacctgccctggggcacagagtaggtttcctgtgagttggtcggggccacggctgccgcctgcactgccctggggcacagactaggtttcatgtgagctggtcggggccatggctgctgccggcacctgccctggggcacagagtaggtttcgtgttgcttggaacattaaggcgtaattttgattcagtttttcctaaagaagcattttgcatttttatggcttttgcagttcgggagaaagcttctctattttggatgcatttcagaagggcgttctattaaacatgaatctgcaaa

SEQ ID NO: 7161 - DNA, 2159 bp, Homo sapiens
  source 1..2159: mol_type = unassigned DNA; mol_type = unassigned DNA
gcacaaatcctgaagagcccgtgggcgtggactgctcatctgtaaagaaagtggagacatgaccttgagatttggctgacccagcaatgctggggccttcgcaagtctgatgttccaggactccagtgcctgttggtgtggacggaggacacggggccccgaccatggtcacactcatcactgagaagctgcagagccagagcctggacgacctcacctgcaaggcggaggctggcccgttgcagtattctgcggaaaccctgaacaagagcggtcgtctgttccctttggagctcaacgaccagagtccctggaaggtcttcagtggaggaccgcccgtcagaagccaggcagccacgggccctgatttctccttcctgccgggcctgtctgctgccgctcacaccatgggtcttcagtggcagccacagtccccgcgcccaggcgcaggcctgggtgcagccagcaccgtggaccccagtgaaagcacaggctcgtccacggccccaccgaccaagcggcattgccggtccttgtcagaacccgaggagcttgtgcgctgccggtccccctggcgccccggcagctccaaggtctggactccagtctccaagaggcggtgcgacagcggcgggagtgccacgcggcagggaagccccggcgccgtcctgccgaggagtgctgtgtggtcgaccggtcccacctcgcccgccacgccccggccgtcctccgccagcggcggcttcgtggacagcagcgagggcagtgcgggctcaggcccgctctggtgttccgcggagtcctgcttgccctccacgaggcgccgcccgtccctctcacaggagcgactcgcgggtgcgggcactcccctgccctgggccagcagcagccccacgtccacgcctgcgctgggcgggcgccgtgggctgctccggtgccgctcacagccttgcgtgctcagtgggaagaggagccggcgcaaacggaggcgtgaggaggacgccaggtggacacgcccatccttggacttcctgaaaatgacccagactttaaaaaattcaaaaagcctttgctccctcaattacgaagatgacgatgaggatgacaccccagtgaagacggttctgtcctccccatgtgactcccggggcctccctggcatcaccatgcctggctgcagccagaggggcctcaggaccagccctgtccaccccaacctgtgggcctctagggagtcggtgaccagtgatggctcccgcaggagcagcggggacccccgtgatggggacagtgtcggggaggagggcgtcttcccccgggcccgctgggagctggacctggagcagatcgagaacaactgaggctggtgggggctggtcggggccatggctgccgcctgcacctgccctggggcacagagtaggtttcctgtgagctggtcggggccacggcccggcacctgccctggggcacagagtaggtttcctgtgagctggtcggggccacggctgccgccggcacctgccctggggcacagagtaggtttcctgtgagctggtcggggccacggctgccgccggcacctgccctggggcacagagtaggtttcctgtgagctggtcggggccacggctgccaccggcacctgccctggggcacagagtaggtttcctgtgagctggtcggggccacggctgccgcctgcactgccctggggcacagactaggtttcctgtgagctggtcggggccatggctgctgcctgcacctgccccagggcacagagtaggtttcctgtgagctggtcggggccatggctgccgcctgcacctgccccggggcacagagtaggtttcctgtgagctggtcggggccatggctgccaccggcacctgccctggggcacagagtaggtttcctgtgagttggtcggggccacggctgccgcctgcactgccctggggcacagactaggtttcatgtgagctggtcggggccatggctgctgccggcacctgccctggggcacagagtaggtttcgtgttgcttggaacattaaggcgtaattttgattcagtttttcctaaagaagcattttgcatttttatggcttttgcagttcgggagaaagcttctctattttggatgcatttcagaa

SEQ ID NO: 7162 - DNA, 2086 bp, Homo sapiens
  source 1..2086: mol_type = unassigned DNA; mol_type = unassigned DNA
ggttcggtggcgcgagaggcggggagtcgccgtggcacaaatcctgaagagcccgtgggcgtggactgctcatctgtaaagaaagtggagacatgaccttgagatttggctgacccagcaatgctggggccttcgcaagtctgatgttccaggactccagtgcctgttggtgtggacggaggacacggggccccgaccatggtcacactcatcactgagaagctgcagagccagagcctggacgacctcacctgcaaggcggaggctggcccgttgcagtattctgcggaaaccctgaacaagagcggtcgtctgttccctttggagctcaacgaccagagtccctggaaggtcttcagtggaggaccgcccgtcagaagccaggcagccacgggccctgatttctccttcctgccgggcctgtctgctgccgctcacaccatgggtcttcagtggcagccacagtccccgcgcccaggcgcaggcctgggtgcagccagcaccgtggaccccagtgaaagcacaggctcgtccacggccccaccgaccaagcggcattgccggtccttgtcagaacccgaggagcttgtgcgctgccggtccccctggcgccccggcagctccaaggtctggactccagtctccaagaggcggtgcgacagcggcgggagtgccacgcggcagggaagccccggcgccgtcctgccgaggagtgctgtgtggtcgaccggtcccacctcgcccgccacgccccggccgtcctccgccagcggcggcttcgtggacagcagcgagggcagtgcgggctcaggcccgctctggtgttccgcggagtcctgcttgccctccacgaggcgccgcccgtccctctcacaggagcgactcgcgggtgcgggcactcccctgccctgggccagcagcagccccacgtccacgcctgcgctgggcgggcgccgtgggctgctccggtgccgctcacagccttgcgtgctcagtgggaagaggagccggcgcaaacggaggcgtgaggaggacgccaggtggacacgcccatccttggacttcctgaaaatgacccagactttaaaaaattcaaaaagcctttgctccctcaattacgaagatgacgatgaggatgacaccccagtgaagacggttctgtcctccccatgtgactcccggggcctccctggcatcaccatgcctggctgcagccagaggggcctcaggaccagccctgtccaccccaacctgtgggcctctagggagtcggtgaccagtgatggctcccgcaggagcagcggggacccccgtgatggggacagtgtcggggaggagggcgtcttcccccgggcccgctgggagctggacctggagcagatcgagaacaactgaggctggtgggggctggtcggggccatggctgccgcctgcacctgccctggggcacagagtaggtttcctgtgagctggtcggggccacggcccggcacctgccctggggcacagagtaggtttcctgtgagctggtcggggccacggctgccgccggcacctgccctggggcacagagtaggtttcctgtgagctggtcggggccacggctgccgccggcacctgccctggggcacagagtaggtttcctgtgagctggtcggggccacggctgccaccggcacctgccctggggcacagagtaggtttcctgtgagctggtcggggccacggctgccgcctgcactgccctggggcacagactaggtttcctgtgagctggtcggggccatggctgctgcctgcacctgccccagggcacagagtaggtttcctgtgagctggtcggggccatggctgccgcctgcacctgccccggggcacagagtaggtttcctgtgagctggtcggggccatggctgccaccggcacctgccctggggcacagagtaggtttcctgtgagttggtcggggccacggctgccgcctgcactgccctggggcacagactaggtttcatgtgagctggtcggggccatggctgctgccggcacctgccctggggcacagagtaggtttcgtgttgcttgg

SEQ ID NO: 7163 - DNA, 811 bp, Homo sapiens
  source 1..811: mol_type = unassigned DNA; mol_type = unassigned DNA
aaagccagaggctttggcaaggggcaggtacagatgtggctgagacagggccctggacgtttgctgagtgacgtcaggtcagctcgtaggaggcttccctgaccttccagggtctcaccggcttccggtagctgagttaacccacctcaggtgctggaggccctccagctgtcagctggggtccgtgcaccccccagactgcctggagggcttcgcacacagtttgaaaggcctctgcgctttggagcccaatttggaacttgaaggcttgacctttgtgttttggacaactgttttgtgtttaacctcagatggaagtgaccatccaaccagagtgatggtagcaggagctgggacggagccccggggctggcgcccagggacagggggcgcgaggcggatgggtggcgcagtccaggccagcatcggccccgtgggcctcggtttccaccgtctctacagcgtgggtggccccttcagttccgtgtggccttcgctagcgctgttgggcgctgagctgtacagctgccgtgtctgtgggcagaagttttttctcctgcaccgactgtgtcgtccagaggcgttcagagcctgctgttttcacgctctagccgcacagctgtgcccgcgagtgcgagtcccgcgtccgaggcctcggcgtgagcttacagcatctgtcgggtccgagcagtcagtccagagggtcgactctgaatgaaaacaaaacgccgtggtttgaaatggaaggaaacctggcccctgaagactttaaaaaattcaaaaagcctttgctccctcaattacgaagatg

SEQ ID NO: 7164 - DNA, 558 bp, Homo sapiens
  source 1..558: mol_type = unassigned DNA; mol_type = unassigned DNA
gtcgccctgagcgagcggggcctgggcggccggcagtcttctcgctccgcacccccgcggccgcgctcaggcacaaatcctgaagagcccgtgggcgtggactgctcatctgtaaagaaagtggagacatgaccttgagatttggctgacccagcaatgctggggccttcgcaagtctgatgttccaggactccagtgcctgttggtgtggacggaggacacggggccccgaccatggtcacactcatcactgagaagctgcagagccagagcctggacgacctcacctgcaaggcggaggctggcccgttgcagtattctgcggaaaccctgaacaagagcggtcgtctgttccctttggagctcaacgaccagagtccctggaaggtcttcagtggaggaccgcccgtcagaagccaggcagccacgggccctgatttctccttcctgccgggcctgtctgctgccgctcacaccatgggtcttcagtggcagccacagtccccgcgcccaggcgcaggcctgggtgcagccagcaccgtggaccccagtgaaagc

SEQ ID NO: 7165 - DNA, 2802 bp, Homo sapiens
  source 1..2802: mol_type = unassigned DNA; mol_type = unassigned DNA
tcgctccgcacccccgcggccgcgctcaggcacaaatcctgaagagcccgtgggcgtggactgctcatctgtaaagaaagtggagacatgaccttgagatttggctgacccagcaatgctggggccttcgcaagtctgatgttccaggactccagtgcctgttggtgtggacggaggacacggggccccgaccatggtcacactcatcactgagaagctgcagagccagagcctggacgacctcacctgcaaggcggaggctggcccgttgcagtattctgcggaaaccctgaacaagagcggtcgtctgttccctttggagctcaacgaccagagtccctggaaggtcttcagtggaggaccgcccgtcagaagccaggcagccacgggccctgatttctccttcctgccgggcctgtctgctgccgctcacaccatgggtcttcagtggcagccacagtccccgcgcccaggcgcaggcctgggtgcagccagcaccgtggaccccagtgaaagcacaggctcgtccacggccccaccgaccaagcggcattgccggtccttgtcagaacccgaggagcttgtgcgctgccggtccccctggcgccccggcagctccaaggtctggactccagtctccaagaggcggtgcgacagcggcgggagtgccacgcggcagggaagccccggcgccgtcctgccgaggagtgctgtgtggtcgaccggtcccacctcgcccgccacgccccggccgtcctccgccagcggcggcttcgtggacagcagcgagggcagtgcgggctcaggcccgctctggtgttccgcggagtcctgcttgccctccacgaggcgccgcccgtccctctcacaggagcgactcgcgggtgcgggcactcccctgccctgggccagcagcagccccacgtccacgcctgcgctgggcgggcgccgtgggctgctccggtgccgctcacagccttgcgtgctcagtgggaagaggagccggcgcaaacggaggcgtgaggaggacgccaggtggacacgcccatccttggacttcctgaaaatgacccagactttaaaaaattcaaaaagcctttgctccctcaattacgaagatgacgatgaggatgacaccccagtgaagacggttctgtcctccccatgtgactcccggggcctccctggcatcaccatgcctggctgcagccagaggggcctcaggaccagccctgtccaccccaacctgtgggcctctagggagtcggtgaccagtgatggctcccgcaggagcagcggggacccccgtgatggggacagtgtcggggaggagggcgtcttcccccgggcccgctgggagctggacctggagcagatcgagaacaactgaggctggtgggggctggtcggggccatggctgccgcctgcacctgccctggggcacagagtaggtttcctgtgagctggtcggggccacggcccggcacctgccctggggcacagagtaggtttcctgtgagctggtcggggccacggctgccgccggcacctgccctggggcacagagtaggtttcctgtgagctggtcggggccacggctgccgccggcacctgccctggggcacagagtaggtttcctgtgagctggtcggggccacggctgccaccggcacctgccctggggcacagagtaggtttcctgtgagctggtcggggccacggctgccgcctgcactgccctggggcacagactaggtttcctgtgagctggtcggggccatggctgctgcctgcacctgccccagggcacagagtaggtttcctgtgagctggtcggggccatggctgccgcctgcacctgccccggggcacagagtaggtttcctgtgagctggtcggggccatggctgccaccggcacctgccctggggcacagagtaggtttcctgtgagttggtcggggccacggctgccgcctgcactgccctggggcacagactaggtttcatgtgagctggtcggggccatggctgctgccggcacctgccctggggcacagagtaggtttcgtgttgcttggaacattaaggcgtaattttgattcagtttttcctaaagaagcattttgcatttttatggcttttgcagttcgggagaaagcttctctattttggatgcatttcagaagggcgttctattaaacatgaatctgcaaacagattaacatgcgtctgtgttccccacgaaaggcctgctgtgcagggcgccttgtgtgctttagttgctaggaaaccccgggcgttggtggtcagagtcccactggccccgtgtgtccccccctcccgacgggtcacggtgcttggggcttgcgcatgggcatctgtgcccatgaaccttgtcacccacgtgccagtgaaccgccagcttgtggccgcctggttttccaccggtggcagtgatggcctttggggcagaccaaggtgccatgagtccctgcttcccgtggcctgggagggcccttgcaccttcaggtggggtgtagtgccagacctctgggaaggctgtcctgccggcagcacccgtcagcacccactctgtgaatttaatacaaggcctttgctttgtgcatacgacttctgattaattttcgtttccaccatctgaagtgggcctggctgcgcctcaggcctctggtctctggctcagaaccagacaaggcaagggatttcctgtttttcattcttgcacttttaataaaatcgtaggggtttcgagtttgcgatagcaaaagaaaacattaa

SEQ ID NO: 7166 - DNA, 2574 bp, Homo sapiens
  source 1..2574: mol_type = unassigned DNA; mol_type = unassigned DNA
ggcggggagcccggccgccagcgctcgggtccgcctctgactgcagcgcggcggggcgatgtgtgattaccatggcgaggagtctctgtccgggggcctggctaaggaaaccctattacctccaggctcgcttctcatatgtgcggatgaaatatcttttcttttcctggttagtggtttttgttggaagctggattatatatgtgcagtattctacctatacagaattatgcagaggaaaggactgtaagaaaataatatgtgacaagtacaagactggagttattgatgggcctgcatgtaacagcctttgtgttacagaaactctttactttggaaaatgtttatccaccaagcccaacaatcagatgtatttagggatttgggataatctaccaggtgttgtgaaatgtcaaatggaacaagcgcttcatcttgattttggaactgaattggaaccaagaaaagaaatagtgctatttgataagccaactagaggaactactgtacaaaaatttaaagaaatggtctatagtctctttaaggcaaaattgggtgaccaaggaaacctctctgaactggttaatctcatcttgacggtggctgatggagacaaagatggccaggtttccttgggagaagcaaagtcggcatgggcacttcttcaactgaatgaatttcttctcatggtgatacttcaagataaagaacatacccccaaattaatgggattctgtggtgacctctatgtgatggaaagtgttgaatatacctctctttatggaataagccttccttgggtcattgaactttttattccatctgggttcagaagaagcatggatcagctgttcacaccatcatggccaagaaaggccaaaatagccataggacttctagaatttgtggaagatgttttccatggcccctacggaaatttcctcatgtgcgatactagtgccaaaaacctaggatataatgataagtatgatttgaaaatggtggatatgagaaaaattgtgccagagacaaacctgaaagaacttattaaggatcgtcactgtgagtctgatttggactgtgtctatggcacagattgtagaactagctgtgatcagagtacaatgaagtgtacttcagaagtgatacaaccaaacttggcaaaagcttgtcagttactcaaagactacctactgcgtggtgctccaagtgaaattcgtgaagaattagaaaagcagctttattcttgtattgctctcaaagtcacagcaaatcaaatggaaatggaacattctttgatactaaataacctaaaaacattattgtggaagaaaatttcctacactaatgactcttagttcatttggacataattaccattttaagaaacctgccacttttaaagaacaattttgagcattaaaaaaaaatggcttcaaattccggccagttacacaaaactccttccccccaggcctgagaagccatcagtatgtgatcactgaagtaatggcaggtgtaggatcaacaggtccccaagatgtcattcctgcccttttagaagccctgttacatctccgaagtacattcattgtgtaactattttgactgactttaaaaaccaatgctgtgaaaagcttcattccataaacatcaacagtgagtgatttgtagatttaccttagccaaaataccaatgctggaagcattgtgtttgcattgaagctgctgttcaacaagaaaatttataaatttactaatgtcttagcatggtaaagtttgcacattaacagaaattaagactgcaaagcaggttaaacttgcttctttataaaacagatgttgggttaatagcatggtttactgtattaaagacttatacacccatttttaacctcattcagacatcaagttatgtgtagcttcacaatggttcaagtggcttacttcaagaaatcttatacttgacagtacaccaattttattgactaaaaatggatgaactttcctaaagattcaaagggcccatcttagtatcacgcagctgactgagcccttcaaaactgacatcttaaggcccaatcaagatccacatatcctgattttgaactatgtgaaagtgggactgtaagtgcaagactaaaataaattatagcagactttttagtaataactttccattttcaaacagtatatcctgtgggccaaagggctatttcttaaagaggcatgtaaatgtatttatttatctaatgtttttttccccatgtaaacttgatatacaaggtttagtatttgctcctctttcatattattttcacacgtatactcagatttggcatgtacctttcaacatctccataaaattaaacaccttttggagaaaagaaccactattttctgctcaaaggtttcgcctacctaaagtggaacatgttaaaaatctatgtgaccatcactggacagctttctctcaaaactttccttcaacgccatggattagcaccagttttgtttactttaaggtacttttcccattcatcatctggttataataaatggatggaagaaata

SEQ ID NO: 7167 - DNA, 2426 bp, Homo sapiens
  source 1..2426: mol_type = unassigned DNA; mol_type = unassigned DNA
agggggcggggaggcggggggaggcggggagcccggccgccagcgctcgggtccgcctctgactgcagcgcggcggggcgatgtgtgattaccatggcgaggagtctctgtccgggggcctggctaaggaaaccctattacctccaggctcgcttctcatatgtgcggatgaaatatcttttcttttcctggttagtggtttttgttggaagctggattatatatgtgcagtattctacctatacagaattatgcagaggaaaggactgtaagaaaataatatgtgacaagtacaagactggagttattgatgggcctgcatgtaacagcctttgtgttacagaaactctttactttggaaaatgtttatccaccaagcccaacaatcaggcaaaattgggtgaccaaggaaacctctctgaactggttaatctcatcttgacggtggctgatggagacaaagatggccaggtttccttgggagaagcaaagtcggcatgggcacttcttcaactgaatgaatttcttctcatggtgatacttcaagataaagaacatacccccaaattaatgggattctgtggtgacctctatgtgatggaaagtgttgaatatacctctctttatggaataagccttccttgggtcattgaactttttattccatctgggttcagaagaagcatggatcagctgttcacaccatcatggccaagaaaggccaaaatagccataggacttctagaatttgtggaagatgttttccatggcccctacggaaatttcctcatgtgcgatactagtgccaaaaacctaggatataatgataagtatgatttgaaaatggtggatatgagaaaaattgtgccagagacaaacctgaaagaacttattaaggatcgtcactgtgagtctgatttggactgtgtctatggcacagattgtagaactagctgtgatcagagtacaatgaagtgtacttcagaagtgatacaaccaaacttggcaaaagcttgtcagttactcaaagactacctactgcgtggtgctccaagtgaaattcgtgaagaattagaaaagcagctttattcttgtattgctctcaaagtcacagcaaatcaaatggaaatggaacattctttgatactaaataacctaaaaacattattgtggaagaaaatttcctacactaatgactcttagttcatttggacataattaccattttaagaaacctgccacttttaaagaacaattttgagcattaaaaaaaaatggcttcaaattccggccagttacacaaaactccttccccccaggcctgagaagccatcagtatgtgatcactgaagtaatggcaggtgtaggatcaacaggtccccaagatgtcattcctgcccttttagaagccctgttacatctccgaagtacattcattgtgtaactattttgactgactttaaaaaccaatgctgtgaaaagcttcattccataaacatcaacagtgagtgatttgtagatttaccttagccaaaataccaatgctggaagcattgtgtttgcattgaagctgctgttcaacaagaaaatttataaatttactaatgtcttagcatggtaaagtttgcacattaacagaaattaagactgcaaagcaggttaaacttgcttctttataaaacagatgttgggttaatagcatggtttactgtattaaagacttatacacccatttttaacctcattcagacatcaagttatgtgtagcttcacaatggttcaagtggcttacttcaagaaatcttatacttgacagtacaccaattttattgactaaaaatggatgaactttcctaaagattcaaagggcccatcttagtatcacgcagctgactgagcccttcaaaactgacatcttaaggcccaatcaagatccacatatcctgattttgaactatgtgaaagtgggactgtaagtgcaagactaaaataaattatagcagactttttagtaataactttccattttcaaacagtatatcctgtgggccaaagggctatttcttaaagaggcatgtaaatgtatttatttatctaatgtttttttccccatgtaaacttgatatacaaggtttagtatttgctcctctttcatattattttcacacgtatactcagatttggcatgtacctttcaacatctccataaaattaaacaccttttggagaaaagaaccactattttctgctcaaaggtttcgcctacctaaagtggaacatgttaaaaatctatgtgaccatcactggacagctttctctcaaaactttccttcaacgccatggattagcaccagttttgtttactttaaggtacttttcccattcatcatctggttataataaatggatggaagaaatatttccca

SEQ ID NO: 7168 - DNA, 2468 bp, Homo sapiens
  source 1..2468: mol_type = unassigned DNA; mol_type = unassigned DNA
agggggcggggaggcggggggaggcggggagcccggccgccagcgctcgggtccgcctctgactgcagcgcggcggggcgatgtgtgattaccatggcgaggagtctctgtccgggggcctggctaaggaaaccctattacctccagtgtgacaagtacaagactggagttattgatgggcctgcatgtaacagcctttgtgttacagaaactctttactttggaaaatgtttatccaccaagcccaacaatcagatgtatttagggatttgggataatctaccaggtgttgtgaaatgtcaaatggaacaagcgcttcatcttgattttggaactgaattggaaccaagaaaagaaatagtgctatttgataagccaactagaggaactactgtacaaaaatttaaagaaatggtctatagtctctttaaggcaaaattgggtgaccaaggaaacctctctgaactggttaatctcatcttgacggtggctgatggagacaaagatggccaggtttccttgggagaagcaaagtcggcatgggcacttcttcaactgaatgaatttcttctcatggtgatacttcaagataaagaacatacccccaaattaatgggattctgtggtgacctctatgtgatggaaagtgttgaatatacctctctttatggaataagccttccttgggtcattgaactttttattccatctgggttcagaagaagcatggatcagctgttcacaccatcatggccaagaaaggccaaaatagccataggacttctagaatttgtggaagatgttttccatggcccctacggaaatttcctcatgtgcgatactagtgccaaaaacctaggatataatgataagtatgatttgaaaatggtggatatgagaaaaattgtgccagagacaaacctgaaagaacttattaaggatcgtcactgtgagtctgatttggactgtgtctatggcacagattgtagaactagctgtgatcagagtacaatgaagtgtacttcagaagtgatacaaccaaacttggcaaaagcttgtcagttactcaaagactacctactgcgtggtgctccaagtgaaattcgtgaagaattagaaaagcagctttattcttgtattgctctcaaagtcacagcaaatcaaatggaaatggaacattctttgatactaaataacctaaaaacattattgtggaagaaaatttcctacactaatgactcttagttcatttggacataattaccattttaagaaacctgccacttttaaagaacaattttgagcattaaaaaaaaatggcttcaaattccggccagttacacaaaactccttccccccaggcctgagaagccatcagtatgtgatcactgaagtaatggcaggtgtaggatcaacaggtccccaagatgtcattcctgcccttttagaagccctgttacatctccgaagtacattcattgtgtaactattttgactgactttaaaaaccaatgctgtgaaaagcttcattccataaacatcaacagtgagtgatttgtagatttaccttagccaaaataccaatgctggaagcattgtgtttgcattgaagctgctgttcaacaagaaaatttataaatttactaatgtcttagcatggtaaagtttgcacattaacagaaattaagactgcaaagcaggttaaacttgcttctttataaaacagatgttgggttaatagcatggtttactgtattaaagacttatacacccatttttaacctcattcagacatcaagttatgtgtagcttcacaatggttcaagtggcttacttcaagaaatcttatacttgacagtacaccaattttattgactaaaaatggatgaactttcctaaagattcaaagggcccatcttagtatcacgcagctgactgagcccttcaaaactgacatcttaaggcccaatcaagatccacatatcctgattttgaactatgtgaaagtgggactgtaagtgcaagactaaaataaattatagcagactttttagtaataactttccattttcaaacagtatatcctgtgggccaaagggctatttcttaaagaggcatgtaaatgtatttatttatctaatgtttttttccccatgtaaacttgatatacaaggtttagtatttgctcctctttcatattattttcacacgtatactcagatttggcatgtacctttcaacatctccataaaattaaacaccttttggagaaaagaaccactattttctgctcaaaggtttcgcctacctaaagtggaacatgttaaaaatctatgtgaccatcactggacagctttctctcaaaactttccttcaacgccatggattagcaccagttttgtttactttaaggtacttttcccattcatcatctggttataataaatggatggaagaaatatttccca

SEQ ID NO: 7169 - DNA, 865 bp, Homo sapiens
  source 1..865: mol_type = unassigned DNA; mol_type = unassigned DNA
agggggcggggaggcggggggaggcggggagcccggccgccagcgctcgggtccgcctctgactgcagcgcggcggggcgatgtgtgattaccatggcgaggagtctctgtccgggggcctggctaaggaaaccctattacctccaggctcgcttctcatatgtgcggatgaaatatcttttcttttcctggttagtggtttttgttggaagctggattatatatgtgcagtattctacctatacagaattatgcagaggaaaggactgtaagaaaataatatgtgacaagtacaagactggagttattgatgggcctgcatgtaacagcctttgtgttacagaaactctttactttggaaaatgtttatccaccaagcccaacaatcagatgtatttagggatttgggataatctaccaggtgttgtgaaatgtcaaatggaacaagcgcttcatcttgattttggaactgaattggaaccaagaaaagaaatagtgctatttgataagccaactagaggaactactgtacaaaaatttaaagaaatggtctatagtctctttaaggaccagcaccggtaattgtgccaaacttttgcgaagcactgctccagacagcaatcagtgatgccaaacgtcggtttgttcggaacacgctatgtcccacttcgaaaacctagcctcaaataacaactacgtacctctctcgcttcccatgttatgtttttcaaaagcctaaattacctgccacaaagcttaactgggcaagagcacattcagcagtaattcccccactaaaacagcactgttccccatcagctaaagcaacatttcatcccacccttggggccctaccccaataatt

SEQ ID NO: 7170 - DNA, 2646 bp, Homo sapiens
  source 1..2646: mol_type = unassigned DNA
aatgcaaagaggatcctattgtgcagctttacactttgcaagttgatatgcaaagagtaacttatttttaatatatcttaacccttctccagtcatttctcctttaacaattgttagcgtctcctcagtttccagaatatctattcggtgaaacatttggttcgctgaacaagaggaacataaagccctggctcgcttctcatatgtgcggatgaaatatcttttcttttcctggttagtggtttttgttggaagctggattatatatgtgcagtattctacctatacagaattatgcagaggaaaggactgtaagaaaataatatgtgacaagtacaagactggagttattgatgggcctgcatgtaacagcctttgtgttacagaaactctttactttggaaaatgtttatccaccaagcccaacaatcagatgtatttagggatttgggataatctaccaggtgttgtgaaatgtcaaatggaacaagcgcttcatcttgattttggaactgaattggaaccaagaaaagaaatagtgctatttgataagccaactagaggaactactgtacaaaaatttaaagaaatggtctatagtctctttaaggcaaaattgggtgaccaaggaaacctctctgaactggttaatctcatcttgacggtggctgatggagacaaagatggccaggtttccttgggagaagcaaagtcggcatgggcacttcttcaactgaatgaatttcttctcatggtgatacttcaagataaagaacatacccccaaattaatgggattctgtggtgacctctatgtgatggaaagtgttgaatatacctctctttatggaataagccttccttgggtcattgaactttttattccatctgggttcagaagaagcatggatcagctgttcacaccatcatggccaagaaaggccaaaatagccataggacttctagaatttgtggaagatgttttccatggcccctacggaaatttcctcatgtgcgatactagtgccaaaaacctaggatataatgataagtatgatttgaaaatggtggatatgagaaaaattgtgccagagacaaacctgaaagaacttattaaggatcgtcactgtgagtctgatttggactgtgtctatggcacagattgtagaactagctgtgatcagagtacaatgaagtgtacttcagaagtgatacaaccaaacttggcaaaagcttgtcagttactcaaagactacctactgcgtggtgctccaagtgaaattcgtgaagaattagaaaagcagctttattcttgtattgctctcaaagtcacagcaaatcaaatggaaatggaacattctttgatactaaataacctaaaaacattattgtggaagaaaatttcctacactaatgactcttagttcatttggacataattaccattttaagaaacctgccacttttaaagaacaattttgagcattaaaaaaaaatggcttcaaattccggccagttacacaaaactccttccccccaggcctgagaagccatcagtatgtgatcactgaagtaatggcaggtgtaggatcaacaggtccccaagatgtcattcctgcccttttagaagccctgttacatctccgaagtacattcattgtgtaactattttgactgactttaaaaaccaatgctgtgaaaagcttcattccataaacatcaacagtgagtgatttgtagatttaccttagccaaaataccaatgctggaagcattgtgtttgcattgaagctgctgttcaacaagaaaatttataaatttactaatgtcttagcatggtaaagtttgcacattaacagaaattaagactgcaaagcaggttaaacttgcttctttataaaacagatgttgggttaatagcatggtttactgtattaaagacttatacacccatttttaacctcattcagacatcaagttatgtgtagcttcacaatggttcaagtggcttacttcaagaaatcttatacttgacagtacaccaattttattgactaaaaatggatgaactttcctaaagattcaaagggcccatcttagtatcacgcagctgactgagcccttcaaaactgacatcttaaggcccaatcaagatccacatatcctgattttgaactatgtgaaagtgggactgtaagtgcaagactaaaataaattatagcagactttttagtaataactttccattttcaaacagtatatcctgtgggccaaagggctatttcttaaagaggcatgtaaatgtatttatttatctaatgtttttttccccatgtaaacttgatatacaaggtttagtatttgctcctctttcatattattttcacacgtatactcagatttggcatgtacctttcaacatctccataaaattaaacaccttttggagaaaagaaccactattttctgctcaaaggtttcgcctacctaaagtggaacatgttaaaaatctatgtgaccatcactggacagctttctctcaaaactttccttcaacgccatggattagcaccagttttgtttactttaaggtacttttcccattcatcatctggttataataaatggatggaagaaatatttccca

SEQ ID NO: 7171 - DNA, 2475 bp, Homo sapiens
  source 1..2475: mol_type = unassigned DNA
aaagcagccaatgggagagccgaggcggggaggtgcggccaatggcgcgggcctgtttgattcaaaggttgcctataaagcgggactgcacgccggtttttgtccgagggctgtcgagtccgagcgccgccatggctctgctgtccgagggcctggacgaggtgcccgccgcctgcctgtcgccgtgcgggccgcccaacccgaccgagctgttcagcgagtcacggcgcctggctctggaggagctggtggcgggcggccccgaagccttcgcggccttcctgcgacgcgagcgcctggctcgtttcctgaaccccgatgaggtgcacgccattctgcgcgcggcggagaggccgggagaggagggcgcggcggcggcggcggcggccgaggactcgttcggctcctcgcacgactgctcttcgggcacctacttccccgagcagtcggacctggagccaccgctgttggagcttggctggcccgccttctaccagggcgcctaccgcggcgccacgcgtgtcgagacgcacttccagccccgcggcgctggcgaaggtggcccctacggctgcaaggacgctctgcgccagcagctccgctcggcgcgagaggtgattgcagtggtcatggacgtgttcacagacatcgacatcttcagagacctgcaagaaatatgcaggaaacagggagttgctgtgtatatccttctggaccaggctctcctctctcaatttctggatatgtgcatggatctgaaagttcatcctgaacaggaaaagttaatgacagttcggactatcacaggaaatatctactatgcaaggtcaggaactaagattattgggaaggttcacgaaaagttcacgttgattgatggcatccgcgtggcaacaggctcctacagttttacatggacggatggcaaattaaacagcagtaacttggtaattctgtctggccaagtggttgaacactttgatctggagttccgaatcctgtatgcccagtccaagcccatcagccccaaactcctgtctcacttccagagcagcaacaagtttgatcacctcaccaaccgaaaaccacagtccaaggagctcaccctgggcaacctgctgcggatgcggctggctaggctgtcaagtactcccaggaaggcggacctggacccagagatgcccgcagagggcaaggcagagcgcaagccccatgactgtgagtcctctactgttagtgaggaagactacttcagcagccacagggacgagctccagagcagaaaggccattgacgctgccactcaaacagagccaggagaggagatgccagggctgagtgtgagtgaggtgggaacacaaaccagcatcaccacagcatgtgctggtacccagactgcagtcatcaccaggatagcaagctctcaaaccacgatttggtccagatcgaccactactcagactgacatggatgagaacattctctttcctcgaggaactcaatctacagaagggtcaccagtctcaaaaatgtctgtatcgagatcttccagtttgaagtcttcctcctctgtgtcttcccaaggctctgtggcaagctccactggttctcccgcttccatcagaaccactgacttccacaatcctggctatcccaagtacctgggcaccccccacctggaactgtacttgagtgactcacttagaaacttgaacaaagagcggcaattccacttcgctggtatcaggtcccggctcaaccacatgctggctatgctgtcaaggagaacactctttactgaaaaccaccttggccttcattctggcaatttcagcagagttaatttgcttgctgttagagatgtagcactttatccttcctatcagtaactgctccgtgttcagactcctggtttcttccaggcttacagtggacatcatcagcttcctgctttaaaaaatatcttatgtccctaattgcctttcttttacctgactttgtcacctttgttgtctttgaattctttaggctgcatattattttacatgctttgttttgtcatgtatataccaggtattggttttatggtttaaacactatggatacaggggtttgttttgcacaattttaatagtcatgcactacataatgatgttttggtcaatgacagaccacgtatatgttggcagtctcataagattataatactgtatttttactataccttttctgtgtttagatacaaataccattatgttacagttgcctacagtattcagtgcagtaacatgatgtacaggtttgtagcctgttttgcatttttcttaggttgtatgctcttctgttttaaaggtttgaatcaccagcatttttgtgatcaaaatcctatttagaaaaaataaaactactttctgtttatctctttagaatatctgtgttcttagcattaaataaatataaacttgtgcttctgta

SEQ ID NO: 7172 - DNA, 2361 bp, Homo sapiens
  source 1..2361: mol_type = unassigned DNA
cgagtccgagcgccgccatggctctgctgtccgagggcctggacgaggtgcccgccgcctgcctgtcgccgtgcgggccgcccaacccgaccgagctgttcagcgagtcacggcgcctggctctggaggagctggtggcgggcggccccgaagccttcgcggccttcctgcgacgcgagcgcctggctcgtttcctgaaccccgatgaggtgcacgccattctgcgcgcggcggagaggccgggagaggagggcgcggcggcggcggcggcggccgaggactcgttcggctcctcgcacgactgctcttcgggcacctacttccccgagcagtcggacctggagccaccgctgttggagcttggctggcccgccttctaccagggcgcctaccgcggcgccacgcgtgtcgagacgcacttccagccccgcggcgctggcgaaggtggcccctacggctgcaaggacgctctgcgccagcagctccgctcggcgcgagaggtgattgcagtggtcatggacgtgttcacagacatcgacatcttcagagacctgcaagaaatatgcaggaaacagggagttgctgtgtatatccttctggaccaggctctcctctctcaatttctggatatgtgcatggatctgaaagttcatcctgaacaggaaaagttaatgacagttcggactatcacaggaaatatctactatgcaaggtcaggaactaagattattgggaaggttcacgaaaagttcacgttgattgatggcatccgcgtggcaacaggctcctacagttttacatggacggatggcaaattaaacagcagtaacttggtaattctgtctggccaagtggttgaacactttgatctggagttccgaatcctgtatgcccagtccaagcccatcagccccaaactcctgtctcacttccagagcagcaacaagtttgatcacctcaccaaccgaaaaccacagtccaaggagctcaccctgggcaacctgctgcggatgcggctggctaggctgtcaagtactcccaggaaggcggacctggacccagagatgcccgcagagggcaaggcagagcgcaagccccatgactgtgagtcctctactgttagtgaggaagactacttcagcagccacagggacgagctccagagcagaaaggccattgacgctgccactcaaacagagccaggagaggagatgccagggctgagtgtgagtgaggtgggaacacaaaccagcatcaccacagcatgtgctggtacccagactgcagtcatcaccaggatagcaagctctcaaaccacgatttggtccagatcgaccactactcagactgacatggatgagaacattctctttcctcgaggaactcaatctacagaagggtcaccagtctcaaaaatgtctgtatcgagatcttccagtttgaagtcttcctcctctgtgtcttcccaaggctctgtggcaagctccactggttctcccgcttccatcagaaccactgacttccacaatcctggctatcccaagtacctgggcaccccccacctggaactgtacttgagtgactcacttagaaacttgaacaaagagcggcaattccacttcgctggtatcaggtcccggctcaaccacatgctggctatgctgtcaaggagaacactctttactgaaaaccaccttggccttcattctggcaatttcagcagagttaatttgcttgctgttagagatgtagcactttatccttcctatcagtaactgctccgtgttcagactcctggtttcttccaggcttacagtggacatcatcagcttcctgctttaaaaaatatcttatgtccctaattgcctttcttttacctgactttgtcacctttgttgtctttgaattctttaggctgcatattattttacatgctttgttttgtcatgtatataccaggtattggttttatggtttaaacactatggatacaggggtttgttttgcacaattttaatagtcatgcactacataatgatgttttggtcaatgacagaccacgtatatgttggcagtctcataagattataatactgtatttttactataccttttctgtgtttagatacaaataccattatgttacagttgcctacagtattcagtgcagtaacatgatgtacaggtttgtagcctgttttgcatttttcttaggttgtatgctcttctgttttaaaggtttgaatcaccagcatttttgtgatcaaaatcctatttagaaaaaataaaactactttctgtttatctctttagaatatctgtgttcttagcattaaataaatataaacttgtgcttctgta

SEQ ID NO: 7173 - DNA, 6355 bp, Homo sapiens
  source 1..6355: mol_type = unassigned DNA
ggctacttagagtcgtcggcgcggcggtgggaaagcagagccgagccgggactgtccagtgggagcaggcgccccggccagcgcagacctggaggcgcacgggcgccgcaccgcacgattcggctcggggtagagcggagccgcagccccacgcgcagcccaggacccactcgccaccgccgcttcctcagcacccatggggaccaggagactttaaaggagtttggggtttcgggagcagggaaatcacggatccccgctcctggccctcgcctcgccacctcattgatgggcaaccaactggaccgcatcacccacctcaactacagcgagttgcccacaggggacccgtcggggattgaaaaggacgaactgcgggtcggggttgcctacttcttctcggatgatgaggaagacctggacgaacgcgggcagcccgacaagtttggcgtgaaggcccccccgggttgcaccccctgcccggagagccccagccgccaccaccaccacctgctgcaccagctggtcctcaacgagactcagttttccgcctttcggggccaggaatgcatcttttccaaagtgagcggtggccctcagggcgccgacctaagcgtctacgcggtcaccgcgctgccagcgctctgcgaacccggcgacctgctggagctgctgtggctgcagcccgcgccggagccgcccgcgcccgccccgcactgggccgtctacgtgggcggcgggcagatcatccacctgcaccaaggcgagatccgccaggacagcctgtatgaggcgggcgcggccaacgtgggccgggtggtgaatagctggtaccgctaccgcccgctggtggccgagctggtggtgcagaacgcctgcggccacctgggcctcaagagcgaggagatctgctggacgaactcggagagcttcgccgcctggtgccgctttggcaagcgggagttcaaggcgggaggggaggtgccggcaggcacgcagcccccgcagcagcagtactatctcaaggtgcacctgggagagaacaaggtccacaccgccaggtttcacagcctggaagacctcatccgcgagaagcgccgtatcgacgccagcggccgcctgcgagtgctccaggagctcgccgacctcgtggacgacaaggagtagccgcctaggggctgccggcccctctgcctcccccgcacctcgctcccttcccttccccgcacccggacttcgcagtcagcggttctcaacctctgccccgccccgccacgcgcgtccgccgccggtggcccgggcccgggctgcacccccgcatccccaagccagcggcaggaagtctcaggaactgccccagggccgaaagggcgccgctgcgagcgcctggctgacagccacagcggtggtgacggtgctgggagaccccgcgtgcgctttccccttgagatgtaaaccgggaacggggaaggggctgaggggagaaaggacatggccttccccgcgagtccatggccagtgactgtggcccgactcgaaaacaaccctcttctcaaaagggaccatcaccgccccgagcgtgcgcacacagaccggtcggaggcgagaactggtctctacagggcacagttcagctcctctgtggatgcgtccccagatcgcaggatttccaagaaatcgagcctgtcccttgtgcacttgggaataattccccaagacagcacttcgggattccgggttatcctgaggctgcccgggacttttccagctctccagccccaggtctcctgacattgtgttccaggctgcgggctaagccagacagtgtttgcctccggttctttccaccgtgggaagcgaacgccacccccacccgcctttgcctgcgagtctccctcgctggcagaagggaagccggcccggtcccgggaggaagatggcgctgcgaattcggtgaggacagccggccccgcccccgacaaggagctcgctcgttcacctggtgtctgggaacttgaatgtgtgaagggcgcttattgttctgaacccttgattgctccctcctcgggctgcatttcaaaaatagtcatatttttaaaggagttggaggagagggagggggaggacatggcaccattccagaaaccagcattgttacaacaccatagccagtatatttagtttggcttttcctaacatagaaatcttcaaagctggggaagtggaaataaagttttaaaaatgagagagcagttttccaactatgtcaacaaagcctatcgtgttgatgtttttattgaccattttagcaacaggctaataaaatttcaaattgaaatttttattttcatggctttaatccatgatagtttaaatactgggggccattaagagtggatgtagctaagagcttagctaacattgccttttcactctatttttctcagatattgtaagcattctgtttttcaatattgtagttaattttttggctttcaacagcagccctagtaatggtggagttgttaattaatgtgtatattgtactgaatttctgtcagttaaggggttcactgctttggtggaaattggtggaaattgctagcaggttccacgatgtttatttttttctccatgttgtatatcattaccatttcacatacgcgtttctatttttcttcctctcctcctgatctccttaaaaatgaatctagagttggtggctttttccccctcctctttggccagttccacagttcagttcttcctgaaaacagggatgatgaacttgtaggatcaggacaaatgtgtgtttttcaaaaacttaaggctgggtgtgaaacaccttctgtggacaaggatttgtaaacttctctcctccctccagctgcggccccagcctaactgatagttacttgattcagtgtgctagacacttaaatagcatctatgtctctttcaagggaatttgtcaaataatgctgtttagctaattgttgcaagcaattgcatattaacagctgtgattttgttggacagcaagtattatggccaaagccagtttcttggcatttcaaaaataatgcaataaaaactagttgaggttagctgaggctggaaatgcctttttcatggtaaatgattcacttctatatttttctttctttttctttttttttctttggttttcatcctggattcatcccctgatcttaaatcaaaacgtcagatcaatgaactatgaactaaagtatttttcttaagcctattgagtgatttattttttaaaaaatgtttaaatgcatatgcttttctttcagcacaaacaacagcaaaaacttttgtaataactaacttacctttgcatgtatgaagaactgagtcatttatttccctaacttactcctctttcaagtaacaggtggcagatcataaaatgaattctttattgtatctacacactccacattctttactgtgtcctactactgtatcttggctccctgctgtattaaacaccatcttaagcacttgttcctgcaggactccttcttgacattttgtctcccccttcaaagtcactcaaagagtgggacttcatcaaaagaaatgaattagtctctatcacaccgaatactaagatttatttcctctgatggtacatagatttctctctcactaagagggtcactctcatagaggaatgtcttgtcagttttatacttgctgaggctagactgacaataaaaatgagctgggcagttaaattagcatttgttactatattggcctataaaggatcaggttgatgataatacctctaaaaatatgcaataataaaacaatagttatgaaagaaacttgaaaggtttgcaaggtttctcctatccctgttaaaattatcatttattatctctttgtcagtgttagtaaggtaacccatgacagaataatttgagtgatagttcatcatgcagaggatatgatcaagatattacctaatggttttatcctgaaaaaggtgtatacttttagggcactgttaacaatgcgagtgaaaccaagatggtgcaagttccctttgcagatggcgtgggcacacttgatttttattatgagtgaatgtaatctttctgtattttaccagagttacagcaattacctgaaaagtttcctaacattttaataatgttagggatttcgttttggttttagttgtcctcaagagacaacaggttcacagtaatttccatgatgttgggtgtggctaagctggggattggttctgttccccctgctcccgtgtagagaaaagctatatttatactgcattctttctcaactttcaggtaaaacaaactatgatttaaaaaaagaaaaaagaaaagacaggtacttttacttcaaagagtgctttgctacatttttatttaaaccaaaaatcaaataaaataaggaggggggctgggtatactttaaacaaaaccagtcctgaaatgctgttattctcaaagtacattccaaaaaaaaaaaaaaaaaaaaactatagaatttacgtatgttacatttttaagtatgagttaaattgatataaagtgttcctcaatatttaataatgtaagctgttgtcatgacagtattttttaaaaataataacgtatattatagttacgaaacacttgtgccagattagaacatcaagcacagaagcagctgtatgatttacctgtttttttgaaactttaatgtttaccttcccctatgtttaatttttctgtggtgaacacttttgttagaacatggcttttttatttttcttggaaaaatatgctattagtatttacaaaataattaattacctgaataagcagtatatactaaaagtcttcaaacattactttattgattacttatgttttgtggtgcgctttcaacatccctaagagttaaatgtcttagtcatctaatacatggaacagggtcaaacttcaatgaaattaatacttattgcacaatcataatatagcaacctaattttcttttatttataggcatatctttaaagctttcttctcttttttgaacaaatgaagagaatccagttagtttttgcctttcagaggtgatttgccacgtgcacaaagggtctgtaggtgaaaagacaggcttttgggtttcttgaaacatcaaaaactgaatttagagaatggttatctaacactcaagtcaatgttttttttgaaattactagctattggtataatatacatatatgtacatgtatacatatacatacacacatatgtacatttacacatatgtaagtatacactcatatacatatatacacatgtatatatacttgtgtacacatacatttttgcctatagctagcaattatttcattcagatacacacacacacacacacacacacaggctacttaaaatagagagtgacttgagatatacaaaaacaggaagaaaagccctggaggtcatatagctaatgtataactgcacagcaagcagctatgtctaaagctaacaataaaaagaaaatgtgggagttgtgcaattagttttattctcattttttggaagaatatgttcctggtttctctaactaaaaggaaaaaattcaaaggaaagttgtaaatattaggaagtaactgaaaaataagaagcaagataaagtggggaggctatgagatcatataatgagctaataaacttttcaacaggggacacctgttctcccttctaactgaagacactaaagagaagctaagatcctatctttcaatcatttagtaattcataaaatcccattatttcataactcaaagtttacctttgaggttgtatgtttacctcatttgaactcgaaatagaagaggtttaagtatttgaataagttgggaaaaaaaggaaaaatagtcttccctgcccttgtcactgatggtgacactacttgtaattactgtattttttggcagaacactcagatgaacagattcctatgctgtggacttttatcattctttttgatggctgatagtagaaagcacacagtaggtactccataaatgtaagactatggcagctgtctagtacaagtgcttctcactgattcttggttaccaggaaaaccagaaagcccgtcacttgccttgcctgcaaaggcgagcctaaagaaatttctctaaccaaaattggcaggttctttccaccacaaaaggctcttggaaatataacttatggggcttaaggctaatttgagttgaagggtatttgtaatatttgatttgcttttagcagagaaaacaataaaagaatccaggaaaagtagaaaa

SEQ ID NO: 7174 - DNA, 3765 bp, Homo sapiens
  source 1..3765: mol_type = unassigned DNA; mol_type = unassigned DNA
gtcggcgcggcggtgggaaagcagagccgagccgggactgtccagtgggagcaggcgccccggccagcgcagacctggaggcgcacgggcgccgcaccgcacgattcggctcggggtagagcggagccgcagccccacgcgcagcccaggacccactcgccaccgccgcttcctcagcacccatggggaccaggagactttaaaggagtttggggtttcgggagcagggaaatcacggcccacccctcggtccttcctgggtgtccgtctcccacactgccacagccagcactctcctccccaccgggaccccgcaagctctccagccagcctgggtgttttcttctgggagttggaccgagttcccggaaggggtcggaggctgtgtggtggcgtctgctctcgcctgacctgtggcggcttctccgcccctcgtacccctggggaggcacggaggactcggctggaaagggtgactccgatccccgctcctggccctcgcctcgccacctcattgatgggcaaccaactggaccgcatcacccacctcaactacagcgagttgcccacaggggacccgtcggggattgaaaaggacgaactgcgggtcggggttgcctacttcttctcggatgatgaggaagacctggacgaacgcgggcagcccgacaagtttggcgtgaaggcccccccgggttgcaccccctgcccggagagccccagccgccaccaccaccacctgctgcaccagctggtcctcaacgagactcagttttccgcctttcggggccaggaatgcatcttttccaaagtgagcggtggccctcagggcgccgacctaagcgtctacgcggtcaccgcgctgccagcgctctgcgaacccggcgacctgctggagctgctgtggctgcagcccgcgccggagccgcccgcgcccgccccgcactgggccgtctacgtgggcggcgggcagatcatccacctgcaccaaggcgagatccgccaggacagcctgtatgaggcgggcgcggccaacgtgggccgggtggtgaatagctggtaccgctaccgcccgctggtggccgagctggtggtgcagaacgcctgcggccacctgggcctcaagagcgaggagatctgctggacgaactcggagagcttcgccgcctggtgccgctttggcaagcgggagttcaaggcgggaggggaggtgccggcaggcacgcagcccccgcagcagcagtactatctcaaggtgcacctgggagagaacaaggtccacaccgccaggtttcacagcctggaagacctcatccgcgagaagcgccgtatcgacgccagcggccgcctgcgagtgctccaggagctcgccgacctcgtggacgacaaggagtagccgcctaggggctgccggcccctctgcctcccccgcacctcgctcccttcccttccccgcacccggacttcgcagtcagcggttctcaacctctgccccgccccgccacgcgcgtccgccgccggtggcccgggcccgggctgcacccccgcatccccaagccagcggcaggaagtctcaggaactgccccagggccgaaagggcgccgctgcgagcgcctggctgacagccacagcggtggtgacggtgctgggagaccccgcgtgcgctttccccttgagatgtaaaccgggaacggggaaggggctgaggggagaaaggacatggccttccccgcgagtccatggccagtgactgtggcccgactcgaaaacaaccctcttctcaaaagggaccatcaccgccccgagcgtgcgcacacagaccggtcggaggcgagaactggtctctacagggcacagttcagctcctctgtggatgcgtccccagatcgcaggatttccaagaaatcgagcctgtcccttgtgcacttgggaataattccccaagacagcacttcgggattccgggttatcctgaggctgcccgggacttttccagctctccagccccaggtctcctgacattgtgttccaggctgcgggctaagccagacagtgtttgcctccggttctttccaccgtgggaagcgaacgccacccccacccgcctttgcctgcgagtctccctcgctggcagaagggaagccggcccggtcccgggaggaagatggcgctgcgaattcggtgaggacagccggccccgcccccgacaaggagctcgctcgttcacctggtgtctgggaacttgaatgtgtgaagggcgcttattgttctgaacccttgattgctccctcctcgggctgcatttcaaaaatagtcatatttttaaaggagttggaggagagggagggggaggacatggcaccattccagaaaccagcattgttacaacaccatagccagtatatttagtttggcttttcctaacatagaaatcttcaaagctggggaagtggaaataaagttttaaaaatgagagagcagttttccaactatgtcaacaaagcctatcgtgttgatgtttttattgaccattttagcaacaggctaataaaatttcaaattgaaatttttattttcatggctttaatccatgatagtttaaatactgggggccattaagagtggatgtagctaagagcttagctaacattgccttttcactctatttttctcagatattgtaagcattctgtttttcaatattgtagttaattttttggctttcaacagcagccctagtaatggtggagttgttaattaatgtgtatattgtactgaatttctgtcagttaaggggttcactgctttggtggaaattggtggaaattgctagcaggttccacgatgtttatttttttctccatgttgtatatcattaccatttcacatacgcgtttctatttttcttcctctcctcctgatctccttaaaaatgaatctagagttggtggctttttccccctcctctttggccagttccacagttcagttcttcctgaaaacagggatgatgaacttgtaggatcaggacaaatgtgtgtttttcaaaaacttaaggctgggtgtgaaacaccttctgtggacaaggatttgtaaacttctctcctccctccagctgcggccccagcctaactgatagttacttgattcagtgtgctagacacttaaatagcatctatgtctctttcaagggaatttgtcaaataatgctgtttagctaattgttgcaagcaattgcatattaacagctgtgattttgttggacagcaagtattatggccaaagccagtttcttggcatttcaaaaataatgcaataaaaactagttgaggttagctgaggctggaaatgcctttttcatggtaaatgattcacttctatatttttctttctttttctttttttttctttggttttcatcctggattcatcccctgatcttaaatcaaaacgtcagatcaatgaactatgaactaaagtatttttcttaagcctattgagtgatttattttttaaaaaatgtttaaatgcatatgcttttctttcagcacaaacaacagcaaaaacttttgtaataactaacttacctttgcatgtatgaagaactgagtcatttatttccctaacttactcctctttcaagtaacaggtggcagatcataaaatgaattctttattgtatctacacactccacattctttactgtgtcctactactgtatcttggctccctgctgtattaaacaccatcttaagcacttgtt

SEQ ID NO: 7175 - DNA, 2053 bp, Homo sapiens
  source 1..2053: mol_type = unassigned DNA
acagcggtggtgacggtgctgggagaccccgcgtgcgctttccccttgagatgtaaaccgggaacggggaaggggctgaggggagaaaggacatggccttccccgcgagtccatggccagtgactgtggcccgactcgaaaacaaccctcttctcaaaagggaccatcaccgccccgagcgtgcgcacacagaccggtcggaggcgagaactggtctctacagggcacagttcagctcctctgtggatgcgtccccagatcgcaggatttccaagaaatcgagcctgtcccttgtgcacttgggaataattccccaagacagcacttcgggattccgggttatcctgaggctgcccgggacttttccagctctccagccccaggtctcctgacattgtgttccaggctgcgggctaagccagacagtgtttgcctccggttctttccaccgtgggaagcgaacgccacccccacccgcctttgcctgcgagtctccctcgctggcagaagggaagccggcccggtcccgggaggaagatggcgctgcgaattcgaattttagagttggatctttgtctcatggatgctcttaggagacccaccaaccaccaactccttgtattgcaactggaccccctcgacctgggtgaatgtactcttttcagcaaccatatcctccctcctgttgccaggtaaggtgagaagcaattcctctgcctagaagctctgccgggtgaaatatcaggagatcccacccaagctttctcttgcgtgtagcctatatccagcacgggagcataggctaatcctgcagttggccagcctcttgtcctctggatatcctgggatggaatcctaatgaaggaaactccagtggtttactgaagccctttgtgctaggcctgaggtgagatagaattgctccatcctatgcccaggaggcctgcgtggactcacagtgcaccaccatcctcagaaatcctctctccctgtaggctgtggtctgaatctttgtgtcttcccaaaattcatatgttgaaatcctaacgccccaggtgatgatattagaagatggggcctttcaggagttgactaaaacttcagggaaaagccctcacaaatgggattagttcccttataaaataggtccaaggaaacttgctcacttctaacaccatgtgaggacacagtgagaaggcaccatctataagccagaaagcagtccctcaccagacatagatctgctggcaccttgatcttggacttctcaccctccagaactgggagaaataagtgtatattgtttataagctacacagtttatgatattatagcagcccaaacagacattgtatttcctcaatgttggtttaagagttgtctgaaccagtttcttgttatcatactgtggatgtttctagctctcactgtagcattccacctcttttctgtctcagtgacttagtcaaagcatctagttgaacactctgttatttaaagaaaccagcattcactggctgttcccagctccaggaactcaggtggattcataatttgttctgtttccttgctcttaggaaaagtactgacagctcataattggttgtatttcttaggatatttgcatttaaactagaagcaatgctttcttttcttggtataatttgtcttacatttttgaaagtaatagctattcattaaattacatttgaaaatgcaggaagaaagaaaaaattgtctataattctactactcatataaaaccactattcacatatgtgtactttcctctattaacctttcaaagcatgcctcaattttaattgtattcacacaaatacaattttatgccatacattttacttattaatatgctattagcatcaccaatgtcaatataaactccttgtaaacatcaatttaatggttgcaaagtattacatcaactggatatgccatggcttatttaatcactgtatttattgttaaatatttgcattgtttacattgtttagtattgaaaaccacgctgcaataaatatctttggataga

SEQ ID NO: 7176 - DNA, 677 bp, Homo sapiens
  source 1..677: mol_type = unassigned DNA; mol_type = unassigned DNA
gctgcgggctaagccagacagtgtttgcctccggttctttccaccgtgggaagcgaacgccacccccacccgcctttgcctgcgagtctccctcgctggcagaagggaagccggcccggtcccgggaggaagatggcgctgcgaattcggtctactggggaaggctctgtgacttgctcttttttgctgctggaaagtctaacacttgcagtaggtgctaaattagagtctattcactcaatggaggaactggggaagaacaaaacccatttaatgttttcagtgaatgcctggggtatttatatcaaagttctagtagtggccagttaatgaagatgagctcttaatttttcacaatgatctaccttagagagaaacagaggtgcatctgttggataatagtcaaggcgtctgtgtcggtaaccaggggtccaagaattttagagttggatctttgtctcatggatgctcttaggagacccaccaaccaccaactccttgtattgcaactggaccccctcgacctgggtgaatgtactcttttcagcaaccatatcctccctcctgttgccagcctatatccagcacgggagcataggctaatcctgcagttggccagcctcttgtcctctggatatcctgggatggaatcctaatgaaggaaactccagtggttt

SEQ ID NO: 7177 - DNA, 1495 bp, Homo sapiens
  source 1..1495: mol_type = unassigned DNA; mol_type = unassigned DNA
gcagcggggcaggcgcgtggccgggccgcggcgcgatgagtggggcccgggcggcgcccggggccgcgggcaacggcgcggtccgggggctgcgggtggacgggctgcccccgctgccaaagagcttgagcgggctgctgcactcggcgtcgggcggcggcgcgtctgggggctggcggcacctggagcggctgtacgcgcagaagtcgcgcatccaggacgagctgagccgcgggggcccgggcggcggcggggcccgggcggcagcgctgcccgccaagcctcccaacctggacgccgctctggcgctgctccgcaaagagatggttggtctccgccagctggacatgtccttgctctgccaactgtacagcctctacgagtcgattcaggagtacaagggggcatgccaggcagcctccagcccagactgcacttacgctctggagaacggcttcttcgatgaagaggaggaatatttccaggagcagaactccctgcacgacaggagggaccgaggccctcctcgggacttgtcactgcctgtctcctccctctccagcagcgactggattctggagtccatctagagggtcttgggagggatgtgactgttgggaagcccttcctactggacacgctgtcatcatttgctgcttctcttgcaagaaagcacctccgttgtggacggtcctcgggcacaggggatgagcgctaccagtttcatttgtaggcagggagttctccgcggatgcatggtggcagtctgctttgatggcagcagtttctgcttaggtgacctagaggtcctcagcagtatcctccacacctatttattgaggtgcacctgctggggattcataatgagaatataacaagaggatctcggtgaaaggccttagtgggtgttttgtgtgaggtggcttgtagctagctacttccttacagatggtagagtattccaatcctctttgtgttagggttcttgcttccagtttgggatgtattaaaaccaccatttcactgcttcccttcctcaatatgctctgcagcttttcttgctgtttaaacctctcgcctcagctttatttatttgtaagctgcattactaactgcccagtgattcggtgaaagctttttactgaaaaagttaacatttctagtcatcccaatcaactggcttttttcaaccaaaattttatatcattctttgtctatcagatacgagaggaaggaagataatacgaagacatgttgaatagtgaaaaaaaaaaaaagaacacaaaaactggggcaagccaatgtgatgtatcactcactgtaagatggcaaatgttttcatttttaagattccgaatgtaaactagtgtgctagaaagcaaaccacccgccactcaaaccagtaattaccttaagccttaatatatttattaaaatactttatgagaacattacactttgtaggttaaaaatgaggataaaatgctaaactatc

SEQ ID NO: 7178 - DNA, 1576 bp, Homo sapiens
  source 1..1576: mol_type = unassigned DNA; mol_type = unassigned DNA
gagggactcagcaggagagtagatctaggattccagatgatcttcttccatggtttttgagcacatactatgtgaccccgagagagtgtggctttctcgattaaagttattatttcttttatgaaatcctagcaaagatagggacgtcagagctggccgagtcagactcctgggggcatgttgatggcatccagatgcaattctgcagaggaatcctggaaaacaggagtaagtctagaggaaaggccacgggtgttagtggacgagaggtcataatgaaaataggggaagggcctgagatatttagcttggagagaagaacacaggtttggtttttgttttagggcatggggtggtggaaagtaaatgaccttcagattaaagggtagtagttaggagagagttaaattagatctgtttggatgctcagctgtcacacccagcatcaagggctctgtggggcctccaggctgggaggctttgactttgtataaaataatcgtattggtttggagaggagtgcagtggtttggaaggtcctccttttggggtttgagctgagcaatttatccacagtttctcagctggtgagtggcggagccaagatctgaacccaggcagggaggttggtctccgccagctggacatgtccttgctctgccaactgtacagcctctacgagtcgattcaggagtacaagggggcatgccaggcagcctccagcccagactgcacttacgctctggagaacggcttcttcgatgaagaggaggaatatttccaggagcagaactccctgcacgacaggagggaccgaggccctcctcgggacttgtcactgcctgtctcctccctctccagcagcgactggattctggagtccatctagagggtcttgggagggatgtgactgttgggaagcccttcctactggacacgctgtcatcatttgctgcttctcttgcaagaaagcacctccgttgtggacggtcctcgggcacaggggatgagcgctaccagtttcatttgtaggcagggagttctccgcggatgcatggtggcagtctgctttgatggcagcagtttctgcttaggtgacctagaggtcctcagcagtatcctccacacctatttattgaggtgcacctgctggggattcataatgagaatataacaagaggatctcggtgaaaggccttagtgggtgttttgtgtgaggtggcttgtagctagctacttccttacagatggtagagtattccaatcctctttgtgttagggttcttgcttccagtttgggatgtattaaaaccaccatttcactgcttcccttcctcaatatgctctgcagcttttcttgctgtttaaacctctcgcctcagctttatttatttgtaagctgcattactaactgcccagtgattcggtgaaagctttttactgaaaaagttaacatttctagtcatcccaatcaactggcttttttcaaccaaaattttatatcattctttgtctatcagatacgagaggaaggaagataatacgaagacatgttgaatagtgaaaaaaaaaaaaa

SEQ ID NO: 7179 - DNA, 983 bp, Homo sapiens
  source 1..983: mol_type = unassigned DNA; mol_type = unassigned DNA
gccatggaagctgctgattgttcttgaatttaaagtggagaataagggaccacaaattgcagggtttgagcattccatgtttttcttaaatgagcctgtctgcattttcaaaacgtgtgctttcaaaagagagctgtattttctgaatccagctgtgaatgtggagaccagccgtcctccaagggcatgcgagaacacaccgttgagatccaggctgcttctgctcggagagtggcttgctcggcggctccccagccactctttttctggaagggttggtctccgccagctggacatgtccttgctctgccaactgtacagcctctacgagtcgattcaggagtacaagggggcatgccaggcagcctccagcccagactgcacttacgctctggagaacggcttcttcgatgaagaggaggaatatttccaggagcagaactccctgcacgacaggagggaccgaggccctcctcgggacttgtcactgcctgtctcctccctctccagcagcgactggattctggagtccatctagagggtcttgggagggatgtgactgttgggaagcccttcctactggacacgctgtcatcatttgctgcttctcttgcaagaaagcacctccgttgtggacggtcctcgggcacaggggatgagcgctaccagtttcatttgtaggcagggagttctccgcggatgcatggtggcagtctgctttgatggcagcagtttctgcttaggtgacctagaggtcctcagcagtatcctccacacctatttattgaggtgcacctgctggggattcataatgagaatataacaagaggatctcggtgaaaggccttagtgggtgttttgtgtgaggtggcttgtagctagctacttccttacagatggtagagtattccaatcctctttgtgttagggttcttgcttccagtttgggatgtattaaaaccaccatttcactgcttcccttc

SEQ ID NO: 7180 - DNA, 1213 bp, Homo sapiens
  source 1..1213: mol_type = unassigned DNA
atggcagaggtgcccaaggaagcctgaggctgctctcccagtcatgacaagggcagagaggaccacaagcccatcccttccctgagaggcccttctgctgccactgtcccatgcccccgtgtcaaccccaggctgaaccccaggccctgggctggcccacagcccccagcctcacagttgccaccaccaacaaatcagagctgcccagcaagatcaggaagtgtggggaggcagcctccagctctggtgcagggctgcaggggcaggcaggctgtgaagtgcccaaggcactggcaccgtgggagagaggggggcagctgagcacccaagagtgctcctggcaagtgcatgactggctgtcggagttctgctgcagctatgtcacctggtgcagtggcccagccaccttccctgcctgctgcaggccccaaccattcccacagagcttcccttcgggcagtgccaccatccctgcacatgggctattataaacccttctacttccagtctactgtaccgggcctgacctggggacagctgctggcatcagcacccctgctccagttgcaggcctgggaccctgggctcctcatgtgtagccatcagtccaggccactccagtgatgaagggaggatctacagcccctttgagaagcccaagtgaccctcggtgacaggcaggcagagaatacattattccatccttgggccacagatttatgacagagaagatggatttctttattctttcctttgtgaaaacaacaattgtcttaagcattatgcacctcagtgggataaatgatatctctaagtttgctatgcattatataatggaagaaatagatgaagacagatcaatggaagacttgcagaaaataatggttgtggctcttatatacagattatttgtttgttttatgagataatttgcatttggggagcaggtggatctaccccagggaagttcctgctggggcttcgagttgtgacatgtgatatattagtagtgcttattgcaccaagtcaggttttagtgattccttcctcaactgttagcattacaatgtctgctatatgagctttgatcaaaaatttttgtatagcttcttttttccctgattgcatcacactgctgttttttccgcataattgaatagcctatgacattgtagcaggaaccattgtggtaaaaagaaatggggtcagatga

SEQ ID NO: 7181 - DNA, 1898 bp, Homo sapiens
  source 1..1898: mol_type = unassigned DNA
gtgggcggccccatcgcctagcaaccgggtggcagcgtcccttgagcccaggccacacagctgcacccagccctgcccggctcctcccaggcctgcaggacccctggggccctgtccttattccccagcaccgggacagccaaagctctggtcacaatgaacatcgtcttctccagggacagccaggtgagggtgatggagaataccgtggccaacaccgagaagtactttgggcagttctgctcgctgctggccgcctacacgcgcaagacggcccggctgcgggacaaggcggaccagctggtcaagcagctcatcgactttgccaactccgagaaccccgagctgcgggccaccatgaggggcttcgctgaggacctggccaaagtgcaggattaccggcaggcccaggtcgagaggctggagaccaaggtggtcaaccccctgaagctctacggggcacagatcaagcagacacgggctgagatcaagaaattcaaacatgtccaaaatcatgagatcaaacaactggaaaaactggagaaactgaggcagaagtcaccctcggatcagcaaatgatctcccaggcagagaccagagtgcagagggccgctgtggactccagccgcaccaccctccagctggaggagactgtggatggcttccagaggcagaagctcaaggacctgcagaaatttttttgtgactttgtaactattgagatggttttccatgccaaagcggtggaggtgtattctagcgccttccagaccctggagaagtatgacctggagagggatctactggattttagagccaagatgcaaggagtttatgggcattatgacactcggctgcttgccaacaccagcccccctccatctgttcttcagtctctcgccagccagggaactctgcaggtccagctgagtagggcaaatgaagaccctgaacatcctcatgccaatcatggcaggtttagtctctgtgagtgggtggttaaggggcagccagcccactgtgtgtgtgggcagggtgggcatctcatgcttccaggacattctctctaacgacgtagggtaagtgcaatcccaagccgtttaaaataatcccagactgcctggaggctttgttcttattttctgattcttttttctttgtctttgttggattgtgttaattcaaagaccttgtcttcaagctctgaatttccttcttctacttgttcaattctgttgctgagactttccagagcattttgcatttctgtgagtgtatccaatgtttcctgaagttttgattgtttttctttatgctatctatttcttggtccgagcccactgctcccggcggtgtgaccttgggaaagtctcctagcctctctgtgccttagagtcctcgcctgcagagtggcttagaacagtaacctccgtgtagggctgtgctgagtatcagatgaacagatctatacgaagcacagaaaacccggcctgttgcgcaacaaacacttgagacttgttgctgccattatcattactgatgttgctgtcgttttattattattattatttagagtgctcagagcaccatatggagcccaggaaaagaaggggaggagagtgaggacaactccatggaggaggcccccgtggaggacctcagggcactggggcagggaccccataagagagaactgcccacaacagtcagaagaacttagctggccttggatcctcaggtgggctctgctgtgtgccctcaggcaagccacgtgtcctctgagcctcagtttcctcatctgtacaacagggccaatatcactcacttcacaggttgctctgggggatcgctgtgcctggcatatagtaggtgttcaataaatgccctgtgactctca

SEQ ID NO: 7182 - DNA, 782 bp, Homo sapiens
  source 1..782: mol_type = unassigned DNA
accccctgaagctctacggggcacagatcaagcagacacgggctgagatcaagaaattcaaacatgtccaaaatcatgagatcaaacaactggaaaaactggagaaactgaggcagaagtcaccctcggatcagcaaatgatctcccaggcagagaccagagtgcagagggccgctgtggactccagccgcaccaccctccagctggaggagactgtggatggcttccagaggcagaagctcaaggacctgcagaaatttttttgtgactttgtaactattgagatggttttccatgccaaagcggtggaggtgtattctagcgccttccagaccctggagaagtatgacctggagagggatctactggattttagagccaagatgcaaggagtttatgggcattatgacactcggctgcttgccaacaccagcccccctccatctgttcttcagtctctcgccagccagagtgctcagagcaccatatggagcccaggaaaagaaggggaggagagtgaggacaactccatggaggaggcccccgtggaggacctcagggcactggggcagggaccccataagagagaactgcccacaacagtcagaagaacttagctggccttggatcctcaggtgggctctgctgtgtgccctcaggcaagccacgtgtcctctgagcctcagtttcctcatctgtacaacagggccaatatcactcacttcacaggttgctctgggggatcgctgtgcctggcatatagtaggtgttcaataaatgcc

SEQ ID NO: 7183 - DNA, 1011 bp, Homo sapiens
  source 1..1011: mol_type = unassigned DNA; mol_type = unassigned DNA
tattccccagcaccgggacagccaaagctctggtcacaatgaacatcgtcttctccagggacagccaggtgagggtgatggagaataccgtggccaacaccgagaagtactttgggcagttctgctcgctgctggccgcctacacgcgcaagacggcccggctgcgggacaaggcggaccagctggtcaagcagctcatcgactttgccaactccgagaaccccgagctgcgggccaccatgaggggcttcgctgaggacctggccaaagtgcaggattaccggcaggcccaggtcgagaggctggagaccaaggtggtcaaccccctgaagctctacggggcacagatcaagcagacacgggctgagatcaagaaattcaaacatgtccaaaatcatgagatcaaacaactggaaaaactggagaaactgaggcagaagtcaccctcggatcagcaaatgatcggccaggcagagaccagagtgcagagggccgctgtggactccagccgcaccaccctccagctggaggagactgtggatggcttccagaggcagaagctcaaggacctgcagaaatttttttgtgactttgtaactattgagatggttttccatgccaaagcggtggaggtgtattctagcgccttccagaccctggagaagtatgacctggagagggatctactggattttagagccaagatgcaaggagtttatgggcattatgacactcggctgcttgccaacaccagcccccctccatctgttcttcagtctctcgccagccagggaactctgcaggtccagctgagtagggcaaatgaagaccctgaacatcctcatgccaatcatggcaggtttagtctctgtgagtgggtggttaaggggcagccagcccactgtgtgtgtgggcagggtgggcatctcatgcttccaggacattctctctaacgacgtagggtaagtgcaatcccaagccgtttaaaataatcccagactgcctggaggc

SEQ ID NO: 7184 - DNA, 539 bp, Homo sapiens
  source 1..539: mol_type = unassigned DNA; mol_type = unassigned DNA
gatgctgtcgcccccgcgacctgtagggccttcgctggcccctcaccctcctcccgccccgggctgaggctgccgccggtttcgcgcccagtgccgaggcagcggcggagccggggaaggtcggagggagggtggtttcctcccgccccacacccagtctccgagccggatatatagagtgtcacgtttgggagccgaaagactggagccgtttccttgtggctggagcgcttcccgtagcctcggggaaggagcaggatttagaggaccactagttggaccccatcctcgtgctggaggaacagctatttgagaaagtcaaagaagtttgtccaaatgtgcatgagaagatcagagctatttatgcagatctcaatcagaatgactttgccatcagcaaagaggacatgcaggagcttctctcctgtacaaacataatatttcactgtgcagccactgtacgctttgacgacactctcagacatgctgtgcaacttaacgtcactgccacccggcagctcttgcttatggctagtcag

SEQ ID NO: 7185 - DNA, 3616 bp, Homo sapiens
  source 1..3616: mol_type = unassigned DNA; mol_type = unassigned DNA
ggcagcggcggagccggggaaggtcggagggagggtggtttcctcccgccccacacccagtctccgagccggatatatagagtgtcacgtttgggagccgaaagactggagccgtttccttgtggctggagcgcttcccgtagcctcggggaaggagcaggatttagaggaccactagttggaccccatcctcgtgctggaggaacaggaacctctttcaggagctataaaagaaagggaggaatcatgtccacaattgcagctttctatggcggcaagtccattctcatcacgggggccacaggctttctgggcaaagtgctgatggagaagctgtttcgcaccagcccagacctgaaagtcatttacatccttgtgaggcccaaggctggccagacactgcagcagagggttttccagatcctagacagtaagctatttgagaaagtcaaagaagtttgtccaaatgtgcatgagaagatcagagctatttatgcagatctcaatcagaatgactttgccatcagcaaagaggacatgcaggagcttctctcctgtacaaacataatatttcactgtgcagccactgtacgctttgacgacactctcagacatgctgtgcaacttaacgtcactgccacccggcagctcttgcttatggctagtcagatgccaaagctggaagcctttatacatatctctactgcctattcaaattgtaacctgaagcacatcgatgaagttatctatccgtgccctgtggagccaaaaaaaatcattgattcccttgagtggttagacgatgctattattgacgagattacacccaagctgatcagagattggcccaatatttatacctacaccaaggccttgggagaaatggtggtgcagcaagagagcaggaacctgaacattgccatcataaggccctccattgtgggagcaacttggcaggagcctttcccaggttgggttgataatataaatggacctaatggaatcattattgcgactgggaaagggtttcttcgggccataaaagctactccaatggctgtggcagacgtaattccagttgatacagtcgtcaatctcatgctagctgtaggatggtatactgcagttcacagacctaagtcaacattagtctaccacattacatctggtaacatgaatccctgcaattggcacaaaatgggagtccaagtcttggcaacctttgaaaaaatcccatttgagagacctttcaggaggccaaatgctaattttaccagcaacagcttcacatcacagtactggaatgcggtcagccaccgggcccctgccattatctatgactgctatctgcggctcactggaaggaagcccaggatgacaaagctcatgaatcggcttttaagaactgtttccatgttggagtatttcatcaaccggagttgggaatggagcacgtacaatacagaaatgctgatgtctgagctgagtcctgaagaccagagagtattcaactttgacgtgcgccagttgaactggttggaatacattgaaaattatgttttgggagttaaaaaatacttattgaaagaggatatggctgggatcccaaaagcaaagcaacgcttaaaaaggctccgaaatattcactacctctttaatactgccctcttccttatcgcctggcgccttctcattgcaagatctcagatggctcggaatgtctggttcttcattgtaagcttctgttataaattcctctcctactttagagcatccagcacgctcaaagtttaagagcatttagccatcgctttttatctggaacctctcagatacctctaaaacagcaaactgtgattctcaagattagaaagtaacaaggaatatgcccaaactgtcaaatgtcacctgttatgtattcgtccctattccttaactatgtatttttatttcagtgagagaaggaaagttgtaaactagcccatagtcacctatattttagggaaaaaaatccaaattgtttcctaacattctattttatgcccttgcgtattaaacgtgaaagtactcccacttttctatatttagtttttcttttctctctgagatgattcatttaaactcagtaaatatggaaagatgcatggcagaagctgaaatgagctcaagcagtactaaccttggaaccattctgggtacccaaaagaaaaatttaaaatcaagatgagtaaaaggagaatggtctcaatatcctcaaaaatgcagtaagagaagtaattccccactgaaaatgtctctctttctttctatgttataccctggagtcctggttgaggggtgggggaatcagaaaagtaggtttacatttaacatttttcttaactacattcacttcttaaaaaggaacaagaagtgtaaataagtatgtatagagtgagggattaagcatatttgcattggggactcgtgtattatgcttttaagtcaaaattaatattctcaaattcgaatttgatagctattatttctaaatctttttaatcctcaattttcctggtaaccttctttcaagagtctccttcttctaaaagttgccaaaccctttatatttaagctttttccactcaggactcaattagagtggtcaacagggagagggatggtcccatttgatctttgccactgagcaaaacaaaacttcaaatgaacttttaaactgtagctttagtcttctggtataaagtggggaagattacacttatgtgatcaccaaaggatttactagtatcttggtcattccaattgcacaatgttaactgtacaacacacagcagaaaagtgaatagacttcactaagggattctaagtttagaaaataggttttgttttcttaaaaaattttgtgtataatacaaactaatgaaaactatacatattctccaattcctatagtaataataatgtaactgttacaccaactttcctcatatttgagagatgagtacatgttggattgcagcatttcttcatgttaaaaacatggaatattattcaaatatagtacttggggcctaaacaactaaaattagtcaccgcataactagttgaaaatggcataggcataaaatgttaataaagaatggcagttatatttatgctcacttcctggagtaattgggtaatattcagaaaggcacatcgtggtagtttaagtgtacaaggccttagggcagtatctagcccagtattattccagattctcctgagctctatataaagggcattttggaggaactcttctgggcaatatctttcccaatctcatctaaattctgggaaatattttccatagcagacaacccagctctgaaactaagcacctggtgatctttagtttgagatgtctatatggtacttttgagttatatcaattaagatacaagctatagacatgataaaaatatgaaatcaagatatagctcagtgggattggattaagacataataatagttctaagaattcacttttgattgtatgttttaccaattcaataattccactaatcaagtattcacattttgacttttgattaaataaaaatttgaattaaaatta

SEQ ID NO: 7186 - DNA, 871 bp, Homo sapiens
  source 1..871: mol_type = unassigned DNA; mol_type = unassigned DNA
gagccggggaaggtcggagggagggtggtttcctcccgccccacacccagtctccgagccggatatatagagtgtcacgtttgggagccgaaagactggagccgtttccttgtggctggagcgcttcccgtagcctcggggaaggagcaggatttagaggaccactagttggaccccatcctcgtgctggaggaacagtgtccttgcatgaggagtgcctctgcccggctgctgccccatctgggaagtgaggagcacctctgcccagctgccaccccatctgggatgtgaggagcgcctctgcccggctgcccaaccatctgggaagtgtggagcgcctctgcccagctgcccactgtctgggatgtgaggagtgcctctgcccagctgccgccccatctggcaagtgaggagtgcctttgccggcctgccaaccgcctgtgaagtgaggagcacctctgcctggccgccaaccatgtgggaagtgatgagggcctctgcccagctgctgccccatctggcatgtgaggagcacctcggactgactgcccaccatccaggaagtgagaagtgcctctgcccagctgcccactgtctgggaactgaggagcacctctgcccggccgctgccctgtctagtaagtgaagagtgtctctgcctggccgccaccccatctgggaagtgaggagcgtctctgccctgccgcccaactgactggtaagtgaggagtgcctctgcccggccgccaaccatctgggaagtaaggagcacctctgcctggctgccgcccagtctgggaagtgaggagcgcctctgtctggccgctgcctcatctgggaagtgaggagcacctctgcccggccaccaact

SEQ ID NO: 7187 - DNA, 558 bp, Homo sapiens
  source 1..558: mol_type = unassigned DNA; mol_type = unassigned DNA
cacccagtctccgagccggatatatagagtgtcacgtttgggagccgaaagactggagccgtttccttgtggctggagcgcttcccgtagcctcggggaaggagcaggatttagaggaccactagttggaccccatcctcgtgctggaggaacaggaacctctttcaggagctataaaagaaagggaggaatcatgtccacaattgcagctttctatggcggcaagtccattctcatcacgggggccacaggctttctgggcaaagtgctgatggagaagctgtttcgcaccagcccagacctgaaagtcatttacatccttgtgaggcccaaggctggccagacactgcagcagagggttttccagatcctagacagtaagacatgctgtgcaacttaacgtcactgccacccggcagctcttgcttatggctagtcagatgccaaagctggaagcctttatacatatctctactgcctattcaaattgtaacctgaagcacatcgatgaagttatctatccgtgccctgtggagccaaaaaaaatcattgattccc

SEQ ID NO: 7188 - DNA, 567 bp, Homo sapiens
  source 1..567: mol_type = unassigned DNA; mol_type = unassigned DNA
tgtggctggagcgcttcccgtagcctcggggaaggagcaggatttagaggaccactagttggaccccatcctcgtgctggaggaacaggagttcatggcctccttgatgcccagcctcctacattctagatgtccagaggctccaggcagggccagcttcatggaaatacaaaactgcaaccgcacagggccttgcacttggaagggccctgcgtttggtaatgttctgctatcaccgtctgctggcttaataattttcaaagaggctctggatcttcattttgaactgggtcctacaaattatatcctgaccccaggctgacaaacttggtctaaaactaaccaaataacagtgtttgaacagcaatcccacatttacggtgagttctccagtacaaacctgaaatttatctgctgctcacttaggtgctcttggacatgtcattcagtcttcctacatttcagtttcctcattgacaaaataaagacaacagatgacaccttctactttctttattttcaaggttgtactatctctaagtaaaaagaggtaataattgtaaaaaa

SEQ ID NO: 7189 - DNA, 2095 bp, Homo sapiens
  source 1..2095: mol_type = unassigned DNA; mol_type = unassigned DNA
cacagagcctttcaattcagcttggggtgagctgcacttcaggcatggggatataatagtgtgatgaaccattcttctgaaggttcttctgaaaagctgctggtcttgggatactgtgagagcccctctcattgctctttagaagtaatttaaatttttctgctacattgtctgctcagctcgtattctggtcatagaggaacctgaagccagagaaactagacaaaaaggaacctctttcaggagctataaaagaaagggaggaatcatgtccacaattgcagctttctatggcggcaagtccattctcatcacgggggccacaggctttctgggcaaagtgctgatggagaagctgtttcgcaccagcccagacctgaaagtcatttacatccttgtgaggcccaaggctggccagacactgcagcagagggttttccagatcctagacagtaagctatttgagaaagtcaaagaagtttgtccaaatgtgcatgagaagatcagagctatttatgcagatctcaatcagaatgactttgccatcagcaaagaggacatgcaggagcttctctcctgtacaaacataatatttcactgtgcagccactgtacgctttgacgacactctcagacatgctgtgcaacttaacgtcactgccacccggcagctcttgcttatggctagtcagatgccaaagctggaagcctttatacatatctctactgcctattcaaattgtaacctgaagcacatcgatgaagttatctatccgtgccctgtggagccaaaaaaaatcattgattcccttgagtggttagacgatgctattattgacgagattacacccaagctgatcagagattggcccaatatttatacctacaccaaggccttgggagaaatggtggtgcagcaagagagcaggaacctgaacattgccatcataaggccctccattgtgggagcaacttggcaggagcctttcccaggttgggttgataatataaatggacctaatggaatcattattgcgactgggaaagggtttcttcgggccataaaagctactccaatggctgtggcagacgtaattccagttgatacagtcgtcaatctcatgctagctgtaggatggtatactgcagttcacagacctaagtcaacattagtctaccacattacatctggtaacatgaatccctgcaattggcacaaaatgggagtccaagtcttggcaacctttgaaaaaatcccatttgagagacctttcaggaggccaaatgctaattttaccagcaacagcttcacatcacagtactggaatgcggtcagccaccgggcccctgccattatctatgactgctatctgcggctcactggaaggaagcccaggatgacaaagctcatgaatcggcttttaagaactgtttccatgttggagtatttcatcaaccggagttgggaatggagcacgtacaatacagaaatgctgatgtctgagctgagtcctgaagaccagagagtattcaactttgacgtgcgccagttgaactggttggaatacattgaaaattatgttttgggagttaaaaaatacttattgaaagaggatatggctgggatcccaaaagcaaagcaacgcttaaaaaggctccgaaatattcactacctctttaatactgccctcttccttatcgcctggcgccttctcattgcaagatctcagatggctcggaatgtctggttcttcattgtaagcttctgttataaattcctctcctactttagagcatccagcacgctcaaagtttaagagcatttagccatcgctttttatctggaacctctcagatacctctaaaacagcaaactgtgattctcaagattagaaagtaacaaggaatatgcccaaactgtcaaatgtcacctgttatgtattcgtccctattccttaactatgtatttttatttcagtgagagaaggaaagttgtaaactagcccatagtcacctatattttagggaaaaaaatccaaattgtttcctaacattctattttatgcccttgcgtattaaacgtgaaagtactccca

SEQ ID NO: 7190 - DNA, 1787 bp, Homo sapiens
  source 1..1787: mol_type = unassigned DNA; mol_type = unassigned DNA
aggttcttctgaaaagctgctggtcttgggatactgtgagagcccctctcattgctctttagaagtaatttaaatttttctgctacattgtctgctcagctcgtattctggtcatagaggaacctgaagccagagaaactagacaaaaagctatttgagaaagtcaaagaagtttgtccaaatgtgcatgagaagatcagagctatttatgcagatctcaatcagaatgactttgccatcagcaaagaggacatgcaggagcttctctcctgtacaaacataatatttcactgtgcagccactgtacgctttgacgacactctcagacatgctgtgcaacttaacgtcactgccacccggcagctcttgcttatggctagtcagatgccaaagctggaagcctttatacatatctctactgcctattcaaattgtaacctgaagcacatcgatgaagttatctatccgtgccctgtggagccaaaaaaaatcattgattcccttgagtggttagacgatgctattattgacgagattacacccaagctgatcagagattggcccaatatttatacctacaccaaggccttgggagaaatggtggtgcagcaagagagcaggaacctgaacattgccatcataaggccctccattgtgggagcaacttggcaggagcctttcccaggttgggttgataatataaatggacctaatggaatcattattgcgactgggaaagggtttcttcgggccataaaagctactccaatggctgtggcagacgtaattccagttgatacagtcgtcaatctcatgctagctgtaggatggtatactgcagttcacagacctaagtcaacattagtctaccacattacatctggtaacatgaatccctgcaattggcacaaaatgggagtccaagtcttggcaacctttgaaaaaatcccatttgagagacctttcaggaggccaaatgctaattttaccagcaacagcttcacatcacagtactggaatgcggtcagccaccgggcccctgccattatctatgactgctatctgcggctcactggaaggaagcccaggatgacaaagctcatgaatcggcttttaagaactgtttccatgttggagtatttcatcaaccggagttgggaatggagcacgtacaatacagaaatgctgatgtctgagctgagtcctgaagaccagagagtattcaactttgacgtgcgccagttgaactggttggaatacattgaaaattatgttttgggagttaaaaaatacttattgaaagaggatatggctgggatcccaaaagcaaagcaacgcttaaaaaggctccgaaatattcactacctctttaatactgccctcttccttatcgcctggcgccttctcattgcaagatctcagatggctcggaatgtctggttcttcattgtaagcttctgttataaattcctctcctactttagagcatccagcacgctcaaagtttaagagcatttagccatcgctttttatctggaacctctcagatacctctaaaacagcaaactgtgattctcaagattagaaagtaacaaggaatatgcccaaactgtcaaatgtcacctgttatgtattcgtccctattccttaactatgtatttttatttcagtgagagaaggaaagttgtaaactagcccatagtcacctatattttagggaaaaaaatccaaattgtttcctaacattctattttatgcccttgcgtattaaacgtgaaagtactccc

SEQ ID NO: 7191 - DNA, 803 bp, Homo sapiens
  source 1..803: mol_type = unassigned DNA; mol_type = unassigned DNA
catgtccacaattgcagctttctatggcggcaagtccattctcatcacgggggccacaggctttctgggcaaagtgctgatggagaagctgtttcgcaccagcccagacctgaaagtcatttacatccttgtgaggcccaaggctggccagacactgcagcagagggttttccagatcctagacagtaagtttgaaagctactgatgcgaagattgctctgggcagttataaagggaaatgagttgtatgcagttattcatctgcaatgctatttgagaaagtcaaagaagtttgtccaaatgtgcatgagaagatcagagctatttatgcagatctcaatcagaatgactttgccatcagcaaagaggacatgcaggagcttctctcctgtacaaacataatatttcactgtgcagccactgtacgctttgacgacactctcagacatgctgtgcaacttaacgtcactgccacccggcagctcttgcttatggctagtcagatgccaaagctggaagcctttatacatatctctactgcctattcaaattgtaacctgaagcacatcgatgaagttatctatccgtgccctgtggagccaaaaaaaatcattgattcccttgagtggttagacgatgctattattgacgagattacacccaagctgatcagagattggcccaatatttatacctacaccaaggccttgggagaaatggtggtgcagcaagagagcaggaacctgaacattgccatcataaggccctccattgtgggagcaacttggcaggagcctttccca

SEQ ID NO: 7192 - DNA, 425 bp, Homo sapiens
  source 1..425: mol_type = unassigned DNA; mol_type = unassigned DNA
ctgagtcctgaagaccagagagtattcaactttgacgtgcgccagttgaactggttggaatacattgaaaattatgttttgggagttaaaaaatacttattgaaagaggatatggctgggatcccaaaagcaaagcaacgcttaaaaaggctccgaaatattcactacctctttaatactgccctcttccttatcgcctggcgccttctcattgcaagatctcagatggctcggaatgtctggttcttcattatgtagtttcacttatttccttcaggctttttatcagcaagaagcaatgtctgattttgataccacccatttgctatgaaaatataagaaggcgtcatcttcaaagcaacactccagttgggcttcttcatcgtttagctgcatgatttcttctacgacatttgtaacagaca

SEQ ID NO: 7193 - DNA, 545 bp, Homo sapiens
  source 1..545: mol_type = unassigned DNA; mol_type = unassigned DNA
atatggctgggatcccaaaagcaaagcaacgcttaaaaaggtcctgcactccatactctaccctgtaacacagtttcatttagacttcaccacacctctatgaggctccgaaatattcactacctctttaatactgccctcttccttatcgcctggcgccttctcattgcaagatctcagatggctcggaatgtctggttcttcattgtaagcttctgttataaattcctctcctactttagagcatccagcacgctcaaagtttaagagcatttagccatcgctttttatctggaacctctcagatacctctaaaacagcaaactgtgattctcaagattagaaagtaacaaggaatatgcccaaactgtcaaatgtcacctgttatgtattcgtccctattccttaactatgtatttttatttcagtgagagaaggaaagttgtaaactagcccatagtcacctatattttagggaaaaaaatccaaattgtttcctaacattctattttatgcccttgcgtattaaacgtgaaagtactccc

SEQ ID NO: 7194 - DNA, 4926 bp, Homo sapiens
  source 1..4926: mol_type = unassigned DNA; mol_type = unassigned DNA
aagtcccgcgcagcccggggtggtgccggaagcccgtgcctgtggctccgggggaggggagggctcggtgggtccctgaagactgtcctccccgcgcgacgtcgcaggcgaagcagccccaggcaggacctcaaaaagcgacctgcagagtccgagcccctgaccgcccgcctgccgctcccggcttcgccgtgcacacgtctcccgctctccccgatattctctaagccgctttcatcatgggagaaatagagcagaggccgaccccaggatcacgactgggggccccggaaaattcggggatcagtaccttggaacgtggacagaagccgcccccaacaccttcaggaaaactcgtgtccatcaaaatccagatgctggatgacacccaggaggcatttgaagttccacaaagagctcctgggaaggtgctgctggatgcagtttgcaaccacctcaacctcgtggaaggtgactattttggcctcgagtttcctgatcacaaaaagatcacggtgtggctggatctcctaaaacccattgtgaaacagattagaaggccaaagcacgttgttgttaagtttgtggtgaaattctttccgcctgaccacacacaactccaagaagaactcacaaggtacctgttcgcgctgcaggtgaagcaggacttggctcaaggcaggttgacgtgtaatgacaccagcgcagctctcttgatttcacacattgtgcaatctgagattggggattttgatgaagccttggacagagagcacttagcaaaaaataaatacatacctcagcaagacgcactagaggacaaaatcgtggaatttcaccataaccacattggacaaacaccagcagaatcagatttccagctcctagagattgcccgtcggctagagatgtatggaatccggttgcacccggccaaggacagggaaggcacgaagatcaatctggccgttgccaacacgggaattctagtgtttcagggtttcactaagatcaatgccttcaactgggccaaggtgcggaagctgagcttcaagaggaagcgctttctcatcaagctccggccagatgccaatagtgcgtaccaggataccttggaattcctgatggccagtcgggatttctgcaagtccttctggaaaatctgtgttgaacatcatgccttctttagactttttgaagagcccaaaccaaagcccaagcccgtcctctttagccgggggtcatcatttcggttcagtggtcggactcagaagcaggttctcgactatgttaaagaaggaggacataagaaggtgcagtttgaaaggaagcacagcaagattcattctatccggagccttgcttcacagcctacagaactgaattcggaagtgctggagcagtctcagcagagcaccagccttacatttggagaaggtgccgaatctccagggggccagagctgccggcgaggaaaggaaccgaaggtttccgccggggagccggggtcgcacccgagccctgcgccgaggagaagccccgcgggtaacaagcaggcggacggagccgcctcggcgcccacggaggaagaggaggaggtcgttaaggataggacccagcagagtaaacctcagcccccgcagccaagcacaggctccctgactggcagtcctcacctttccgagctgtctgtgaactcgcaggggggagtggcccctgccaacgtgaccttgtctcccaacctgagccccgacaccaagcaggcctctcccttgatcagcccgctgctgaatgaccaggcctgcccccggacggacgatgaggatgagggccggaggaagagattcccaactgataaagcgtacttcatagctaaggaagtgtctaccaccgagcgaacatatctgaaggatctcgaagttatcacttcgtggtttcagagcacagtgagcaaagaggacgccatgccggaagcactgaaaagtctcatattcccgaattttgaacctttgcacaaatttcatactaattttctcaaggaaattgagcaacgacttgccctgtgggaaggccgctcaaatgcccaaatcagagattaccaaagaatcggcgatgtcatgctgaagaacattcagggcatgaagcacctggcggctcacctgtggaagcacagcgaggccttggaggccctggagaatggaatcaagagctcccggcggctggagaacttctgcagagactttgagctgcagaaggtgtgttacctaccgctcaacaccttcctcctgcggccactgcaccggctcatgcactacaagcaggtcctggagcggctgtgcaaacaccacccgccgagccacgccgacttcagggactgccgagccgctttggcagagatcacggagatggtggcacagctccacggtacgatgatcaagatggagaatttccagaagctgcacgaactcaagaaagatttgattggcattgacaatcttgtggttccgggaaggcctggctccttttcccttattaggactccacacttaggacaagccaggcgcatcccatgtgctccagagaggaggccattgttattagtaaaggagttcatccgtctgggcagcctcagcaagctctcggggaaggggctccagcagcgcatgttcttcctgttcaacgacgtcctgctatacacgagccgggggctgacggcctccaatcagtttaaagtccacgggcagctcccgctctatggcatgacgattgaggagagcgaagacgagtggggggtgccccactgcctgaccctccggggccagcggcagtccatcatcgtggccgccagttctcggtccgagatggagaagtgggttgaggacatccagatggccattgacctggcggagaagagcagcagccccgcccctgagttcctggccagcagcccccctgacaacaagtcccctgatgaagccaccgcggctgaccaggagtcagaggatgacctgagcgcctcgcgcacatcgctggagcgccaggccccgcaccgcggcaacacaatggtgcacgtgtgctggcaccgcaacaccagcgtctccatggtggacttcagcatcgcagtggagaatcagttgtctggaaacctgctgaggaaattcaaaaacagcaacgggtggcagaagctgtgggtggtgttcacaaacttctgcctgttcttctacaaatcacaccaggacaatcatccccttgccagcctgcctctgctcggctactcgctcaccatcccctctgagtccgagaacatccagaaagactacgtgttcaagctgcacttcaagtcccacgtctactacttcagggcggaaagcgagtacacgttcgaaaggtggatggaagtgatccgcagtgccaccagctctgcctcgcgaccccacgtgttgagtcacaaagagtctcttgtgtattgatggccggacacactcgtttccgcagtggctgctttcctggaagacgtttcctttcttctgtattaatgaagcctggtaaaattaacacctgtctgaaaatcaaaaacatggcttcccagcagctctcctgtctccacagccgcgttttttaaccccgacctctcagcgtctgaatgaacagcgctcccacctccagtcctggcatccgctgggggcgctgttctttagctagtgccagtattaaaacattgtcattacgagagtgccaaatgacatcttccctccaccctgcccctgaaaaacagtacacacacatccgttcaacacaagacagggcaagtgtttttcttcctaaaaaaagttctttcttttattattttcacctattggctgctgcattttacgaagtggacttcccggtgtttgtttgtttgtttgcaatacactcagtgcagccttaagcaaatgagatcattttcagatttcattttttttttcagtctttctacttttgtaataataggaagttagtaggactcacttctctgattaataagcaatttgcagcacacagcgttccactgcggggtttcacgctcacctgaaaacacctgttcccaacctacttcttggtgcaagttgaccaaatcgttttaagtggtaactctttccaaccgtagcagggttgttttctgttaagcaaagccgagatccagtgcaatacctggactgtcaccgtcctgtgagtggtgtacacaatgggaagataataagccgtggtgttttgctgtctgtctgtgtcacaagcatgaaaacccgtgtgtcattgatcagcaccatttgtggtatgttccgtgatgagcgtttagtgagcctgctggctgcagagcactatgaaatcatggtacgtagtccccggcacctgtcgttattcctatatcctcctgcaactgtggtttgaaactgcgcattctctagtagtatatatcgtgcctgtcttcaaaaacatttccctttttatactcattccccccaggcatggggtagtgtcagtcggactgcacagggaacacggtttccagtggctttggcccctactcgggaaacgtctgcctgttctcgatggtgatggggtggctgccattcccttggttttcctaagccctttctaacgagagtctcaaacaagcggaggcgagggccaattcaaccccattctttccagcgccccgcaccatagcacctgcccacctgagaaccaggaacgcaccctctctgtggagctctgactggtgtagctggaaacaaacagcaacttgcaaacggacgaagagcctgccgtgtgttaatcatttgccttacaagatgtaccagacggtttccagtactaacaaagggaataaaaatacctcacgccacaatccagcatattgatgttttaaggcaaaacaaccaa

SEQ ID NO: 7195 - DNA, 433 bp, Homo sapiens
  source 1..433: mol_type = unassigned DNA; mol_type = unassigned DNA
gcggccgctgcccgctttgcgccgctcctccctgcgcgagtagcgctggccccggcgtcgaggcggccatggcgacccggagcccgctccccacccaccccgcctgctccgccctcccctccgccccgcgccacctttgatggctcggacctcagccggccaccgccagccctgctcgcgcgcccgcgccgccgccgcccgcgggtattaatagccggcgccgccgcgccctcggccgccgggggcttgggagccgccgatcccggagcccgagccgggagagggagccgccgcagccgccggcgctgtggagatggagtcttgctcttgttgcccaggctggagtgcaatggcgtgatctcagctcaccgcaacctccacctcccaggttcaagcgattctcctgtctcgacttcccagatattctctaagc

SEQ ID NO: 7196 - DNA, 10262 bp, Homo sapiens
  source 1..10262: mol_type = unassigned DNA; mol_type = unassigned DNA
gcgacccggagcccgctccccacccaccccgcctgctccgccctcccctccgccccgcgccacctttgatggctcggacctcagccggccaccgccagccctgctcgcgcgcccgcgccgccgccgcccgcgggtattaatagccggcgccgccgcgccctcggccgccgggggcttgggagccgccgatcccggagcccgagccgggagagggagccgccgcagccgccggcgctgtggagatattctctaagccgctttcatcatgggagaaatagagcagaggccgaccccaggatcacgactgggggccccggaaaattcggggatcagtaccttggaacgtggacagaagccgcccccaacaccttcaggaaaactcgtgtccatcaaaatccagatgctggatgacacccaggaggcatttgaagttccacaaagagctcctgggaaggtgctgctggatgcagtttgcaaccacctcaacctcgtggaaggtgactattttggcctcgagtttcctgatcacaaaaagatcacggtgtggctggatctcctaaaacccattgtgaaacagattagaaggccaaagcacgttgttgttaagtttgtggtgaaattctttccgcctgaccacacacaactccaagaagaactcacaaggtacctgttcgcgctgcaggtgaagcaggacttggctcaaggcaggttgacgtgtaatgacaccagcgcagctctcttgatttcacacattgtgcaatctgagattggggattttgatgaagccttggacagagagcacttagcaaaaaataaatacatacctcagcaagacgcactagaggacaaaatcgtggaatttcaccataaccacattggacaaacaccagcagaatcagatttccagctcctagagattgcccgtcggctagagatgtatggaatccggttgcacccggccaaggacagggaaggcacgaagatcaatctggccgttgccaacacgggaattctagtgtttcagggtttcactaagatcaatgccttcaactgggccaaggtgcggaagctgagcttcaagaggaagcgctttctcatcaagctccggccagatgccaatagtgcgtaccaggataccttggaattcctgatggccagtcgggatttctgcaagtccttctggaaaatctgtgttgaacatcatgccttctttagactttttgaagagcccaaaccaaagcccaagcccgtcctctttagccgggggtcatcatttcggttcagtggtcggactcagaagcaggttctcgactatgttaaagaaggaggacataagaaggtgcagtttgaaaggaagcacagcaagattcattctatccggagccttgcttcacagcctacagaactgaattcggaagtgctggagcagtctcagcagagcaccagccttacatttggagaaggtgccgaatctccagggggccagagctgccggcgaggaaaggaaccgaaggtttccgccggggagccggggtcgcacccgagccctgcgccgaggagaagccccgcgggtaacaagcaggcggacggagccgcctcggcgcccacggaggaagaggaggaggtcgttaaggataggacccagcagagtaaacctcagcccccgcagccaagcacaggctccctgactggcagtcctcacctttccgagctgtctgtgaactcgcaggggggagtggcccctgccaacgtgaccttgtctcccaacctgagccccgacaccaagcaggcctctcccttgatcagcccgctgctgaatgaccaggcctgcccccggacggacgatgaggatgagggccggaggaagagattcccaactgataaagcgtacttcatagctaaggaagtgtctaccaccgagcgaacatatctgaaggatctcgaagttatcacttcgtggtttcagagcacagtgagcaaagaggacgccatgccggaagcactgaaaagtctcatattcccgaattttgaacctttgcacaaatttcatactaattttctcaaggaaattgagcaacgacttgccctgtgggaaggccgctcaaatgcccaaatcagagattaccaaagaatcggcgatgtcatgctgaagaacattcagggcatgaagcacctggcggctcacctgtggaagcacagcgaggccttggaggccctggagaatggaatcaagagctcccggcggctggagaacttctgcagagactttgagctgcagaaggtgtgttacctaccgctcaacaccttcctcctgcggccactgcaccggctcatgcactacaagcaggtcctggagcggctgtgcaaacaccacccgccgagccacgccgacttcagggactgccgagccgctttggcagagatcacggagatggtggcacagctccacggtacgatgatcaagatggagaatttccagaagctgcacgaactcaagaaagatttgattggcattgacaatcttgtggttccgggaagggagttcatccgtctgggcagcctcagcaagctctcggggaaggggctccagcagcgcatgttcttcctgttcaacgacgtcctgctatacacgagccgggggctgacggcctccaatcagtttaaagtccacgggcagctcccgctctatggcatgacgattgaggagagcgaagacgagtggggggtgccccactgcctgaccctccggggccagcggcagtccatcatcgtggccgccagttctcggtccgagatggagaagtgggttgaggacatccagatggccattgacctggcggagaagagcagcagccccgcccctgagttcctggccagcagcccccctgacaacaagtcccctgatgaagccaccgcggctgaccaggagtcagaggatgacctgagcgcctcgcgcacatcgctggagcgccaggccccgcaccgcggcaacacaatggtgcacgtgtgctggcaccgcaacaccagcgtctccatggtggacttcagcatcgcagtggagaatcagttgtctggaaacctgctgaggaaattcaaaaacagcaacgggtggcagaagctgtgggtggtgttcacaaacttctgcctgttcttctacaaatcacaccaggacaatcatccccttgccagcctgcctctgctcggctactcgctcaccatcccctctgagtccgagaacatccagaaagactacgtgttcaagctgcacttcaagtcccacgtctactacttcagggcggaaagcgagtacacgttcgaaaggtggatggaagtgatccgcagtgccaccagctctgcctcgcgaccccacgtgttgagtcacaaagagtctcttgtgtattgatggccggacacactcgtttccgcagtggctgctttcctggaagacgtttcctttcttctgtattaatgaagcctggtaaaattaacacctgtctgaaaatcaaaaacatggcttcccagcagctctcctgtctccacagccgcgttttttaaccccgacctctcagcgtctgaatgaacagcgctcccacctccagtcctggcatccgctgggggcgctgttctttagctagtgccagtattaaaacattgtcattacgagagtgccaaatgacatcttccctccaccctgcccctgaaaaacagtacacacacatccgttcaacacaagacagggcaagtgtttttcttcctaaaaaaagttctttcttttattattttcacctattggctgctgcattttacgaagtggacttcccggtgtttgtttgtttgtttgcaatacactcagtgcagccttaagcaaatgagatcattttcagatttcattttttttttcagtctttctacttttgtaataataggaagttagtaggactcacttctctgattaataagcaatttgcagcacacagcgttccactgcggggtttcacgctcacctgaaaacacctgttcccaacctacttcttggtgcaagttgaccaaatcgttttaagtggtaactctttccaaccgtagcagggttgttttctgttaagcaaagccgagatccagtgcaatacctggactgtcaccgtcctgtgagtggtgtacacaatgggaagataataagccgtggtgttttgctgtctgtctgtgtcacaagcatgaaaacccgtgtgtcattgatcagcaccatttgtggtatgttccgtgatgagcgtttagtgagcctgctggctgcagagcactatgaaatcatggtacgtagtccccggcacctgtcgttattcctatatcctcctgcaactgtggtttgaaactgcgcattctctagtagtatatatcgtgcctgtcttcaaaaacatttccctttttatactcattccccccaggcatggggtagtgtcagtcggactgcacagggaacacggtttccagtggctttggcccctactcgggaaacgtctgcctgttctcgatggtgatggggtggctgccattcccttggttttcctaagccctttctaacgagagtctcaaacaagcggaggcgagggccaattcaaccccattctttccagcgccccgcaccatagcacctgcccacctgagaaccaggaacgcaccctctctgtggagctctgactggtgtagctggaaacaaacagcaacttgcaaacggacgaagagcctgccgtgtgttaatcatttgccttacaagatgtaccagacggtttccagtactaacaaagggaataaaaatacctcacgccacaatccagcatattgatgttttaaggcaaaacaaccaactttgtctgtagtcttcattttctgtgtggggggggaggggggaaggggacactccagcaagggtttctaaagccccagtgttcagagtgacacagggagggcctgccccccactgttccctatgctccccccacctccaggcaggggcagagcaaacaaacagctccgggccacacagcagcatcaggctccctccagaagtcaccactcactcattcctggagacttggggacaaggcagtctcctcagctatttatttctgaatgattgattgattccaaactacttgctggacactggtggttctgacctgtgaccagcacctctgcttcctgtgtgccctcaagaaaatactagtgtgggtaacagtccatctgagtggagtttgagacacactacacatgagacacacaatgatgcagatactcgttttcttgagctttattggcccctgcatgatacagtccctgtgcttaagaacatgccctattaggtcactctgcctttgctgacacattttatagcagaaatacacaagctgtttttaaaggagggaaatataaaaaatgtttataaactgacagtgttttgccagaggaaaggtacaaaatgctacatacagaaccaaaccagccacttcacaagagcaatgcagggataaaactattggataaggaaggcagatgcacttccaagaaaatcagaacccagcaagaagtggccagtgcaccccaaaccacactggtgtccacctcattggcagcagccagccaggacacagctcaaaaacgcaggagctaccagccacccagtccacggccctcgtctcccagaggctgagtacctccccaggctgcaggctctgggcagctgagccaggagcagctcagggctggcactgagaggctactggtgacagtaaacccgtctcaaaggctgggcctggctacagaccagcagcagttgacgctgaggcaggttccagtggtagccctggtgcctgggctctctcttaatgcaggcctggaagtggcgacacaaaagccagcttccttggctaagatgcccttaaaaacattggggctgattttgtgcgtctacagaaagtaacagcccaggagagaatgtacacagaggcgagctttctaactccatcaaaccccacctcccccgacaggaaatgctgccagtcaactctaaaagaaccacttgttgctctacgggggaaggggctgagtatgatttgtctggcgactgcagagactccccgttcataccagtattcattagaacccagtccctcgagcggctcacccactgttactagcatgagactggcttcagtgctaaaaactgtgatgtcattgtccatttgtaaatctgaagaactctgtaaatcagaaaagctgctgtccgccctggctcacttaaaaatcaggtaacggcacaccctggggaacacagactcaatctgtgtgattcgcaaggacaaaactcatctttgacttatgccgccggcctcacgtaaggaaacagttccccacacagaatactccctggaaacacaaaatgaaatcttctccaattttattattcaacataacattcttgtatggagtaatgagtacaataagaattagcaactcagttctatttccccaaccaaaatatatcccttatacaaattaagagttcaacccaaatccacttctaataaaatacctcaattttagagcttaaaaaccagactgcactagcaaaccgacacaataacccactcaagcatctgtagctcagggctctgtcccctccctatagcttagaggccactagaccagcagatagctgagctacatccccaagctcacccactaacttccttgcttccaaaaatcctgtcttaactccacaagaactggcacacccacgggagatgtcaatcatcagcttcaacaaacataaaagaatgcttcatgtaccagtcaacagctgctgcacgaaccctcccactccagaaacccagagattttccccctcgccaagcaaggtcccacagcaaaccaagaaaaacagacacactggctgcctgcctagcaagcataggccccttccagagaagcaaaataactcttaaggtccccggcaaccgctacagcaatcgcacagatcagcaacctccaactgcatcatctcggtgagcaagtgcgcaagcagtccagggcgctgacctgggcactcggcagctccaggcctggggacttctccctggagtcttccaaagtgtctcatcacacacacacagccacgagtacacacgcacggccacacatacacagcaggtgccctgtcctctgaagagtcacatttcaaggagtatgcaaaataagcgtgttataaaatttatttgtgtaagcattcagacatttttaggtgggaaagatgatatgcagaatccactacaaggtgcaacagaaaatcgtattggaaaggacggtacatctggcgcagaccagcagtggcacgattccaaacaaatgtcagacgagagcgcttcatggggagaaactgaaaattataatttaaagcttcatgaggcaagatatgttccaatttaaaacactaagaaatagtaccatcgatgaaaaaggaaatcaacctctaggtgtaccaaaaggggcgtagggcaaacggggaaaatttgcatttgttgaggtacaaataggagtgttctgtaagagaggggcattaattattaatgacaaaccctgcaaatacaaaataaaacccaaatcactggtcacagaattcaaaatgtacatgtaataaaggcaaggcaatagactcaagttatggcctgtcgaatatttactccactgacgttatctacagaagcacttggccagtttgtacacagtgattccttatgcacgccgaaagggtttccgtaaaaatgacattatatacaaatctgtacacccatccaccagagcgattctccagctcccagagggagttatcaacttaaagcaggatacctgaggtttcatgtctttagttgccttatcataatcccaaatatacatttcagggtttgtttttgtttttaaagacactttcctggaatatgtgcactatggttaaaattaaaaacaaaagtaataaaataaaataaaatgatcgctggaaggagctgaccctccccacccatctgagagacttcatctggctgcagcacagtgaagactgtgtgtgtccctggacgggcgcctggcgctggggtggctcccagtggcgcacctcttcggtggagtcagcgaaggctctcgttgacttttaaaaaaggaggaggatgaagaaggaaaaaaggaaaaacaaaaccccaaatgccaaaggaatttcagtgggatgaagttcctccaccacttagagagtatctagggaaaaagagagagagagaagtcaacacatgtcatttctcatccctgtgcaaaaattcatatagtaaccaaaatcttagttttcataagaaattccaagtcatacaaaaataagtggagcaaatatcaatgtgtaagtctaattttaaaagaatgcatataaagactgagaagatcatgattcttacacaaaaactccagagcatgtcaccaaaaaccaagaatgggttcagcctccctggagagatgtgaataaaacgggaaatcatatcccttttacttacgatcaattgtcaaaaagtgaacattgatccatacatgatgacacagtaagattccagggatgcatatgcattcccgatgtgagggcaggaaacccattttggccataaaaatagtgatgcagtccaagaatctatttcctagaactgcttccgaaatatggtccaaagcaggaacaacgtgtctgcacaaagatgtctctcgggattttcgtaattacactaatttggaaacaactctgatgcccaacagtacagaatcagttaagtaaattatacaaactgaaataacagactaaaaatggtaattatctgtatttacatatatatattaaagcaatattaaaaatatgtacaagtttaaaagtacatacaaaattacagattgggcatcccttatctgaaatgcttctggctttggatctgggaatatccgcattatacttaccagtgtgcagccccaaatccgaaatctgacatgccccagagagcagttcctttgagccccatgctggcgctcaaaagtttcagattggggatttgggatattcagcctgtatatgtgcactatataagtatatttacatgaacaacttctgtatcctaaattaagtactatagaaattctaaaaaatcttctttgcactataaggtagataagagaattcagtaagtttatgacctggtatgacaacagaaggcaatgcacccaaagatgctgatgagatttgggctacagtggtgggatcatgggtaatttctgtgtcttccaaaaattctacaagattgtcttcagaagacaacaaagggtgagaacggggtcccctcatgaccacaattccctcaaccattttacaacagactccaaatcacaggtccaggagagatggctgaggatgtctttgaccaggcttatctcaaacgttccaatctagagctcctcttttcaggcatttgaaatacttggcatctctcccagagaacaaatggttacataaggtcctcccaaaagcacacattagccacggagcctaagactcaactatcaagaaatacaaatgactaaatcacgggatgagttgatgtcacacaaaagaatccaaacattaattccagctgagacagaaaggctctgaaaatgcttcagaggagaggcggctctcatttttcctacagccatccactgaaacaacatgtttggagcaaaactggcaggaagtctaagccatggccaccgtggttttggcagccatcggggtgaacgctcagtgggagcttcaggagcagggaaggaagaagtgggtaccacagccaagcctgcagagagatgataagcacctcaagaggcagctcatctgaggacagaggaggaaagagggcactcctcatcacagacaaaggaaagagagcaccaacttggcttcccccatgcatcactgcaaagtaaagttttaaacacaacacagacatcaggtagctacagacccgcccgagggtaaatagggtcaaccccagccacgatgcccagtgagcacgtaaaatgtgctgcgtctgaatggagatgtgctaagtgtaaaacacacaccaactccaaagacggtccctccaaaaatgtaaaataccttattgatgattgttgttattaatgttgaaataatactttggatctggcaggttaaaaaa

SEQ ID NO: 7197 - DNA, 13532 bp, Homo sapiens
  source 1..13532: mol_type = unassigned DNA; mol_type = unassigned DNA
cgccgggggcttgggagccgccgatcccggagcccgagccgggagagggagccgccgcagccgccggcgctgtggagatattctctaagccgctttcatcatgggagaaatagagcagaggccgaccccaggatcacgactgggggccccggaaaattcggggatcagtaccttggaacgtggacagaagccgcccccaacaccttcaggaaaactcgtgtccatcaaaatccagatgctggatgacacccaggaggcatttgaagttccacaaagagctcctgggaaggtgctgctggatgcagtttgcaaccacctcaacctcgtggaaggtgactattttggcctcgagtttcctgatcacaaaaagatcacggtgtggctggatctcctaaaacccattgtgaaacagattagaaggccaaagcacgttgttgttaagtttgtggtgaaattctttccgcctgaccacacacaactccaagaagaactcacaaggtacctgttcgcgctgcaggtgaagcaggacttggctcaaggcaggttgacgtgtaatgacaccagcgcagctctcttgatttcacacattgtgcaatctgagattggggattttgatgaagccttggacagagagcacttagcaaaaaataaatacatacctcagcaagacgcactagaggacaaaatcgtggaatttcaccataaccacattggacaaacaccagcagaatcagatttccagctcctagagattgcccgtcggctagagatgtatggaatccggttgcacccggccaaggacagggaaggcacgaagatcaatctggccgttgccaacacgggaattctagtgtttcagggtttcactaagatcaatgccttcaactgggccaaggtgcggaagctgagcttcaagaggaagcgctttctcatcaagctccggccagatgccaatagtgcgtaccaggataccttggaattcctgatggccagtcgggatttctgcaagtccttctggaaaatctgtgttgaacatcatgccttctttagactttttgaagagcccaaaccaaagcccaagcccgtcctctttagccgggggtcatcatttcggttcagtggtcggactcagaagcaggttctcgactatgttaaagaaggaggacataagaaggtgcagtttgaaaggaagcacagcaagattcattctatccggagccttgcttcacagcctacagaactgaattcggaagtgctggagcagtctcagcagagcaccagccttacatttggagaaggtgccgaatctccagggggccagagctgccggcgaggaaaggaaccgaaggtttccgccggggagccggggtcgcacccgagccctgcgccgaggagaagccccgcgggtaacaagcaggcggacggagccgcctcggcgcccacggaggaagaggaggaggtcgttaaggataggacccagcagagtaaacctcagcccccgcagccaagcacaggtccagcatcccgggctgccagaggcagcagtacttccattcctttcattgactgcagtgacgtagatagcgaatacgaccttcttagagaacaagcgtcccgatcccggtcccgatcccggtcccggtcccaaacaaatgacaattatgagggtgatctgaccagcggtgtctatctgctgtccagggaggaggggcgaagagaggctgggcgtagggcttccccgcactctgcgaagtcctcccggcctccttccggagaattccttgatgacgattcagcagacatcacctttgatatgagcgggagccctcgactcccaaggcatagctctctcatagatgaaatgttcaagggctcggctggtcacagccccctggccaccccattgtctcccagcagcagcagttcaagtccaaatatgagttgggacagaactgggtctcaaggctatgtttcggaaaatggacatgaccatagagaggggagtatgggagaagacactctcccggaccagggtcctccttatgaacgctggtcccccacctcgccaaggccatacatgcggaatcttcctggtagatgtaataagtcagagacagatccactcatccttagccaggtagcatttaccccggaggccatggatgggcttggtggccgtgggaagtgggggcaagccagcgcagctgctcccgagggtagaagcctggctaatggcacaccccccatgggtgcagcctctaaggtccctgctgtgcagtcggtgtgtgccagaggcatggcggggcagctggcacccctgcaagtgaccgagggctccaccagcagtgggactgagtccagtgagtcagactctgagatgctgatccccgggagtcagcccctcatatttggtaaccccgcagtgctgcgttccccgtccctgctgagaagccgggggtccttgggtggcctgcgtttgagtgaggaacaggaggaggatgagtgaggaacaggaggaggatgagtgaggaggccaggagccaagtcttcagcccgagcaacctggggtcacgagaccagggtttccctaaagatcatctgttctagtgactcattcatttgtagtctacatttgttagaggagattttggacaggcacatgtttgaaagagtctgcctgacttctaaaatcgttaagaaaaacaaaacttcacataagtggcttgctttccagaaaaggtgggcaagataaacagcaagtcctaatgacaagttctcaggagcttgtttattttgctggttgaaggctaggaagaaacactttattatgaatccgatcatgtgtatagtgtgttatatttatatggcaattttctgtgtatgttcaattatgcagctcaccctcctgttggttgagagtttgaactgaagcatccttgagattacagaaaagggtttcccattctccccttctttaaaaggagggctgctttgtccatgcctcatgaagtgaggaattggcactattcaaggccaaatgtaaattgatagctagttgagattatgttggtgaaatctttcgtcaagaataatgaatattttaatgggaagaatttggggttatttctgcttcccaggcttcctgtgaaatactagaaaagttgtcaaatcttcatgaattgtgatctactagggattgctggtttggtttaggtttgcattggtggatcatattgttatgttttaagaagtacaattctgcctctcagaatctcttggtgaaactgaaatcctattgagtgtggatgcagggaagagcaacaccttgaaataggcactgttgtcaccagtaggtcaacaaactaaatgcctgcctttgaattgtgtacagcgcagagaaggactgttttccagcatggttgctcttggttggtgtacagacacagtcttaccattcacactctggtgaacagtgtcctctgttgggaatagtgatacttggatgtttctctgagccagaaaaaagaaaatgtaaggagagagagattgacttctttttaaatcttgcccaccagtgtcactgcctttcacccagcattcctgcattttagattaaagagcctggttttcacttgaagtttctctgccttagctgcacgttgcaattttctgagatattttaaaaattagtgatgccgggaccctgaccctagggattttgatctcattggtcttgagtgctccttgggcttcccagctgtttgtactgggcagccagggtcacttcttacccaggctgtctcgaatctagtggaatacagtaaaagtgttagctaaatttttggcttgcttgcagagtaagaaaaacatcacaaacaaactgctttttcttgatgcctgtgatttgtacttttcagccttaggtacttttttttttgaaaaaaaaaaaaaaaaaaagataaattgtagaataaaatttttagatcctaagtaactacaaaattattgaaaagagtcctaacaaggatagctccctgatgtgccaccataccagggcctcactgggctcatcacgcgacccgatcacaagggaagcaccaggcgtgcttaggacactgagtagaatttggcagcagcatagaaaatggaggaggatcggctcgtctcattgacaaatgatatctgtccacatgaatgtccagaagtcggttttaaagagtctgaacacttaatccatttttatacagactttttttgttttgttttcctaatcatttgattcagtgcctgattgaatcaagctgattgttggatcgtttgagagttgttcattgaagtagtctatttacgccttgctttgaatttatatatttaaccagaatcacagaatttttaaactggaagggacctcagaggttcttctgggcaaaccttcatttcttctgaaaaagttaagtgactttgcataactaatacagctattgcatgacaaagctgaaactgtaacctcgtctctaggcttcacttttttaatctctgtgatatcttggtgcaataggagctttttgattcaatattttaattttggagagtcatatgaattaataattcaaatcggatgtggagactagtgatcaagtagacttaggcaattacaggccataataggtgggaagaactacttctttttatatggtgagggttttgcagttataacacatttttgcataatctgttcagacataggaaaaatgtcaatttgctatgagtgttcagtgaagtgtgagttaaacagagccaagtgtggaatcctgtggtttatctgtgaaagtggtttgttcaaatgaattttctttttccctctaattatacagcagtctggtaatgaaatacgattgagcactaggtatgaacttacacagcgtatgacaggaatcgtcaaatgtaagcatccccgagcaaaacacgcttcaatcattattttgttttgctttttcctacagcagtgatttttatctaagtattttaagagcagttgatcaatggcagtatactcagttgtgtattgatgagatttttcactttaagagttgctcatagagtttttccctcactggctttgtaccaggcaagcaacttaatttctgcttcttggccagtattcacaaaagcagcaatcctggtgtaattaatggtgcttacagtttgtttaaaggctgtttatcatacatcctgatgtgctgcgaatagtcactacttgcctcaagaggagcttgtcctatgctaataaagattctataacattggccaaagggtccgtttatacattctttgagcctggtggagcacgtttgctgaggtgatgtggtctcctcagtgtcactgtgaagagctcagtcaggaaaagccagcagcatctaccctgccaccctccaaaccttctgactttggggagactccagtcccccaggtctttacccagcctgcagatctcattctagcttaacaagggcatgcgtgtgcatgaagttgaactaagagtggaggaaggccagaggtagggttgggtgtgatactaggtagcagatattacagacttctgaatgcattcagatttccaaagggtttcctgagacctctcaaccaatctttctaggacaatagctagtgtaggggtctcctgactcaataggggacccaggccttcagataccagccactcactggctgctctgtgacgtgctatcttaagaccgtgaatggaagacaagccctatgtaaacacaaatcttaaagccactgttggctactcgagggcctccttgtgctaatatcttttgttggatattatttcaaaatatgtgaattttagacccttttgtggttgcctttgctgccgcttgttaagggcaaaataaaaacgcaagaaattcttttagcatgaagaaatacatttaatgagctccagaactcaaaataaatggcttcagctccttgaacagtcatctgtatgccattgacaatattttattagataggcgtttaattagaggaagtctgtgggccagattcttccctgcatgtgtgattcatatttggaaatttctgatttatctccccccaattgtgccatgtggcctgcacttaaaatgtaagtaattctgattttattctcaagaacttatttgaagattcaagccaagcaatgctgaaaaaagctaggcctgcaaaactaaaacatagcacgagcctctcaaaatttccaccaaatatacaaaatccagtctgctctgaatgtgcatcagaaactcaactttggttattagccctggaatttggtgccaaaaacaaaaatttggttttgttgtcaagcaatttctaaaggaagaaacaatgtaaatattaatctgtcattttaaatgttgttgaaactgccatgagtgtgcacacagctctctgtttcatacctgtaatcagtattcgcatgctttcagtccactgtttctacttaaagcattattccgtatttcagcacagaatgactttggtgaaactgtagctgttagtgagtaattgcgttacaggcagacccagtcttaaattaacaaatctgggttcccttaactatcaggtttatgttggttttatttgcttctatctggatcccttctctttgcctgggaccttattctgattagctagatttttaagagcttttaaagttacattccccagaaagactttttttctctggactttctcttttatggtctgtaaacatttctcctctgatggtcatggacttagttctaagactggccttcctctagtgtgatggtatgagtctattctattgctgctaaattttacaaattgaactgcagaagagtctttctaggtaatccctgtaacagagcaagtttctttgaaccctagccatgtatgtgtagtgttccattattggaacgctaagcatgtgggagttatttatatcttactgctcacggtcatcatcaaggtctgattacaaaaattcaaaaaattacaacctcaggcataaatttaaagaggtggccatttaaaaataatccgttgctaccatttccacttaaaatggtagctctctgatgagttttatattggctctctgttagccaagcccgtaagagcatatggagagaaaggtacgattgaatgaacttctgtgagcggcataaagacatttactctgacaacattaaagaatttactggtactgttttttttccttgttagtttaattccatctgtttctgtttaattgagtgaaacttaataaaaatggtgtctctagtgagcacatgtacacacctctcccagttgttgggatttaaaatgaagctgtgacttttaggccaaaattagcgtgacacttaatataacagttttctttctattaaaaaataatgacaaaacacacacacacacacacacacaatctgtatgatgatttggcctggagttgtagacatcacagatcaaaagtggcctggtgctagctgtttgggtatatccttgaaaagggcaactttgtcatttcctagagtaacctagagagagatttccaagcatttccccatgaacagaagtggtaaatgctgatttattgtgccatatgtgtgtttgggaggaggggagatagcgtcttgttttgaaaaaagttctcacttcataaaataaactgcacaccactccaaaaaaaaaaaaaaagatgaaacctcaagcaggaggaacttttttatttaacccctagtgaaagcaattaaacgtcttggtagatgctagggaagaattagaaaatcttcttttcctgaaagctttaaacattgaatagactctgatttattcaggatcatttcggtgtagattggccactcgacacagacatcacagcatggtagcctcgaaaccaagccttcagcatcttctcggcgcccggtgttggagtgttacttggagtggaggcagtgcatttgcatcttcatgtagtctccagatcaggttactctgatttgtcttggagtggctttctgtttgaaagtagggaagattaaaaatcaacttgccacgggatatctgatctccatgagtagttgaaagccagtctaaaaggttaactctacagggccggcgccgccagtgcggtcatggaaaatcgtgctgtgagatactggagtgtgctgctggggccaggtgcagcaattgcagaatgttgaggagtgaggagtagttagaaatcactgcaacatggaaaagcacacagaccaaggacgctaaggagggagcgaggactaccgggcaggtgtgcgtgtgtggagtaaaatgcatcggacagtgattgactccacttttgagtgagatgtggaggcggtagtggtgtgggggttgtgagggagtgagtctgctttattatgaatcaggattgatagctggccttaaagtgggaaatgatagaagggtcacttaggagcctgcagtggcatggtgaccagtctgttattactcatagatgaccttttctggctcttgaaaccaagctaacgactcctttttcttctgggcctcaaagtttctttgtaggaagtaaagcatttgtcactttccctgcagtgatttattgaaagactgaagataggtcttccttagttaaggacgcacactggctgctcgctccagaagcaccaagaatggctgatggataaatcccttacccatactcctgtttctgcctcctaaggttgctgtgaaaacctaactaaccaaacctcaccagcttggcctatattattaatcaaattcccttctgttctctctgtgtgtatatttaatactgtagataatatgttttatttaaaatttctaatacaccaaattaatttgaaatagaaaaggctggggacttcattctcatttttgtcatttgtttaatcagtttgggaaaacattttccgttgttccattgtatgcagtgtcttgtcagcatgtacctatctaggagaaaacgctttgttttcagcgttctgtctttaccctcaaagcatggtgtagcttctgttcttacactgttggagcactgtctgatgtctttttttttttttttaacactgctgaataccaatttgtacttggaatacctctttcctctagaatacagtgatcctattccccaaagtgcaagctttcatgtggaagcatcctaagtgatcgtcctgggtgatgccatatttcactaaagtgggaaaagaagaggtgaactttgctcttccaacaaggcttgcactttatactttgggcagtgcatgggagaaggggggcccttagaggtgagcaggatcactgtagctagaggagaggtctcactgaaacagaacgcatctgtgactgtagcttgcatggagagcctagacagccaaccatggatttgcctttatgttttgaatggaaacatctatttcaattgggatagaaacctttacctatgtcatatctgtaagagaatttagcttatagatatgtagatacgtgtgtgtgttgctgggtggggaagtgggtgggaatgtagaaaaggcctcacctgacttggtcccagttggcttctgatggccaaggagctgtttttcattttggtgggcacccaacatgtaggttctcacagatgctgtctggtttcttcttctctccatggcggaacaatgaagtacgtcaataaagcatggactcataccactgggaagaatgctggcttctccagtaacaatgagcttggtggttctttgagcatggaaggccaagctcatgtcacagtgtatgcacggtattaatatatctcttgttgatctaaactgaaggggcttttacttgtcctaacaggtatcatgctgtaaaaactgtccattgtaactgttctttcccactgatggctgaagctttgtcctgagtacaagatggtatttttcattggtacgaagcaccatgttcccaacccaaacactgcctccaccaccaccaccaccaccatcaccaccaccactgctactaccaacatcaccaccaccatcaccaccaccgtgttcaaacaaagcagcattctcctgtgtcttttcctcataagtaagaacaaggtagcacattcatttttccattagtgcatttcaattcttttcctgcaagttgcattgctattgcttttctgaattgcttgatgatgaactgtgaagctgatgcttagctgcttgtgaaacttttcttaaaggaactgggtctaagaagcacacatacattaccctcaacaacctcaggtatcaagaagaggaccacactgctaacatgggtaatcctataacctggcttttcttgtggaactttgtaatttctataaaataccgccagctttgcgtattccactgagccccaacttagatatcagacgctagtgagtcctgcctattcaggaagctacgtattattcagcataatactgcccttttttttgataactggctttcaaatgggataatctcaagagaggtttcattgtatcctcttagagcgtatggatttaaatagagcctttcaaaaaaatagatgaaaacctacatctctaatatatttcctacttgggccttttgagcatattctgggcacatagagagaaaatctcctatgttttagaacagaataaaagaagacaaattatggtagataagtggcacccagaagattgcaaaataaataattttatgtgggggaatattgaagaaaaagcatagaaacttttttataattgcactttaaaattttggaaaagaaaaattgagaatgcaatcagtagtctcatttttgtcagtattctgtcagatattagctattcaataagcatatcttggattactatttttttagttgtcagtttttctagtttccccctttataggaaaaaataatacctatgtggttaaaaactgagacccatttaaaaaacaggacaggtacagttaagtactagaaatgccgtttttatcacttgaaaaatagattagaaatgtttttcttttcccagaattgtgtgagtttgttttgaagccttgaataccggtacatggttaacaggcagcttgtgcccaatcccaaagcgggaagaaaggcctggctttggctcactgatgataaagtctcctcccactgcctttcagcagctctgccgaagagctgatcaagatgctgcaaacccagcttccccagaccggccaagagggaagaatgatgagcgtgttttaaattacaaagagagagcagcgcaggcagtttctggtctgggtgataaattgaaatccataaatatagcagtgctaatttgaagttccgtaattgtttgtgccatgagaatgtgtacatttgaaaggattttataaagcaattactagaaatgcctcccttgagagctgtatgactggaggtgttttcagtctgaggggggcagcataaacccaaacctcttctagatgaatggcagggtggcgggaggggtcatgaaatcatggggaagaggtgaaggatttgagagctactaacctgacatctaactgaatgcctaagaaattgcagggcaatttcaggaaataggaaaaataattttgaaaacattcaaagcctccagactttcggtgtgtgactgatcttttttctaatctctttaaacttctttccacctattgccttaatagcaggtgcttcctcttagggtccccccaaattatttacctcgagttccctaatgaaattactttgcattaatttgtcataaagggagaagtgctagaaataccgaggcattgataatttcatggagtagcaatgaatgtcagtcacagtttcctctccccgttgcccggggctgtgccttcaaagcaggtgacagactgcaaggtgtaaacaagctttataatgccatataaatcaaaccgggctcattttacctaacaacagaaccatgtttgtttgcttttttgtaaaatggactacttcagtgaaaaattgattccacgtagttctaataactctgtgaccttggacattggctttttatagacacagctcttcccacctgctggtatggacaccagtttgtacagactgttgtcacacaccctggctcaaagtcaaaagagaattttaattactcatcaagctgccaaattctactaattgcccccttgtcagcatatttcattaattgctgaaaggtaaatgagttacatattttgtttggaccacgtcacctgtacattttcaaagcctcggattgtttatcttgcaaagagagaaggggcctcttctccacagatgcagctcaaattagcaaaactgaactgtagagtttcaggcctttcccttccttaaaatgctgatagatttctagaccagactttgatatttattggcttcttggtcttgctgtttaaacacacccattgccctttctttcttaggccctataagcaaagctggagtagcgtcttgggaaaaggccaactgaccaccctaattttgtcgttccaagtctgcagagcgcacatattaagtagttgttactgacatctttaggctccgtgagtgaaatgcagcaagcctgcccccagcagcctgtgggctaatcctgagctgttccttcgtttaggtacacaggtgaccctgaagttcccactcggccctctgttttctgagtcctgtctcctctgtagcacagtggggattgttctgaaccgtggcacgccttcttggcgaggcaggctctcttatggaaccatagtctgttacctcatttcttccaactgctctgtcccctaaatgtgtgttcccaggtgcagtgcagcaagggtgctcgctgttggcctttgagagtggaggtggctgtatcggagtgtgctccccctactttttcccttgccccgagtggcagttcttttcctctctgttgccggatgctgtctagggcctgttagttgctatttccttgcctccgctccccttcccactagccttctaactaccttttattctcggctccaactctttcaatgatgaggtgaatgctttttctgttccacgtcactgcaaagtcaaggtgtccagcatgctctcacttataactgcctcacccgatctcacgcacagtgcgagagctgaaggtaagccccggatgttgccagattacggtggacaaataaaaaacaactctccaacagcaactcacaaatgcatgaaatgttttaacctctagacagactgccagaatttctctcttctaattcctacttgtagtgataacatttttctttttgtgatttttttttttttaaataatagtgtagtaccttgaaacaactgcagttctaactcattgtcaccatttctgtttgacacgttccacttcctttgcaattattgtatttagttgtgcactagtgtcaataaaattgacatttgtgaagcaa

SEQ ID NO: 7198 - DNA, 1021 bp, Homo sapiens
  source 1..1021: mol_type = unassigned DNA; mol_type = unassigned DNA
cggcgctgtggagatattctctaagccgctttcatcatgggagaaatagagcagaggccgaccccaggatcacgactgggggccccggaaaattcggggatcagtaccttggaacgtggacagaagccgcccccaacaccttcaggaaaactcgtgtccatcaaaatccagatgctggatgacacccaggaggcatttgaagttccaatggtgtcctcatcctccttcctcaaagccaccggctcctcctggacgggttgggtactgagatgctccatgaagcccaagcaccattcacatctaattgagaagtttggagaggacagaattctcactcatcttacaggctctatttcttacacaaactgggctggaagtagaagcttagcggtcacagtcactgaagagcttcttaatcttttttgagtcaggacttgaagtcctgtttcattatttcattcaaagaaattgattggcaatggccagagttaaattcaaaggtgacattaacacatttcagtgcccaataagtgatttttctgctgggtaggagtagatacagatgtgatctcagatacgtgaagctgcatacagaggggcccatccactcctaaacgggtctccaggaggcttggtttgatctactagatttggtgcctcttaaagggaagcaatacagcttttctgctgtgggttgtttgccactaggggaagattcatttctattccagccataaattagaccaaagagagggatttggtttattgctagtgcagaagttaaaaaccatcttcctttcctgagtggtctcttaattagattctttagtttttaaatgttaactggaattgctgaagtttaattcctgaaagggtttagtttttaaaaggagtacctcatttaccatattactgtgttctgagaaatctacagtaatttttgtgtaacttttttattcaaagaatggattgttaattgtaaagccatttagaaaggcgaataaagtcagatctactttaa

SEQ ID NO: 7199 - DNA, 747 bp, Homo sapiens
  source 1..747: mol_type = unassigned DNA; mol_type = unassigned DNA
attccaggccatagcgaaccggtggtgctcatcctaaaacacaggcgcttgaaatgcgtatttaaaagcaacacacgcgcagtgcagaaaacaaaaacagatacaagcaaaaaatattctctaagccgctttcatcatgggagaaatagagcagaggccgaccccaggatcacgactgggggccccggaaaattcggggatcagtaccttggaacgtggacagaagccgcccccaacaccttcaggaaaactcgtgtccatcaaaatccagatgctggatgacacccaggaggcatttgaagttccacaaagagctcctgggaaggtgctgctggatgcagtttgcaaccacctcaacctcgtggaaggtgactattttggcctcgagtttcctgatcacaaaaagatcacggtgtggctggatctcctaaaacccattgtgaaacagattagaaggccaaagcacgttgttgttaagtttgtggtgaaattctttccgcctgaccacacacaactccaagaagaactcacaaggtacctgttcgcgctgcaggtgaagcaggacttggctcaaggcaggttgacgtgtaatgacaccagcgcagctctcttgatttcacacattgtgcaatctgagattggggattttgatgaagccttggacagagagcacttagcaaaaaataaatacatacctcagcaagacgcactagaggacaaaatcgtggaatttcaccataaccacat

SEQ ID NO: 7200 - DNA, 457 bp, Homo sapiens
  source 1..457: mol_type = unassigned DNA; mol_type = unassigned DNA
ggaatctttggaaagaactggcttttgttcagcccttagggaagaaagcctgtggcctttagcaagcaaggatgggggtgtaaccaggctcatcagacctcccatcccctcacagccacagacccagctttaagtttcccagacggaagattattcttactgcagatcttagcaacctcagcacatgactctttttctttcctcattaagtcaagaacctttggccttttcacttaaaagaagcactctaaggcttcgctttgacataccccagttgccagcatcactactgtttgggaccattaggaagtaaattcagggagacttgaacacaagcactgcttatctcgaaagctgatctgctcaccgaggtggcccttgagcacggacagcctggatctgctggcaaagagctcctgggaaggtgctgctggatgcagtttgcaaccacctcaac

SEQ ID NO: 7201 - DNA, 778 bp, Homo sapiens
  source 1..778: mol_type = unassigned DNA; mol_type = unassigned DNA
agggaagaaagcctgtggcctttagcaagcaaggatgggggtgtaaccaggctcatcagacctcccatcccctcacagccacagacccagctttaaggttactctggggtccccttggccaagaggagggtctgttctgtgggttgagagccttaggattttatttttctttcttcttgttcatgccttcaacaagtataaagccctttccatcttaactaagcacttatcacacactgtggctgtaacttctgcagcttgagccgcctgcggggtattgtagaaacgctgcgctgcctatcacagcttgtgatgtgacacgttcattctgcaagtttaaacttcgcctagcaaagagctcctgggaaggtgctgctggatgcagtttgcaaccacctcaacctcgtggaaggtgactattttggcctcgagtttcctgatcacaaaaagatcacggtgtggctggatctcctaaaacccattgtgaaacagattagaaggccaaagcacgttgttgttaagtttgtggtgaaattctttccgcctgaccacacacaactccaagaagaactcacaaggtacctgttcgcgctgcaggtgaagcaggacttggctcaaggcaggttgacgtgtaatgacaccagcgcagctctcttgatttcacacattgtgcaatctgagattggggattttgatgaagccttggacagagagcacttagcaaaaaataaatacatacctcagcaagacgcactagaggacaaaatcgtggaatttc

SEQ ID NO: 7202 - DNA, 558 bp, Homo sapiens
  source 1..558: mol_type = unassigned DNA; mol_type = unassigned DNA
cagggagacttgaacacaagcactgcttatctcgaaagctgatctgctcaccgaggtggcccttgagcacggacagcctggatctgctggatcggttcttggggaaaagctgtgcttcagagacaaggttgaagaacttcgcctgcatatgatggaagatgacaatgggaaccacaggtgtcattggtggctttgttttacaaagtcttcacctttctgctgagtcacgggactaagttcaacacaatttctactttccgccttcctttggaataatagttttggaagccaagtattagtatatgataccaggtgtgttttctaaagattcaggttcagtgggctgaatgcactttcatgacttcattagaccactgagcccaaggagaaaagtgccaatcttactagacatgaggaaaaagacacatcttttgctcttgctggaagtggtgtcctactttctacaagcagtcgtcatctggtttatacttgccttgttcagtttttgtgtgatattttattctctgcctaatagatattaaagtatcaagctgtcaa

SEQ ID NO: 7203 - DNA, 806 bp, Homo sapiens
  source 1..806: mol_type = unassigned DNA; mol_type = unassigned DNA
ccttgagcacggacagcctggatctgctgggtaaagggagaagttatgtccagggtgggacagagaggacggcgagagatttcctcactactcagaacagcgggaaattcaaaacttagggattatttctgaaattttccatttaaaattttctatttaaaattgacgaagggtaactgaaaccagagaaagcaagactgacgataagggaggggcctcctgtactccaagagcactgaatctggaaaaactcaacacatcgatggagtcatatatttaattttttcttaaaagccgcctgcggggtattgtagaaacgctgcgctgcctatcacagcttgtgatgtgacacgttcattctgcaagtttaaacttcgcctagacagcatctctttgagcaacaatttcttgaaataaaaaaatatattcttggccaggtgtggtggctcacgcctgtaatcccagcactttgggaggccaaggcggatggatcacttgaggtcaggagttcaagaccagcctgatcaacatggcgaaaccccatctctactaaaaatacaaaaattagccgaccgtgctggcgtgcacctgtaatcccagctacttgggaggttgagacaggagaatcacttggacctgggaggcagaggttgcagtgagccgagatggtaccactgcactccatcctgggcaacagagcaagactctgtctcaaatatatatatattttccctagttggctttagactcttgaccccagcttatagttgtttttgttaaagactgtattattatggtctctccat

SEQ ID NO: 7204 - DNA, 576 bp, Homo sapiens
  source 1..576: mol_type = unassigned DNA; mol_type = unassigned DNA
ccttgagcacggacagcctggatctgctgggtaaagggagaagttatgtccagggtgggacagagaggacggcgagagatttcctcactactcagaacagcgggaaattcaaaacttagggattatttctgaaattttccatttaaaattttctatttaaaattgacgaagggtaactgaaaccagagaaagcaagactgacgataagggaggggcctcctgtactccaagagcactgaatctggaaaaactcaacacatcgatggagtcatatatttaattttttcttaaaagccgcctgcggggtattgtagaaacgctgcgctgcctatcacagcttgtgatgtgacacgttcattctgcaagtttaaacttcgcctagcaaatctttatgagcatctactatgcatcatgctgttctcgtgaacaaaacaagatccatatcctgagggagtgtgccttccagcagagaaagacggcagtgtgtaaggagcgttagaagaagatgttgtcttttgtgtgtagaaagtggtatgtaaaagtgaaaaataaaaagaaatagagcagaatcaggga

SEQ ID NO: 7205 - DNA, 786 bp, Homo sapiens
  source 1..786: mol_type = unassigned DNA; mol_type = unassigned DNA
ccttgagcacggacagcctggatctgctgggtaaagggagaagttatgtccagggtgggacagagaggacggcgagagatttcctcactactcagaacagcgggaaattcaaaacttagggattatttctgaaattttccatttaaaattttctatttaaaattgacgaagggtaactgaaaccagagaaagcaagactgacgataagggaggggcctcctgtactccaagagcactgaatctggaaaaactcaacacatcgatggagtcatatatttaattttttcttaaaagccgcctgcggggtattgtagaaacgctgcgctgcctatcacagcttgtgatgtgacacgttcattctgcaagtttaaacttcgcctagcttttcaaaggagaataaataccaagtatctggttagaactctgacctctttgcagaacacaaagctggagctgaagctcacccccacccccactcactcccgtggttaacagaatattaaacctgaaaagtacattttaaaaaaagaatgaaaagtaaaaatgtttgggaagttttctggaaactaaagagctaagaattcttaaaggatccggaaagctgtgttttcatacttcagtttgatgcatggattttcagtttaaaagccttttgcataaaaacattaaagtctccttctaagggatcggttcttggggaaaagctgtgcttcagagacaaggttgaagaacttcgcctgcatatgatggaagatgacaatgggaaccacaggtgtcattggtggc

SEQ ID NO: 7206 - DNA, 641 bp, Homo sapiens
  source 1..641: mol_type = unassigned DNA; mol_type = unassigned DNA
ccttgagcacggacagcctggatctgctgggtaaagggagaagttatgtccagggtgggacagagaggacggcgagagatttcctcactactcagaacagcgggaaattcaaaacttagggattatttctgaaattttccatttaaaattttctatttaaaattgacgaagggtaactgaaaccagagaaagcaagactgacgataagggaggggcctcctgtactccaagagcactgaatctggaaaaactcaacacatcgatggagtcatatatttaattttttcttaaaagccgcctgcggggtattgtagaaacgctgcgctgcctatcacagcttgtgatgtgacacgttcattctgcaagtttaaacttcgcctagcaaatctttatgagcatctactatgcatcatgctgttctcgtgaacaaaacaagatccatatcctgagggagtgtgccttccagcagagaaagacggcagtgtgtaaggagcgttagaagaagatgttgtcttttgtgtgtagaaagtgatcggttcttggggaaaagctgtgcttcagagacaaggttgaagaacttcgcctgcatatgatggaagatgacaatgggaaccacaggtgtcattggtggctttgtttta

SEQ ID NO: 7207 - DNA, 583 bp, Homo sapiens
  source 1..583: mol_type = unassigned DNA; mol_type = unassigned DNA
ccttgagcacggacagcctggatctgctggccgcctgcggggtattgtagaaacgctgcgctgcctatcacagcttgtgatgtgacacgttcattctgcaagtttaaacttcgcctagatcggttcttggggaaaagctgtgcttcagagacaaggttgaagaacttcgcctgcatatgatggaagatgacaatgggaaccacaggtgtcattggtggctttgttttacaaagtcttcacctttctgctgagtcacgggactaagttcaacacaatttctactttccgccttcctttggaataatagttttggaagccaagtattagtatatgataccaggtgtgttttctaaagattcaggttcagtgggctgaatgcactttcatgacttcattagaccactgagcccaaggagaaaagtgccaatcttactagacatgaggaaaaagacacatcttttgctcttgctggaagtggtgtcctactttctacaagcagtcgtcatctggtttatacttgccttgttcagtttttgtgtgatattttattctctgcctaatagatattaaagtatcaagctgt

SEQ ID NO: 7208 - DNA, 709 bp, Homo sapiens
  source 1..709: mol_type = unassigned DNA; mol_type = unassigned DNA
ccttgagcacggacagcctggatctgctggggtaactgaaaccagagaaagcaagactgacgataagggaggggcctcctgtactccaagagcactgaatctggaaaaactcaacacatcgatggagtcatatatttaattttttcttaaaagccgcctgcggggtattgtagaaacgctgcgctgcctatcacagcttgtgatgtgacacgttcattctgcaagtttaaacttcgcctagatcggttcttggggaaaagctgtgcttcagagacaaggttgaagaacttcgcctgcatatgatggaagatgacaatgggaaccacaggtgtcattggtggctttgttttacaaagtcttcacctttctgctgagtcacgggactaagttcaacacaatttctactttccgccttcctttggaataatagttttggaagccaagtattagtatatgataccaggtgtgttttctaaagattcaggttcagtgggctgaatgcactttcatgacttcattagaccactgagcccaaggagaaaagtgccaatcttactagacatgaggaaaaagacacatcttttgctcttgctggaagtggtgtcctactttctacaagcagtcgtcatctggtttatacttgccttgttcagtttttgtgtgatattttattctctgcctaatagatattaaagtatcaagctgtcaa

SEQ ID NO: 7209 - DNA, 781 bp, Homo sapiens
  source 1..781: mol_type = unassigned DNA; mol_type = unassigned DNA
ccttgagcacggacagcctggatctgctggcctggagtcggggactctgaaacctaatctgaagtgtgtttaacgagggttctgaacgctgggacttattgctgaggggaacaaggagacagtgtgtcctcaggggcagtgtggccgcccctagagccacagcaagcaggaagaatcgcagcatttgtggtcagaaccgatgggcaggcctaaacatttagctactttgccccagaatgaaagccttgttccagctccccagggtttggatttaaagttttagttcctgtcggtggtcgcagtttcctgacgagggtgccatccagtctgctgttcagcttttgagtcatttaatttttcttcttccaacttctcctcctccaccttctcctcctccacatcatcatcatcatcccaaatacccattagagctcgcctagtctggatgccgttctaagggcatggtgtatactaagtcgcttaatccttacggtgacccagtgaagtggttcaatctttacgtccattttatgtaagaggaaactgaggcacaagaagtagcttgcctccagtgagtgtgactttgggcactccgttgtcctccagcctggaaagtcccagtagatacagcacagctgaggtgcaggtgtgcaggtatatcaatcccttctgcccacagggtaaagccctagagcattgcatctggtctcaagtgtccagggctcaagtgtccagctttacacagatgttactgctgatgtctggaaagtgaaaaaggtag

SEQ ID NO: 7210 - DNA, 784 bp, Homo sapiens
  source 1..784: mol_type = unassigned DNA; mol_type = unassigned DNA
ccttgagcacggacagcctggatctgctgggtaaagggagaagttatgtccagggtgggacagagaggacggcgagagatttcctcactactcagaacagcgggaaattcaaaacttagggattatttctgaaattttccatttaaaattttctatttaaaattgacgaagggtaactgaaaccagagaaagcaagactgacgataagggaggggcctcctgtactccaagagcactgaatctggaaaaactcaacacatcgatggagtcatatatttaattttttcttaaaagccgcctgcggggtattgtagaaacgctgcgctgcctatcacagcttgtgatgtgacacgttcattctgcaagtttaaacttcgcctagcaaatctttatgagcatctactatgcatcatgctgttctcgtgaacaaaacaagatccatatcctgagggagtgtgccttccagcagagaaagacggcagtgtgtaaggagcgttagaagaagatgttgtcttttgtgtgtagaaagtggttgcatcatcctccagtgtgtggaatcgtcctcctcatactgtttatccattcattcagcagtggacacctgggttgcttctagcttttggctattgtgaataattcttctgtgaacgtggatttacaaaactctgctttcagttattttcgttgtatactcagaagtgagatcgctgtatcctaggataagactatttttgtaattttgagaaactgctgtactgtttttccatagtggctgcaccatttt

SEQ ID NO: 7211 - DNA, 756 bp, Homo sapiens
  source 1..756: mol_type = unassigned DNA; mol_type = unassigned DNA
ccttgagcacggacagcctggatctgctgggtaaagggagaagttatgtccagggtgggacagagaggacggcgagagatttcctcactactcagaacagcgggaaattcaaaacttagggattatttctgaaattttccatttaaaattttctatttaaaattgacgaagggtaactgaaaccagagaaagcaagactgacgataagggaggggcctcctgtactccaagagcactgaatctggaaaaactcaacacatcgatggagtcatatatttaattttttcttaaaagccgcctgcggggtattgtagaaacgctgcgctgcctatcacagcttgtgatgtgacacgttcattctgcaagtttaaacttcgcctaggttgcatcatcctccagtgtgtggaatcgtcctcctcatactgtttatccattcattcagcagtggacacctgggttgcttctagcttttggctattgtgaataattcttctgtgaacgtggatttacaaaactctgctttcagttattttcgttgtatactcagaagtgagatcgctgtatcctaggataagactatttttgtaattttgagaaactgctgtactgtttttccatagtggctgcaccattttgcattctgggatgtgacgtggagcagaattaccttcagagtgaagttcaaaaactcactgggaataagtacagagaaatgatgctgcaagctgatgaaataaatttactataggaacaaaa

SEQ ID NO: 7212 - DNA, 518 bp, Homo sapiens
  source 1..518: mol_type = unassigned DNA; mol_type = unassigned DNA
ccttgagcacggacagcctggatctgctgggtaaagggagaagttatgtccagggtgggacagagaggacggcgagagatttcctcactactcagaacagcgggaaattcaaaacttagggattatttctgaaattttccatttaaaattttctatttaaaattgacgaagggtaactgaaaccagagaaagcaagactgacgataagggaggggcctcctgtactccaagagcactgaatctggaaaaactcaacacatcgatggagtcatatatttaattttttcttaaaagccgcctgcggggtattgtagaaacgctgcgctgcctatcacagcttgtgatgtgacacgttcattctgcaagtttaaacttcgcctagtggctgcaccattttgcattctgggatgtgacgtggagcagaattaccttcagagtgaagttcaaaaactcactgggaataagtacagagaaatgatgctgcaagctgatgaaataaatttactataggaacaaaa

SEQ ID NO: 7213 - DNA, 856 bp, Homo sapiens
  source 1..856: mol_type = unassigned DNA; mol_type = unassigned DNA
ccttgagcacggacagcctggatctgctgggtaaagggagaagttatgtccagggtgggacagagaggacggcgagagatttcctcactactcagaacagcgggaaattcaaaacttagggattatttctgaaattttccatttaaaattttctatttaaaattgacgaagggtaactgaaaccagagaaagcaagactgacgataagggaggggcctcctgtactccaagagcactgaatctggaaaaactcaacacatcgatggagtcatatatttaattttttcttaaaagccgcctgcggggtattgtagaaacgctgcgctgcctatcacagcttgtgatgtgacacgttcattctgcaagtttaaacttcgcctagcaaatctttatgagcatctactatgcatcatgctgttctcgtgaacaaaacaagatccatatcctgagggagtgtgccttccagcagagaaagacggcagtgtgtaaggagcgttagaagaagatgttgtcttttgtgtgtagaaagtgcaaagagctcctgggaaggtgctgctggatgcagtttgcaaccacctcaacctcgtggaaggtgactattttggcctcgagtttcctgatcacaaaaagatcacggtgtggctggatctcctaaaacccattgtgaaacagattagaaggccaaagcacgttgttgttaagtttgtggtgaaattctttccgcctgaccacacacaactccaagaagaactcacaaggtacctgttcgcgctgcaggtgaagcaggacttggctcaaggcaggttgacgtgtaatgacaccagcgcagctctcttgatttcacacattgtgcaat

SEQ ID NO: 7214 - DNA, 749 bp, Homo sapiens
  source 1..749: mol_type = unassigned DNA
ccttgagcacggacagcctggatctgctggcaaagagctcctgggaaggtgctgctggatgcagtttgcaaccacctcaacctcgtggaaggtgactattttggcctcgagtttcctgatcacaaaaagatcacggtgtggctggatctcctaaaacccattgtgaaacagattagaaggccaaagcacgttgttgttaagtttgtggtgaaattctttccgcctgaccacacacaactccaagaagaactcacaaggtacctgttcgcgctgcaggtgaagcaggacttggctcaaggcaggttgacgtgtaatgacaccagcgcagctctcttgatttcacacattgtgcaataaggacaagctgatgaagagaagaatcagctactagttggccctgatgtaaagagcacacgtgggcagcatggaggcgaggcagggctgcgtttgtgcaggtcgtgtggtccttgctctgagggttccgcgtgaaatttaaggagcagcctatttccacatttcaaagaggagaaatgtggggagcgaatgagtttcatagtcatgtcactatggcgtgacaggagggcaagaaaagacaagcgacccagaagaaaagagaattagacgtctccaccctgatgccaaaggaaaaactggaccattcggctctctttatatggaatgatgggaaagagtgtgttctaagattcataggaattaagaagcccaaacataaagctcacaagacattt

SEQ ID NO: 7215 - DNA, 810 bp, Homo sapiens
  source 1..810: mol_type = unassigned DNA; mol_type = unassigned DNA
ccttgagcacggacagcctggatctgctgggtaaagggagaagttatgtccagggtgggacagagaggacggcgagagatttcctcactactcagaacagcgggaaattcaaaacttagggattatttctgaaattttccatttaaaattttctatttaaaattgacgaagggtaactgaaaccagagaaagcaagactgacgataagggaggggcctcctgtactccaagagcactgaatctggaaaaactcaacacatcgatggagtcatatatttaattttttcttaaaagccgcctgcggggtattgtagaaacgctgcgctgcctatcacagcttgtgatgtgacacgttcattctgcaagtttaaacttcgcctagcaaagagctcctgggaaggtgctgctggatgcagtttgcaaccacctcaacctcgtggaaggtgactattttggcctcgagtttcctgatcacaaaaagatcacggtgtggctggatctcctaaaacccattgtgaaacagattagaaggccaaagcacgttgttgttaagtttgtggtgaaattctttccgcctgaccacacacaactccaagaagaactcacaaggtacctgttcgcgctgcaggtgaagcaggacttggctcaaggcaggttgacgtgtaatgacaccagcgcagctctcttgatttcacacattgtgcaatctgagattggggattttgatgaagccttggacagagagcacttagcaaaaaataaatacatacctcagcaagacgcactagaggacaaaatcgtggaatttca

SEQ ID NO: 7216 - DNA, 799 bp, Homo sapiens
  source 1..799: mol_type = unassigned DNA; mol_type = unassigned DNA
ccttgagcacggacagcctggatctgctggcaaagagctcctgggaaggtgctgctggatgcagtttgcaaccacctcaacctcgtggaaggtgactattttggcctcgagtttcctgatcacaaaaagatcacggtgtggctggatctcctaaaacccattgtgaaacagattagaaggccaaagcacgttgttgttaagtttgtggtgaaattctttccgcctgaccacacacaactccaagaagaactcacaaggtacctgttcgcgctgcaggtgaagcaggacttggctcaaggcaggttgacgtgtaatgacaccagcgcagctctcttgatttcacacattgtgcaatctgagattggggattttgatgaagccttggacagagagcacttagcaaaaaataaatacatacctcagcaagacgcactagaggacaaaatcgtggaatttcaccataaccacattggacaaacaccagcagaatcagatttccagctcctagagattgcccgtcggctagagatgtatggaatccggttgcacccggccaaggacagggaaggcacgaagatcaatctggccgttgccaacacgggaattctagtgtttcaggtgagagccttgagaacacggcctggttcccttggtgacagagagagaagagctggcccttcaactctgattcatattcagtgggctaagacctctgatggttatttttcggcgaacaaagaaaaattaacctcatctcaggctttctgtttcccaggccctcagctcccagattctattt

SEQ ID NO: 7217 - DNA, 616 bp, Homo sapiens
  source 1..616: mol_type = unassigned DNA; mol_type = unassigned DNA
ccttgagcacggacagcctggatctgctggcaaagagctcctgggaaggtgctgctggatgcagtttgcaaccacctcaacctcgtggaaggtgactattttggcctcgagtttcctgatcacaaaaagatcacggtgtggctggatctcctaaaacccattgtgaaacagattagaaggccaaagcacgttgttgttaagtttgtggtgaaattctttccgcctgaccacacacaactccaagaagaactcacaagctgagattggggattttgatgaagccttggacagagagcacttagcaaaaaataaatacatacctcagcaagacgcactagaggacaaaatcgtggaatttcaccataaccacattggacaaacaccagcagaatcagatttccagctcctagagattgcccgtcggctagagatgtatggaatccggttgcacccggccaaggacagggaaggcacgaagatcaatctggccgttgccaacacgggaattctagtgtttcagggtttcactaagatcaatgccttcaactgggccaaggtgcggaagctgagcttcaagaggaagcgctttctcatcaagctccggccagatgccaat

SEQ ID NO: 7218 - DNA, 612 bp, Homo sapiens
  source 1..612: mol_type = unassigned DNA; mol_type = unassigned DNA
ttgagcacggacagcctggatctgctgggtaaagggagaagttatgtccagggtgggacagagaggacggcgagagatttcctcactactcagaacagcgggaaattcaaaacttagggattatttctgaaattttccatttaaaattttctatttaaaattgacgaagggtaactgaaaccagagaaagcaagactgacgataagggaggggcctcctgtactccaagagcactgaatctggaaaaactcaacacatcgatggagtcatatatttaattttttcttaaaagccgcctgcggggtattgtagaaacgctgcgctgcctatcacagcttgtgatgtgacacgttcattctgcaagtttaaacttcgcctagcaaagagctcctgggaaggtgctgctggatgcagtttgcaaccacctcaacctcgtggaaggtgactattttggcctcgagtttcctgatcacaaaaagatcacggtaccgggcagggctgacttctttcaagttgttaccaggcttgacttttatgatttcactccattcttacactattgtttaggaatgtattcaactgcaaaataaaacccaccgttgatgacttaaa

SEQ ID NO: 7219 - DNA, 871 bp, Homo sapiens
  source 1..871: mol_type = unassigned DNA; mol_type = unassigned DNA
agcacggacagcctggatctgctgggtaaagggagaagttatgtccagggtgggacagagaggacggcgagagatttcctcactactcagaacagcgggaaattcaaaacttagggattatttctgaaattttccatttaaaattttctatttaaaattgacgaagggtaactgaaaccagagaaagcaagactgacgataagggaggggcctcctgtactccaagagcactgaatctggaaaaactcaacacatcgatggagtcatatatttaattttttcttaaaagccgcctgcggggtattgtagaaacgctgcgctgcctatcacagcttgtgatgtgacacgttcattctgcaagtttaaacttcgcctagcaaatctttatgagcatctactatgcatcatgctgttctcgtgaacaaaacaagatccatatcctgagggagtgtgccttccagcagagaaagacggcagtgtatcggttcttggggaaaagctgtgcttcagagacaaggttgaagaacttcgcctgcatatgatggaagatgacaatgggaaccacaggtgtcattggtggctttgttttacaaagtcttcacctttctgctgagtcacgggactaagttcaacacaatttctactttccgccttcctttggaataatagttttggaagccaagtattagtatatgataccaggtgtgttttctaaagattcaggttcagtgggctgaatgcactttcatgacttcattagaccactgagcccaaggagaaaagtgccaatcttactagacatgaggaaaaagacacatcttttgctcttgctggaagtggtgtcctactttctacaagcagtcgtcatctg

SEQ ID NO: 7220 - DNA, 767 bp, Homo sapiens
  source 1..767: mol_type = unassigned DNA; mol_type = unassigned DNA
cacggacagcctggatctgctgggtaaagggagaagttatgtccagggtgggacagagaggacggcgagagatttcctcactactcagaacagcgggaaattcaaaacttagggattatttctgaaattttccatttaaaattttctatttaaaattgacgaagggtaactgaaaccagagaaagcaagactgacgataagggaggggcctcctgtactccaagagcactgaatctggaaaaactcaacacatcgatggagtcatatatttaattttttcttaaaagccgcctgcggggtattgtagaaacgctgcgctgcctatcacagcttgtgatgtgacacgttcattctgcaagtttaaacttcgcctagatcggttcttggggaaaagctgtgcttcagagacaaggttgaagaacttcgcctgcatatgatggaagatgacaatgggaaccacaggtgtcattggtggctttgttttacaaagtcttcacctttctgctgagtcacgggactaagttcaacacaatttctactttccgccttcctttggaataatagttttggaagccaagtattagtatatgataccagcctggagtcggggactctgaaacctaatctgaagtgtgtttaacgagggttctgaacgctgggacttattgctgaggggaacaaggagacagtgtgtcctcaggggcagtgtggccgcccctagagccacagcaagcaggaagaatcgcagcatttgtggtcagaaccga

SEQ ID NO: 7221 - DNA, 748 bp, Homo sapiens
  source 1..748: mol_type = unassigned DNA; mol_type = unassigned DNA
ggaaattcaaaacttagggattatttctgaaattttccatttaaaattttctatttaaaattgacgaagggtaactgaaaccagagaaagcaagactgacgataagggaggggcctcctgtactccaagagcactgaatctggaaaaactcaacacatcgatggagtcatatatttaattttttcttaaaagccgcctgcggggtattgtagaaacgctgcgctgcctatcacagcttgtgatgtgacacgttcattctgcaagtttaaacttcgcctagatcggttcttggggaaaagctgtgcttcagagacaaggttgaagaacttcgcctgcatatgatggaagatgacaatgggaaccacaggtgtcattggtggctttgttttacaaagtcttcacctttctgctgagtcacgggactaagttcaacacaatttctactttccgccttcctttggaataatagttttggaagccaagtattagtatatgataccaggtgtgttttctaaagattcaggttcagtgggctgaatgcactttcatgacttcattagaccactgagcccaaggagaaaagtgccaatcttactagacatgaggaaaaagacacatcttttgctcttgctggaagtggtgtcctactttctacaagcagtcgtcatctggtttatacttgccttgttcagtttttgtgtgatattttattctctgcctaatagatattaaagtatcaagctgtcaa

SEQ ID NO: 7222 - DNA, 555 bp, Homo sapiens
  source 1..555: mol_type = unassigned DNA; mol_type = unassigned DNA
aggagacctgcctgagccccacagctacaaagagctcctgggaaggtgctgctggatgcagtttgcaaccacctcaacctcgtggaaggtgactattttggcctcgagtttcctgatcacaaaaagatcacggtgtggctggatctcctaaaacccattgtgaaacagattagaaggccaaagcacgttgttgttaagtttgtggtgaaattctttccgcctgaccacacacaactccaagaagaactcacaaggtacctgttcgcgctgcaggtgaagcaggacttggctcaaggcaggttgacgtgtaatgacaccagcgcagctctcttgatttcacacattgtgcaatctgagattggggattttgatgaagccttggacagagagcacttagcaaaaaataaatacatacctcagcaagacgcactagaggacaaaatcgtggaatttcaccataaccacattggacaaacaccagcagaatcagatttccagctcctagagattgcccgtcggctagagatgtatggaatccggttgcacccggccaag

SEQ ID NO: 7223 - DNA, 867 bp, Homo sapiens
  source 1..867: mol_type = unassigned DNA; mol_type = unassigned DNA
ggtggaccccgaataagttgctgtgcataagttaaccatgcagctcttggcagctggtgtggggactcaaacccaggattagggactggaatggagcagctcattgctccctacattaaccgacctgggaaatgcttgtctgaccctgtgtgtcggaaacagggcacattgctgtagcaaagtggtgaagataagattggtgatcagtgttccactctgctctcctgacccatttcctctggataagcatgcctggagaagaggagagcttggcagggaagaatgggggttccacgcagtcacatgtgactcctgacattcctgcagcaaagagctcctgggaaggtgctgctggatgcagtttgcaaccacctcaacctcgtggaaggtgactattttggcctcgagtttcctgatcacaaaaagatcacggtgtggctggatctcctaaaacccattgtgaaacagattagaaggccaaagcacgttgttgttaagtttgtggtgaaattctttccgcctgaccacacacaactccaagaagaactcacaaggtacctgttcgcgctgcaggtgaagcaggacttggctcaaggcaggttgacgtgtaatgacaccagcgcagctctcttgatttcacacattgtgcaatctgagattggggattttgatgaagccttggacagagagcacttagcaaaaaataaatacatacctcagcaagacgcactagaggacaaaatcgtggaatttcaccataaccacattggacaaacaccagcagaatcagatttccagctcctagagattgcccgtcggctagagatgtatggaatccggttgcacccggccaaggacagggaaggc

SEQ ID NO: 7224 - DNA, 667 bp, Homo sapiens
  source 1..667: mol_type = unassigned DNA; mol_type = unassigned DNA
gtacctgttcgcgctgcaggtgaagcaggacttggctcaaggcaggttgacgtgtaatgacaccagcgcagctctcttgatttcacacattgtgcaatctgagattggggattttgatgaagccttggacagagagcacttagcaaaaaataaatacatacctcagcaagacgcactagaggacaaaatcgtggaatttcaccataaccacattggacaaacaccagcagaatcagatttccagctcctagagattgcccgtcggctagagatgtatggaatccggttgcacccggccaaggacagggaaggcacgaagatcaatctggccgttgccaacacgggaattctagtgtttcagggtttcactaagatcaatgccttcaactgggccaaggtgcggaagctgagcttcaagaggaagcgctttctcatcaagctccggccagatgccaatttcctggggtggcctggagcccggagccgtgggcgacttcacagagaaacgacgtaagagccaacattgacacgaagtatgaggaagaggatgaacgttgcgtttcagtgattttaaggaggcaggaagggactttcagtatctgggttttgtttttcaaggaaatgtaagccaaataaacataatttgtatatgaaatctgtcaaaaaa

SEQ ID NO: 7225 - DNA, 764 bp, Homo sapiens
  source 1..764: mol_type = unassigned DNA; mol_type = unassigned DNA
atcaaaacagctgggctctggtcattagactattttttatgaagcttgttatacagtatatgtgatacaaagaaaaaggtgtgctgtctcagaggtgtaacaattggtgtacattgaccttgaactagtgttgttaaggcgcaagtctgattttaaagctctatcctttaactttccacattccagcagtattgaggactgtcttgaggttatgtgagaatcatatttctcacagataaaaacgtgtaagactttgcaatctgatctgttatttctgacaagactacgaaaagtttaataaactcataatttttttaagcattagattatctacctttgcacccactgacgttcctcttttctctgcatgataaagcatttgcgttttgcactagtcattgctaatatataagagtttcactttgatgtttataaagtcctgaagttttagggctttttaggaggtcatacggttgtcacccacatgtgtagaatttactgccaagaacctccccaggcggatggggagaaaagaaaaaccgggagcagctgagattggggattttgatgaagccttggacagagagcacttagcaaaaaataaatacatacctcagcaagacgcactagaggacaaaatcgtggaatttcaccataaccacattggacaaacaccagcagaatcagatttccagctcctagagattgcccgtcggctagagatgtatggaatccggttgcacccggccaaggacagggaaggc

SEQ ID NO: 7226 - DNA, 604 bp, Homo sapiens
  source 1..604: mol_type = unassigned DNA; mol_type = unassigned DNA
ttttgtatttttggtagagacgaggtttcgccatgttgcccaggctgatctcgaactcctgacctcaagtgatccacccgtcctggactcccaaagtgctgagattacaggcatgagctactgtgcctgaccttgaagcttctttctgactgatagagatgaggaggggagaaaactgtcttctcacatcaccacaattgataaatgtatcctggcatcccgtctctgagatctggcccttctgatgttccccaccaactgggctcaccttatgttgtctgctagcttctgtttggctcactggggaatattgacaaactgggaagtgtcattcctacgtgacctgtttttctttctgtttctttttagctgagattggggattttgatgaagccttggacagagagcacttagcaaaaaataaatacatacctcagcaagacgcactagaggacaaaatcgtggaatttcaccataaccacattggacaaacaccagcagaatcagatttccagctcctagagattgcccgtcggctagagatgtatggaatccggttgcacccggccaaggacagggaaggcacgaagatcaatctggccgt

SEQ ID NO: 7227 - DNA, 566 bp, Homo sapiens
  source 1..566: mol_type = unassigned DNA; mol_type = unassigned DNA
tagttaattgaacattttttctgtatattcaaggaaaatatcaagagactgagtggacccaaaaatacagagtctgtcaggattgcttttagtcctggctagccaagcaaccctgcatctctcccagttagggaaggaggggaagtgaagccctgaagcatcatttgtgtgtttaaatgagaatgccttggtatttctccccttccctgttgtggtctctgtttcagtggtcggactcagaagcaggttctcgactatgttaaagaaggaggacataagaaggtgcagtttgaaaggaagcacagcaagattcattctatccggagccttgcttcacagcctacagaactgaattcggaagtgctggagcagtctcagcagagcaccagccttacatttggagaaggtgccgaatctccagggggccagagctgccggcgaggaaaggaaccgaaggtttccgccggggagccggggtcgcacccgagccctgcgccgaggagaagccccgcgggtaacaagcaggcggacggagccgcctcggcgcccacggaggaagaggagga

SEQ ID NO: 7228 - DNA, 602 bp, Homo sapiens
  source 1..602: mol_type = unassigned DNA; mol_type = unassigned DNA
gttcaaacaaagcagcattctcctgtgtcttttcctcataagtaagaacaaggctccctgactggcagtcctcacctttccgagctgtctgtgaactcgcaggggggagtggcccctgccaacgtgaccttgtctcccaacctgagccccgacaccaagcaggcctctcccttgatcagcccgctgctgaatgaccaggcctgcccccggacggacgatgaggatgagggccggaggaagagattcccaactgataaagcgtacttcatagctaaggaagtgtctaccaccgagcgaacatatctgaaggatctcgaagttatcacttcgtggtttcagagcacagtgagcaaagaggacgccatgccggaagcactgaaaagtctcatattcccgaattttgaacctttgcacaaatttcatactaattttctcaaggaaattgagcaacgacttgccctgtgggaaggccgctcaaatgcccaaatcagagattaccaaagaatcggcgatgtcatgctgaagaacattcagggcatgaaggctggagtgcaatggcgcgatctcggctcactgcagcctccgcctcccaggttcaagcc

SEQ ID NO: 7229 - DNA, 764 bp, Homo sapiens
  source 1..764: mol_type = unassigned DNA; mol_type = unassigned DNA
cacctggcggctcacctgtggaagcacagcgaggccttggaggccctggagaatggaatcaagagctcccggcggctggagaacttctgcagagactttgagctgcagaaggtgtgttacctaccgctcaacaccttcctcctgcggccactgcaccggctcatgcactacaagcaggtcctggagcggctgtgcaaacaccacccgccgagccacgccgacttcagggactgccgagccgctttggcagagatcacggagatggtggcacagctccacggtacgatgatcaagatggagaatttccagaagctgcacgaactcaagaaagatttgattggcattgacaatcttgtggttccgggaagggtaagcagcagtggcctcactatgcactgcgcggggagcagaaaggaggcatcggagggacttacatttgaaccttttgaagagagacccttgcaaagcaaaatgtcctctttccatccacctgggagacaactggaaaaacacaacagtgtcgttagttcagaatcattgtgttcggaggagataaagcaatcctctgacctcatattctgctttttctccttacggggtgattcgcttctttaccttttcccctaccatatcccacagaagatttgagattgcttattttattttttttaaatgtacataaatgaaaatggaaaattaaaaaaaaaattaggtaaatagtaataaagccagaaaggtagtgcattaaattatgctagaaattc

SEQ ID NO: 7230 - DNA, 744 bp, Homo sapiens
  source 1..744: mol_type = unassigned DNA; mol_type = unassigned DNA
ggaggccctggagaatggaatcaagagctcccggcggctggagaacttctgcagagactttgagctgcagaaggtgtgttacctaccgctcaacaccttcctcctgcggccactgcaccggctcatgcactacaagcaggtcctggagcggctgtgcaaacaccacccgccgagccacgccgacttcagggactgccgagccgctttggcagagatcacggagatggtggcacagctccacggtacgatgatcaagatggagaatttccagaagctgcacgaactcaagaaagatttgattggcattgacaatcttgtggttccgggaaggttcaacgacgtcctgctatacacgagccgggggctgacggcctccaatcagtttaaagtccacgggcagctcccgctctatggcatgacgattgaggagagcgaagacgagtggggggtgccccactgcctgaccctccggggccagcggcagtccatcatcgtggccgccagttctcggtccgagatggagaagtgggttgaggacatccagatggccattgacctggcggagaagagcagcagccccgcccctgagttcctggccagcagcccccctgacaacaagtcccctgatgaagccaccgcggctgaccaggagtcagaggatgacctgagcgcctcgcgcacatcgctggagcgccaggccccgcaccgcggcaacacaatggtgcacgtgtgctggcaccgcaa

SEQ ID NO: 7231 - DNA, 3841 bp, Homo sapiens
  source 1..3841: mol_type = unassigned DNA; mol_type = unassigned DNA
tgttacctaccgctcaacaccttcctcctgcggccactgcaccggctcatgcactacaagcaggtcctggagcggctgtgcaaacaccacccgccgagccacgccgacttcagggactgccgaggtgagtgctgggagcctgcgccacctggtgcccatgccacagttcaggccgggtgctcccagactgagcccagccagggaggggctccccggggagagaggtcagctgatgctgggtcccaggttttcatcagggtgggcgccggtttttattcctgctctggtgtttggttacatcttgattttttttttttttttttgagactgagtctcactctgtcgcccaggctggagtgcaatggtgcgatctcggctcactgcaacctccacctcccgggttcaagcgattctcctgcctcagcctctggagcagctaggattacaggcgcccgccaccacgcccggctaatttttgtatttttagtagagacggggtttcaccgtgttggtcaggctggtctcgaactcctgaccttgtgatccgcccgccttggcctcccaaagtgctgggattacaggcgtgagccacggtgcccggccacatcttgatctttccgtaaagaaggtgctgatgatcgtcaggacccctttcttcctttgcctcttgcatgcattttctcctttggttcctgggtggttttgtgcaaagatccctagagaagctccgcttacagttagcccccacccaggaagcttgcttctacccacgtgacggaaactcatccctctaccatggccacagaacatagcttgtaagaaatcctgttgctcattgctaccggtcatttgtaatgtgcccatcagcataatgagcatctctcctgtattaactcttcccaagcctcaggcacaggtgagttcatcttacatatggggactacggagactagagaggttaaggaacctgcccagagtcacacagcttggagggaaatgatttggaacctaaatctagaacccatggtcacaaccgtcctgcccttctatctcatggacagtcctacccgctcgtacttgctcagccccaggccaggtgctgtgtacctgatactgtaccaacgttcacaccattactcctttaaggacccctttagatcaattgcattatcccattttacagagcgtgacgctgagactcaggggaagggacttgctgggtcactcagaggtcagagccgcattccagacctgcttttcccacggggccacgcgtgctcttctgaacggaagtcgttgtgtctggtgtcacagttggtctgtgggtgtctgccctccctggcctagcatgcggagttggccctgcgtaggtggctcccgcacaggtggcccgaatccacacacccactaggagggcaaggcccttattccttgcctgaaatgtcagaaacacctcccaactctttagccaaaactgtcatcttttttaaaaatccatcttcttacaccttggcttaaaacctgggtgacggctgactgcctcaggctaaaatcggaagtcttcatgacctggcctggccagctctcacaccccagctgcgcagcgagcacctgtactgggcgtgtgagggagaaggaacagtgcggcccctgacctcacaggacccactggagggtctgcaggcaggtacctgggtgctggagggtctgcaggcaggtacctgggcagtggcaaccctgcactagggccgtgagagagaagtggacggtgcagttggagccggggcgttagggggtgttggggggatctcgaagggaaatggtgtctaagttcagaactaacatgtaaataggagttttcctgggtgaaaggagggtgtggagaatagagttagaaacagcacaagctcaggttcagaggggacagagaccggaacattgccaaaagcgtgcagggcacagggagagccacaaagtgaggctgcgacagaaagcagcggctacatcccactgcgccccatggaccccgcaaagccgtaacctaagagcagaggccgaacaggaagtgttttaaggagggaaacagtgataccaggcttgttctagaaaaaccgttgttaatatctagaatatatggcggactcctacaaattagttgttaaaaaaaggcaacccaataggtagaagacttggcaaagtaattgagacagtgacagttcacagaaggggaacacaggtgcctcctgacatggtttgtcattgaccatctgtctttaaaacaaaccatgctggccaggggtggtggctcacacctgtaatcccagcactttgggaggccaagatgggaggatcactggaggctgggagttcaagagcagcctgggcaacacagtgagaccttgtctctacaaaaaatttaaaaattacgagcatgcacctatagtgccggctactcaggaggctgaggtgggaggatcgcatgagcccaggagttggaggctgcagtgagctatgattgcaccacagcccaggcgacagacctagacccagtctctaaaaacaaaaccatgctgcctcttgcctccacaccttggtgcattccgttccttctgcttagagtcctggccaccacctccttggcctttcctggccagctctctctcgtcctttaagcctcagcttgtgcctggcacctgatgttgagctgacctcctgtccgccttgtcctgtcacactggcattgcctgtgtgttggccgagcccggaggaaaggacccagggcccctcctggctctgaggactcctcagatctgtcgcccatgggggtgagagcggtgtgtggttttgaaggcgctgttcttggcggactcatccagttccactctgctatttctctaaacagtacccaatggagataggctatccttgatgattgaggaagagagtgctagctagcttaaagcatgaagtggcagcactgtaggagcctaggtttccagagctagagggacactgaatgccaagggctgttcccagcacgcccctgcccctgagcaccgggggccggggtgccatcattccatcattttcctctcagagctccccactaccccccagccctgccactgagcactggatgccaagtaaatgtttattggaccaaactgggtggtcatgtctgaaaatcgagcaaggcctgggatttgtcactatggctgagaccgcattctctgataagcctgggagaatttaactcgcatccttgggggaaaaaacaagaaaactaaatgcttcccttccaacactgaaatgctgggggaaagcagtgaaagaggtatttagagttctgaagactgaagttcagtcaacaagtatttcttgcttttcttgaccaaactacccaagtgctcagccgctggggacttgagtgccacccaaacttgtcagccactggggacttgcgtgccacccaagcttgtattaatcaggcactagcttcttttaaatattggatgcccaccagtataggggagccgtgcctctatcgaaaaataaaggcctgatgtggtggctcatgcctgtaatcccagcactttgggcggccaaggcgtgtggatcgcctgaggtcaggagttcgagaccagcctaaccaacatggtgaaaccttgtctctactgaaaatacaaaattagccgggcgtggtggcacgcacctgtaatcccagctactcgggaggctgaggcaggacaatcacttgaacctgggggcagaggttgcagtgagctgagattatgccattgtactccagcctgggcaacaagagcaaaactctgtctcaaac

SEQ ID NO: 7232 - DNA, 2692 bp, Homo sapiens
  source 1..2692: mol_type = unassigned DNA; mol_type = unassigned DNA
aggggcacccagagagatggaatgaggcagactcggaggtctgtattttttattgtggtaaaatagctataccacaatattggccaacttaacgatttttacgggaacaattcagtggcattaagtgcctttacaaggtggtgcaactgctttgagtctctgctggtgatgtcactttggcaaagggacgaaatgagccaccagtgcgtcaggcctgctcagagttgtttggaggtagcatggacacaggtgcctgtccctgccccctagctgggctgcagcgcatcctaacaatgctccaggggctgggccggccctgagcctggaggtgggcagggctgcaactgcctcctgggccactagagggcatgtgggagccactcacatgcaccccaggccccacttcctgggtagggtgcctggcccctcaaaacgagtgctgctctgagcttgttgggatggatctttccctccttcagcttccgcctgctggcaatgcatggggtcctgcgcccccatttctgcctcggtgtcacagggcacacccctctcccctcaaggtggctcttctcctcaggacaccactcccgttggatttagggcccaccctaccccagtgtgatctcgtcttcactagttaccctgcaacgagcctatttccaaataagcctgtgttctaaggtactggtagtcaggacctcaacgtgtcttttggggggacacagggaccccaagatgccccacagcaagtgacaaggggaagtgatgagatcagggtcccaggacctgccaagtctccccacacacgggggagcgggggtggggcccacatccttcagtcacggacatgccccagcccagggccctggtgcagggagagctgctctctgtgccctcctggggcaggtgcccgctgtgcttctcacaggcctccttgcctttcagaatcagttgtctggaaacctgctgaggaaattcaaaaacagcaacgggtggcagaagctgtgggtggtgttcacaaacttctgcctgttcttctacaaatcacaccaggtaagtgtctcgcacagggcaggtggccctgggaccttgggggtggcagcatgaggtgagggggccgccctcctctggaatgactcaggcctcttgggctccaggtgtcacggggatgacagggatgctggcggggggccctgtccacccgaggccctcaactctagggaagactgacattatcatccactgaaggacaacttctgccctaggaagggccacctgtcttctgcctggacaagggacgggggttggctttatctacagctcagtcctggcgggacttgccacccgggccatcacgtacaggcaaacactggctgccatggtcccttccaggcccacgcccgaggagggagctgcctgggctcccaagtccctgtctgatgcggggcagcagccaggcccagcagcagaagctgaccccgaaaagccactttgctttgtttcccctttccaggacaatcatccccttgccagcctgcctctgctcggctactcgctcaccatcccctctgagtccgagaacatccagaaagactacgtgttcaagctgcacttcaagtcccacgtctactacttcagggcggaaagcgagtacacgttcgaaaggtagacacccccttcccacgcacagggccctgcagaagaggaccccctcttccaaacatcaggatttctcccaagtcagcgagtgagatggccccacccttccctgccaactaagcgtttagacctggggtcccactgcccgacaccagcaggcgattctgttctcatggcagaaagtggggtcccaacttccctgcgcccttaccctgcacggtgttggctgaggccctagacatcttgcttggagatctctgacataacgtgtccgggatgatgaagctaagccccagtgagactgcctacatggtgtaatggcagggactgcagacttcatttagccaagaaagaaatgcaacagtcaggcctaagactgttcctgcaattcatattttgaatagagatcctgggcctctgcaaattgcatccccaagccgactacttgtgcagtttgccctgctgagccctcctcgccccgggaggcagaaggggaggggtcctcagcaatatgctgagcacctcctaaacaacatcacctgaaaaaggaacctagaggagagccattctcaaatctgatcctggactgagctcgagagctgggttgagagctgggttgatcaaagttgggattttgctattattgtgacaaagggtccagccttgcagtccagatcctgaaaggcctgggacaaggccaggtaatttggggagtccgtcctgcattgtgcaggatgttcagcggcatccctggccacccactagatgcccgcagcaacccctcagttgggacatctaaaaatgtctccagactttaccaaatgggacagcattgcacccatttgagaagcaccggtagagagcaaatacacaaatatataaaaagggagatttgggcgtggtggtgcaagcctgtagtcccatctcctgggaggccaaggctggaggatcgattgagcccaggaggtagctacagtgggcgataactgcaccactgaactccagtatgagtgacagagccagaccctgtctc

SEQ ID NO: 7233 - DNA, 510 bp, Homo sapiens
  source 1..510: mol_type = unassigned DNA; mol_type = unassigned DNA
gcaatttgcagcacacagcgttccactgcggggtttcacgctcacctgaaaacacctgttcccaacctacttcttggtgcaagttgaccaaatcgttttaagtggtaactctttccaaccgtagcagggttgttttctgttaagcaaagccgagatccagtgcaatacctggactgtcaccgtcctgtgagtggtgtacacaatgggaagataataagccgtggtgttttgctgtctgtctgtgtcacaagcatgaaaacccgtgtgtcattgatcagcaccatttgtggtatgttccgtgatgagcgtttagtgagcctgctggctgcagagcactatgaaatcatggcatggggtagtgtcagtcggactgcacagggaacacggtttccagtggctttggcccctactcgggaaacgtctgcctgttctcgatggtgatggggtggctgccattcccttggttttcctaagccctttctaacgagagtctcaaacaagcggaggcga

SEQ ID NO: 7234 - DNA, 439 bp, Homo sapiens
  source 1..439: mol_type = unassigned DNA; mol_type = unassigned DNA
tgttaagcaaagccgagatccagtgcaatacctggactgtcaccgtcctgtgagtggtgtacacaatgggaagataataagccgtggtgttttgctgtctgtctgtgtcacaagcatgaaaacccgtgtgtcattgatcagcaccatttgtggtatgttccgtgatgagcgtttagtgagcctgctggctgcagagcactatgaaatcatgcgccccgcaccatagcacctgcccacctgagaaccaggaacgcaccctctctgtggagctctgactggtgtagctggaaacaaacagcaacttgcaaacggacgaagagcctgccgtgtgttaatcatttgccttacaagatgtaccagacggtttccagtactaacaaagggaataaaaatacctcacgccacaatccagcatattgatgttttaaggcaaaacaac

SEQ ID NO: 7235 - DNA, 5103 bp, Homo sapiens
  source 1..5103: mol_type = unassigned DNA; mol_type = unassigned DNA
ttcccgctcgccggcctcagaggcggcgggtccggcgcgggcgcagcggtgcgggcgctcggctggggcgcggggcggggacgcggccgctgcccgctttgcgccgctcctccctgcgcgagtagcgctggccccggcgtcgaggcggccatggcgacccggagcccgctccccacccaccccgcctgctccgccctcccctccgccccgcgccacctttgatggctcggacctcagccggccaccgccagccctgctcgcgcgcccgcgccgccgccgcccgcgggtattaatagccggcgccgccgcgccctcggccgccgggggcttgggagccgccgatcccggagcccgagccgggagagggagccgccgcagccgccggcgctgtggagatattctctaagccgctttcatcatgggagaaatagagcagaggccgaccccaggatcacgactgggggccccggaaaattcggggatcagtaccttggaacgtggacagaagccgcccccaacaccttcaggaaaactcgtgtccatcaaaatccagatgctggatgacacccaggaggcatttgaagttccacaaagagctcctgggaaggtgctgctggatgcagtttgcaaccacctcaacctcgtggaaggtgactattttggcctcgagtttcctgatcacaaaaagatcacggtgtggctggatctcctaaaacccattgtgaaacagattagaaggccaaagcacgttgttgttaagtttgtggtgaaattctttccgcctgaccacacacaactccaagaagaactcacaaggtacctgttcgcgctgcaggtgaagcaggacttggctcaaggcaggttgacgtgtaatgacaccagcgcagctctcttgatttcacacattgtgcaatctgagattggggattttgatgaagccttggacagagagcacttagcaaaaaataaatacatacctcagcaagacgcactagaggacaaaatcgtggaatttcaccataaccacattggacaaacaccagcagaatcagatttccagctcctagagattgcccgtcggctagagatgtatggaatccggttgcacccggccaaggacagggaaggcacgaagatcaatctggccgttgccaacacgggaattctagtgtttcagggtttcactaagatcaatgccttcaactgggccaaggtgcggaagctgagcttcaagaggaagcgctttctcatcaagctccggccagatgccaatagtgcgtaccaggataccttggaattcctgatggccagtcgggatttctgcaagtccttctggaaaatctgtgttgaacatcatgccttctttagactttttgaagagcccaaaccaaagcccaagcccgtcctctttagccgggggtcatcatttcggttcagtggtcggactcagaagcaggttctcgactatgttaaagaaggaggacataagaaggtgcagtttgaaaggaagcacagcaagattcattctatccggagccttgcttcacagcctacagaactgaattcggaagtgctggagcagtctcagcagagcaccagccttacatttggagaaggtgccgaatctccagggggccagagctgccggcgaggaaaggaaccgaaggtttccgccggggagccggggtcgcacccgagccctgcgccgaggagaagccccgcgggtaacaagcaggcggacggagccgcctcggcgcccacggaggaagaggaggaggtcgttaaggataggacccagcagagtaaacctcagcccccgcagccaagcacaggctccctgactggcagtcctcacctttccgagctgtctgtgaactcgcaggggggagtggcccctgccaacgtgaccttgtctcccaacctgagccccgacaccaagcaggcctctcccttgatcagcccgctgctgaatgaccaggcctgcccccggacggacgatgaggatgagggccggaggaagagattcccaactgataaagcgtacttcatagctaaggaagtgtctaccaccgagcgaacatatctgaaggatctcgaagttatcacttcgtggtttcagagcacagtgagcaaagaggacgccatgccggaagcactgaaaagtctcatattcccgaattttgaacctttgcacaaatttcatactaattttctcaaggaaattgagcaacgacttgccctgtgggaaggccgctcaaatgcccaaatcagagattaccaaagaatcggcgatgtcatgctgaagaacattcagggcatgaagcacctggcggctcacctgtggaagcacagcgaggccttggaggccctggagaatggaatcaagagctcccggcggctggagaacttctgcagagactttgagctgcagaaggtgtgttacctaccgctcaacaccttcctcctgcggccactgcaccggctcatgcactacaagcaggtcctggagcggctgtgcaaacaccacccgccgagccacgccgacttcagggactgccgagccgctttggcagagatcacggagatggtggcacagctccacggtacgatgatcaagatggagaatttccagaagctgcacgaactcaagaaagatttgattggcattgacaatcttgtggttccgggaaggcctggctccttttcccttattaggactccacacttaggacaagccaggcgcatcccatgtgctccagagaggaggccattgttattagtaaaggagttcatccgtctgggcagcctcagcaagctctcggggaaggggctccagcagcgcatgttcttcctgttcaacgacgtcctgctatacacgagccgggggctgacggcctccaatcagtttaaagtccacgggcagctcccgctctatggcatgacgattgaggagagcgaagacgagtggggggtgccccactgcctgaccctccggggccagcggcagtccatcatcgtggccgccagttctcggtccgagatggagaagtgggttgaggacatccagatggccattgacctggcggagaagagcagcagccccgcccctgagttcctggccagcagcccccctgacaacaagtcccctgatgaagccaccgcggctgaccaggagtcagaggatgacctgagcgcctcgcgcacatcgctggagcgccaggccccgcaccgcggcaacacaatggtgcacgtgtgctggcaccgcaacaccagcgtctccatggtggacttcagcatcgcagtggagaatcagttgtctggaaacctgctgaggaaattcaaaaacagcaacgggtggcagaagctgtgggtggtgttcacaaacttctgcctgttcttctacaaatcacaccaggacaatcatccccttgccagcctgcctctgctcggctactcgctcaccatcccctctgagtccgagaacatccagaaagactacgtgttcaagctgcacttcaagtcccacgtctactacttcagggcggaaagcgagtacacgttcgaaaggtggatggaagtgatccgcagtgccaccagctctgcctcgcgaccccacgtgttgagtcacaaagagtctcttgtgtattgatggccggacacactcgtttccgcagtggctgctttcctggaagacgtttcctttcttctgtattaatgaagcctggtaaaattaacacctgtctgaaaatcaaaaacatggcttcccagcagctctcctgtctccacagccgcgttttttaaccccgacctctcagcgtctgaatgaacagcgctcccacctccagtcctggcatccgctgggggcgctgttctttagctagtgccagtattaaaacattgtcattacgagagtgccaaatgacatcttccctccaccctgcccctgaaaaacagtacacacacatccgttcaacacaagacagggcaagtgtttttcttcctaaaaaaagttctttcttttattattttcacctattggctgctgcattttacgaagtggacttcccggtgtttgtttgtttgtttgcaatacactcagtgcagccttaagcaaatgagatcattttcagatttcattttttttttcagtctttctacttttgtaataataggaagttagtaggactcacttctctgattaataagcaatttgcagcacacagcgttccactgcggggtttcacgctcacctgaaaacacctgttcccaacctacttcttggtgcaagttgaccaaatcgttttaagtggtaactctttccaaccgtagcagggttgttttctgttaagcaaagccgagatccagtgcaatacctggactgtcaccgtcctgtgagtggtgtacacaatgggaagataataagccgtggtgttttgctgtctgtctgtgtcacaagcatgaaaacccgtgtgtcattgatcagcaccatttgtggtatgttccgtgatgagcgtttagtgagcctgctggctgcagagcactatgaaatcatggtacgtagtccccggcacctgtcgttattcctatatcctcctgcaactgtggtttgaaactgcgcattctctagtagtatatatcgtgcctgtcttcaaaaacatttccctttttatactcattccccccaggcatggggtagtgtcagtcggactgcacagggaacacggtttccagtggctttggcccctactcgggaaacgtctgcctgttctcgatggtgatggggtggctgccattcccttggttttcctaagccctttctaacgagagtctcaaacaagcggaggcgagggccaattcaaccccattctttccagcgccccgcaccatagcacctgcccacctgagaaccaggaacgcaccctctctgtggagctctgactggtgtagctggaaacaaacagcaacttgcaaacggacgaagagcctgccgtgtgttaatcatttgccttacaagatgtaccagacggtttccagtactaacaaagggaataaaaatacctcacgccacaatccagcatattgatgttttaaggcaaaacaacc

SEQ ID NO: 7236 - DNA, 14786 bp, Homo sapiens
  source 1..14786: mol_type = unassigned DNA; mol_type = unassigned DNA
agcgtgaggcgccggcgccgagctgggcggccgggcgcggggagagggcgcgggagcggctcgtgcggcaggtaccatgcggacgcgcgagcccggcgagggccccggcaggcccggtccctgctcgggggcgcgctgagacggcgggtgagctccacgagagcgccgtcgccacttcgggccaactttgcgattcccgacagttaagcaatggggagacatttggctttgctcctgcttctgctccttctcttccaacattttggagacagtgatggcagccaacgacttgaacagactcctctgcagtttacacacctcgagtacaacgtcaccgtgcaggagaactctgcagctaagacttatgtggggcatcctgtcaagatgggtgtttacattacacatccagcgtgggaagtaaggtacaaaattgtttccggagacagtgaaaacctgttcaaagctgaagagtacattctcggagacttttgctttctaagaataaggaccaaaggaggaaatacagctattcttaatagagaagtgaaggatcactacacattgatagtgaaagcacttgaaaaaaatactaatgtggaggcgcgaacaaaggtcagggtgcaggtgctggatacaaatgacttgagaccgttattctcacccacctcatacagcgtttctttacctgaaaacacagctataaggaccagtatcgcaagagtcagcgccacggatgcagacataggaaccaacggggaattttactacagttttaaagatcgaacagatatgtttgctattcacccaaccagtggtgtgatagtgttaactggtagacttgattacctagagaccaagctctatgagatggaaatcctcgctgcggaccgtggcatgaagttgtatgggagcagtggcatcagcagcatggccaagctaacggtgcacatcgaacaggccaatgaatgtgctccggtgataacagcagtgacattgtcaccatcagaactggacagggacccagcatatgcaattgtgacagtggatgactgcgatcagggtgccaatggtgacatagcatctttaagcatcgtggcaggtgaccttctccagcagtttagaacagtgaggtcctttccagggagtaaggagtataaagtcaaagccatcggtggcattgattgggacagtcatcctttcggctacaatctcacactacaggctaaagataaaggaactccgccccagttctcttctgttaaagtcattcacgtgacttctccacagttcaaagccgggccagtcaagtttgaaaaggatgtttacagagcagaaataagtgaatttgctcctcccaacacacctgtggtcatggtaaaggccattcctgcttattcccatttgaggtatgtttttaaaagtacacctggaaaagctaaattcagtttaaattacaacactggtctcatttctattttagaaccagttaaaagacagcaggcagcccattttgaacttgaagtaacaacaagtgacagaaaagcgtccaccaaggtcttggtgaaagtcttaggtgcaaatagcaatccccctgaatttacccagacagcgtacaaagctgcttttgatgagaacgtgcccattggtactactgtcatgagcctgagtgccgtagaccctgatgagggtgagaacgggtacgtgacatacagtatcgcaaatttaaatcatgtgccgtttgcgattgaccatttcactggtgccgtgagtacgtcagaaaacctggactacgaactgatgcctcgggtttatactctgaggattcgtgcatcagactggggcttgccgtaccgccgggaagtcgaagtccttgctacaattactctcaataacttgaatgacaacacacctttgtttgagaaaataaattgtgaagggacaattcccagagatctaggcgtgggagagcaaataaccactgtttctgctattgatgcagatgaacttcagttggtacagtatcagattgaagctggaaatgaactggatttctttagtttaaaccccaactcgggggtattgtcattaaagcgatcgctaatggatggcttaggtgcaaaggtgtctttccacagtctgagaatcacagctacagatggagaaaattttgccacaccattatatatcaacataacagtggctgccagtcacaagctggtaaacttgcagtgtgaagagactggtgttgccaaaatgctggcagagaagctcctgcaggcaaataaattacacaaccagggagaggtggaggatattttcttcgattctcactctgtcaatgctcacataccgcagtttagaagcactcttccgactggtattcaggtaaaggaaaaccagcctgtgggttccagtgtaattttcatgaactccactgaccttgacactggcttcaatggaaaactggtctatgctgtttctggaggaaatgaggatagttgcttcatgattgatatggaaacaggaatgctgaaaattttatctcctcttgaccgtgaaacaacagacaaatacaccctgaatattaccgtctatgaccttgggataccccagaaggctgcgtggcgtcttctacatgtcgtggttgtcgatgccaatgataatccacccgagtttttacaggagagctattttgtggaagtgagtgaagacaaggaggtacatagtgaaatcatccaggttgaagccacagataaagacctggggcccaacggacacgtgacgtactcaattgttacagacacagacacattttcaattgacagcgtgacgggtgttgttaacatcgcacgccctctggatcgagagctgcagcatgagcactccttaaagattgaggccagggaccaagccagagaagagcctcagctgttctccactgtcgttgtgaaagtatcactagaagatgttaatgacaacccacctacatttattccacctaattatcgtgtgaaagtccgagaggatcttccagaaggaaccgtcatcatgtggttagaagcccacgatcctgatttaggtcagtctggtcaggtgagatacagccttctggaccacggagaaggaaacttcgatgtggataaactcagtggagcagttaggatcgtccagcagttggactttgagaagaagcaagtgtataatctcactgtgagggccaaagacaagggaaagccagtttctctgtcttctacttgctatgttgaagttgaggtggttgatgtgaatgagaacctgcacccacccgtgttttccagctttgtggaaaaggggacagtgaaagaagatgcacctgttggttcattggtaatgacggtgtcggctcatgatgaggacgccagaagagatggggagatccgatactccattagagatggctctggcgttggtgttttcaaaataggtgaagagacaggtgtcatagagacgtcagatcgactggaccgtgaatcgacctcccattattggctaacagtctttgcaaccgatcagggtgtcgtgcctctttcatcgttcatagagatctacatagaggttgaggatgtcaatgacaatgcaccacagacatcagagcctgtttattacccagaaatcatggaaaattctcctaaagatgtatctgtggtccagatcgaggcatttgatccagattcgagctctaatgacaagctcatgtacaaaattacaagtggaaatccacaaggattcttttcaatacatcctaaaacaggtctcatcacaactacgtcaaggaagctagaccgagaacagcaagatgaacacatattagaggttactgtgacagacaatggtagtccccccaaatcaaccattgcaagagtcattgtgaaaatccttgatgaaaatgacaacaaacctcagtttctgcaaaagttctacaaaatcagactccctgagcgggaaaagccagaccgagaaagaaatgccagacgggagccgctctatcacgtcatagccaccgacaaggatgagggccccaatgcagaaatctcctacagcatcgaagacgggaatgagcatggcaaatttttcatcgaaccgaaaactggagtggtttcgtccaagaggttttcagcagctggagaatatgatattctttcaattaaggcagttgacaatggtcgccctcaaaagtcatcaaccaccagactccatattgaatggatctccaagcccaaaccgtccctggagcccatttcatttgaagaatcattttttacctttactgtgatggaaagtgaccccgttgctcacatgattggagtaatatctgtggagcctcctggcatacccctttggtttgacatcactggtggcaactacgacagtcacttcgatgtggacaagggaactggaaccatcattgttgccaaacctcttgatgcagaacagaagtcaaactacaacctcacagtcgaggctacagatggaaccaccactatcctcactcaggtattcatcaaagtaatagacacaaatgaccatcgtcctcagttttctacatcaaagtatgaagttgttattcctgaagatacagcgccagaaacagaaattttgcaaatcagtgctgtggatcaggatgagaaaaacaaactaatctacactctgcagagcagtagagatccactgagtctcaagaaatttcgtcttgatcctgcaaccggctctctctatacttctgagaaactggatcatgaagctgttcaccagcacaccctcacggtcatggtacgagatcaagatgtgcctgtaaaacgcaactttgcaaggattgtggtcaatgtcagcgacacgaatgaccacgccccgtggttcaccgcttcctcctacaaagggcgggtttatgaatcggcagccgttggctcagttgtgttgcaggtgacggctctggacaaggacaaagggaaaaatgctgaagtgctgtactcgatcgagtcaggaaatattggaaattcttttatgattgatcctgtcttgggctctattaaaactgccaaagaattagatcgaagtaaccaagcggagtatgatttaatggtaaaagctacagataagggcagtccaccaatgagtgaaataacttctgtgcgtatctttgtcacaattgctgacaacgcctctccgaagtttacatcaaaagaatattctgttgaacttagtgaaactgtcagcattgggagtttcgttgggatggttacagcccatagtcaatcatcagtggtgtatgaaataaaagatggaaatacaggtgatgcttttgatattaatccacattctggaactatcatcactcagaaagccctggactttgaaactttgcccatttacacattgataatacaaggaactaacatggctggtttgtccactaatacaacggttctagttcacttgcaggatgagaatgacaacgcgccagtttttatgcaggcagaatatacaggactcattagtgaatcagcctcaattaacagcgtggtcctaacagacaggaatgtcccactggtgattcgagcagctgatgctgataaagactcaaatgctttgcttgtatatcacattgttgaaccatctgtacacacatattttgctattgattctagcactggtgctattcatacagtactaagtctggactatgaagaaacaagtatttttcactttaccgtccaagtgcatgacatgggaaccccacgtttatttgctgagtatgcagcgaatgtaacagtacatgtaattgacattaatgactgcccccctgtgtttgccaagccattatatgaagcatctcttttgttaccaacatacaaaggagtaaaagtcatcacagtaaatgctacagatgctgattcaagtgcattctcacagttgatttactccatcaccgaaggcaacatcggggagaagttttctatggactacaagactggtgctctcactgtccaaaacacaactcagttaagaagccgctacgagctaaccgttagagcttccgatggcagatttgccggccttacctctgtcaaaattaatgtgaaagaaagcaaagaaagtcacctaaagtttacccaggatgtctactctgcggtagtgaaagagaattccaccgaggccgaaacattagctgtcattactgctattgggaatccaatcaatgagcctttgttttatcacatcctcaacccagatcgcagatttaaaataagccgcacttcaggagttctgtcaaccactggcacgcccttcgatcgtgagcagcaggaggcgtttgatgtggttgtagaagtgacagaggaacataagccttctgcagtggcccacgttgtcgtgaaggtcattgtagaagaccaaaatgataatgcgccggtgtttgtcaaccttccctactacgccgttgttaaagtggacactgaggtgggccatgtcattcgctatgtcactgctgtagacagagacagtggcagaaacggggaagtgcattactacctcaaggaacatcatgaacactttcaaattggacccttgggtgaaatttcactgaaaaagcaatttgagcttgacaccttaaataaagaatatcttgttacagtggttgcaaaagatggagggaacccggccttttcagcggaagttatcgttccgatcactgtcatgaataaagccatgcctgtgtttgaaaaacctttctacagtgcagagattgcagagagcatccaggtgcacagccctgtggtccacgtgcaggctaacagcccggaaggcctgaaagtgttctacagcatcacagacggagaccctttcagccagttcactattaacttcaatactggagttatcaatgtcatagctcctctggactttgaggcccacccggcatataagctgagcatacgcgcaactgactccttgacgggcgctcatgctgaagtatttgtggacatcatagtagacgacatcaatgataaccctcctgtgtttgctcagcagtcttatgcggtgaccctgtctgaggcatctgtaattggaacgtctgttgttcaagttagagccaccgattctgattcagaaccaaatagaggaatctcataccagatgtttgggaatcacagcaagagtcatgatcattttcatgtagacagcagcactggcctcatctcactactcagaaccctggattacgagcagtcccggcagcacacgatttttgtgagggcagttgatggtggtatgcccacgctgagcagtgatgtgattgtcacggtggacgttaccgacctcaatgataatccaccactctttgaacaacagatttatgaagccagaattagcgagcacgcccctcatgggcatttcgtgacctgtgtaaaagcctatgatgcagacagttcagacatagacaagttgcagtattccattctgtctggcaatgatcataaacattttgtcattgacagtgcaacagggattatcaccctctcaaacctgcaccggcacgccctgaagccattttacagtcttaacctgtcagtgtctgatggagtttttagaagttccacccaggttcatgtaactgtaattggaggcaatttgcacagtcctgctttccttcagaacgaatatgaagtggaactagctgaaaacgctcccctacataccctggtgatggaggtgaaaactacggatggggattctggtatttatggtcacgttacttaccatattgtaaatgactttgccaaagacagattttacataaatgagagaggacagatatttactttggaaaaacttgatcgagaaaccccggcggagaaagtgatctcagtccgtttaatggctaaggatgctggaggaaaagttgctttctgcaccgtgaatgtcatccttacagatgacaatgacaatgcaccacaatttcgagcaaccaaatacgaagtgaatatcgggtccagtgctgctaaagggacttcagtcgttaaagttcttgcaagtgatgccgatgagggctccaatgccgacatcacctatgccattgaagcagactctgaaagtgtaaaagagaatttggaaattaacaaactgtccggcgtaatcactacaaaggagagcctcattggcttggaaaatgaattcttcactttctttgttagagctgtggataatgggtctccatcaaaagaatctgttgttcttgtctatgttaaaatccttccaccggaaatgcagcttccaaaattttcagaacctttctatacctttacagtgtcagaggacgtgcctattggaacagagatagatctcatccgagcagaacatagtgggactgttctttacagcctggtcaaagggaatactccagaaagcaatagggatgagtcctttgtgattgacagacagagcgggagactgaagttggagaagagtcttgatcatgagacaactaagtggtatcagttttccatactggccaggtgcactcaagatgaccatgagatggtggcttctgtagatgttagtatccaagtgaaagatgcaaatgacaacagcccggtctttgaatctagtccatatgaggcattcattgttgaaaacctgccagggggaagtagagtaattcagatcagggcatctgatgctgactcaggaaccaacggccaagttatgtatagcctggatcagtcacaaagtgtggaagtcattgaatcctttgccattaacatggaaacaggctggattacaactttaaaggaacttgaccatgaaaagagagacaattaccagattaaagtggttgcatcagatcatggtgaaaagatccagctatcctccacagccattgtggatgttaccgtcaccgatgtcaacgatagtccaccacgattcacggccgagatctataaagggactgtgagtgaggatgacccccaaggtggggtgattgccatcttaagtaccacggatgctgattctgaagagatcaacagacaagttacatatttcataacaggaggggatcctttaggacagtttgccgttgaaactatacagaatgaatggaaggtatatgtgaagaaacctctagacagggaaaaaagggacaattaccttcttactatcacggcaactgatggcaccttctcatcaaaagcgatagttgaagtgaaagttctggatgcaaatgacaacagtccagtttgtgaaaagactttatattcagacactattcctgaagacgtccttcctggaaaattgatcatgcagatctctgctacagacgcagacatccgctctaacgctgaaattacttacacgttattgggttcaggtgcagaaaaattcaaactaaatccagacacaggtgaactgaaaacgtcaaccccccttgatcgtgaggagcaagctgtttatcatcttctcgtcagggccacagatggaggaggaagattctgccaagccagtattgtgctcacgctagaagatgtgaacgataacgcccccgaattctctgccgatccttatgccatcaccgtgtttgaaaacacagagccgggaacgctgctgacaagagtgcaggccacagatgccgacgcaggattaaatcggaagattttatactcactgattgactctgctgatgggcagttctccattaacgaattatctggaattattcagttagaaaaacctttggacagagaactccaggcagtatacaccctctctttgaaagctgtggatcaaggcttgccaaggaggctgactgccactggcactgtgattgtatcagttcttgacataaatgacaacccccctgtgtttgagtaccgtgaatatggtgccaccgtgtctgaggacattcttgttggaactgaagttcttcaagtgtatgcagcaagtcgggatattgaagcaaatgcagaaatcacctactcaataataagtggaaatgaacatgggaaattcagcatagattctaaaacaggggccgtatttatcattgagaatctggattatgagagctctcatgagtattacctaacagtagaggccactgatggaggcacgccttcactgagcgacgttgccactgtgaacgttaatgtaacagatatcaacgataatacccctgtgttcagccaagacacctacacgacagtcatcagtgaagatgccgttcttgagcagtctgtcatcacggttatggccgatgatgccgatggaccttccaacagccacatccactactcaattatagatggcaaccaaggaagctcgttcacaattgaccccgtcaggggagaagtcaaagtgaccaaacttctcgaccgagaaacgatttcaggttacacgctcacggttcaagcttctgataatggcagtccacccagagtcaacacgacgaccgtgaacatcgatgtgtccgatgtcaatgacaacgcgcccgtcttctccaggggaaactacagtgtcattatccaggaaaataagccagtgggcttcagcgtgctgcagctggtagtaacagatgaggattcttcccataacggtccacccttcttctttactattgtaactggaaatgatgagaaggcttttgaagttaacccgcaaggagtcctcctgacatcatctgccatcaagaggaaggagaaagatcattacttactgcaggtgaaggtggcagataatggaaagcctcagttgtcatctttgacatacattgacattagggtaattgaggagagcatctatccgcctgcgattttgcccctggagattttcatcacctcttctggagaagaatactcaggtggcgtcattgggaagatccatgccacagaccaggacgtgtatgatactctaacctacagtctcgaccctcagatggacaacctgttctctgtttccagcacagggggcaagctgatagcacacaaaaagctagacatagggcaataccttctcaatgtcagcgtaacagatgggaagttcacgacggtggccgacatcacagtgcatatcagacaagtcacacaggagatgttgaaccacaccatcgcgatccgctttgccaacctcactccggaagaattcgttggtgactactggcgcaacttccagcgagctttacggaacatcctgggtgtgaggaggaacgacatacagattgttagtttgcagtcctctgaacctcacccacatctggacgtcttactttttgtagagaaaccaggtagtgctcagatctcaacaaaacaacttctgcacaagattaactcttccgtgactgacattgaggaaatcattggagttaggatactgaatgtattccagaaactctgcgcgggactggactgcccctggaagttctgcgatgaaaaggtgtctgtggatgaaagtgtgatgtcaacacacagcacagccagactgagttttgtgactccccgccaccacagggcagcggtgtgtctctgcaaagagggaaggtgcccacctgtccaccatggctgtgaagatgatccgtgccctgagggatccgaatgtgtgtctgatccctgggaggagaaacacacctgtgtctgtcccagcggcaggtttggtcagtgcccagggagttcatctatgacactgactggaaacagctacgtgaaataccgtctgacggaaaatgaaaacaaattagagatgaaactgaccatgaggctcagaacatattccacgcatgcggttgtcatgtatgctcgaggaactgactatagcatcttggagattcatcatggaaggctgcagtacaagtttgactgtggaagtggccctggaattgtctctgttcagagcattcaggtcaatgatgggcagtggcacgcagtggccctggaagtgaatggaaactatgctcgcttggttctagaccaagttcatactgcatcgggcacagccccagggactctgaaaaccctgaacctggataactatgtgttttttggtggccacatccgtcagcagggaacaaggcatggaagaagtcctcaagttggtaatggtttcaggggttgtatggactccatttatttgaatgggcaggagctccctttaaacagcaaacccagaagctatgcacacatcgaagagtcggtggatgtatctccaggctgcttcctgacggccacggaagactgcgccagcaacccttgccagaatggaggcgtttgcaatccgtcacctgctggaggttattactgcaaatgcagtgccttgtacatagggacccactgtgagataagcgtcaatccgtgttcctccaagccatgcctctatgggggcacgtgtgttgtcgacaacggaggctttgtttgccagtgtagaggattatatactggtcagaggtgtcagcttagtccatactgcaaagatgaaccctgtaagaatggcggaacatgctttgacagtttggatggcgccgtttgtcagtgtgattcgggttttaggggagaaaggtgtcagagtgatatcgacgagtgctctggaaacccttgcctgcacggggccctctgtgagaacacgcacggctcctatcactgcaactgcagccacgagtacaggggacgtcactgcgaggatgctgcgcccaaccagtatgtgtccacgccgtggaacattgggttggcggaaggaattggaatcgttgtgtttgttgcagggatatttttactggtggtggtgtttgttctctgccgtaagatgattagtcggaaaaagaagcatcaggctgaacctaaagacaagcacctgggacccgctacggctttcttgcaaagaccgtattttgattccaagctaaataagaacatttactcagacataccaccccaggtgcctgtccggcctatttcctacaccccgagtattccaagtgactcaagaaacaatctggaccgaaattccttcgaaggatctgctatcccagagcatcccgaattcagcacttttaaccccgagtctgtgcacgggcaccgaaaagcagtggcggtctgcagcgtggcgccaaacctgcctcccccacccccttcaaactccccttctgacagcgactccatccagaagcctagctgggactttgactatgacacaaaagtggtggatcttgatccctgtctttccaagaagcctctagaggaaaagccttcccagccatacagtgcccgggaaagcctgtctgaagtgcagtctctgagctccttccagtccgaatcgtgcgatgacaatgggtatcactgggatacatcagattggatgccaagcgttcctctgccggacatacaagagttccccaactatgaggtgattgatgagcagacacccctgtactcagcagatccaaacgccatcgatacggactattaccctggaggctacgacatcgaaagtgattttcctccacccccagaagacttccccgcagctgatgagctaccaccgttaccgcccgaattcagcaatcagtttgaatccatccaccctcctagagacatgcctgccgcgggtagcttgggttcttcatcaagaaaccggcagaggttcaacttgaatcagtatttgcccaatttttatcccctcgatatgtctgaacctcaaacaaaaggcactggtgagaatagtacttgtagagaaccccatgccccttacccgccagggtatcaaagacacttcgaggcgcccgctgtcgagagcatgcccatgtctgtgtacgcctccaccgcctcctgctctgacgtgtcagcctgctgcgaagtggagtccgaggtcatgatgagtgactatgagagcggggacgacggccacttcgaagaggtgacgatcccgcccctggattcccagcagcacacggaagtctgactctcaactccccccaaagtgcctgactttagtgaacctagaggtgatgtgagtaatccgcgctgttctttgcagcagtgcttccaagctttttttggtgagccgaatgggcatggctgcgctggatcctgcgcctctggacgtgctagccatttccagtgtcccaactactgtcatcgtgaggttttcatcggctgtgccatttcccaacgtcttttgggatttacatctgtctgtgttaaaataatcaaacgaaaaatcagtcctgtgttgtcagcatgattcatgtatttatatagatttgattattttaattttcctgtctcttttttttgtaaattttatgtacagatttgatttttcatagttttaactagatttccaagatattttgtgcatttgtttcaactgaattttggtggtgtcagtgccattatctagcaccctgatttttttttttttactataaccagggtttcattctgtctttttccactgaagtgtgacattttgttagtacatttcagtgtagtcattcatttctagctgtacataggatgaaggagagatcagatacatgaacatgtcttacatgggttgctgtatttagaattataaacatttttcattattggaaagtgtaacggggaccttctgcatacctgtttagaaccaaaaccaccatgacacagtttttatagtgtctgtatatttgtgatgcaatggtcttgtaaaggtttttaatgaaaactaccattagccagtctttcttactgacaataaattattaataaaatacttgagcttta

SEQ ID NO: 7237 - DNA, 2224 bp, Homo sapiens
  source 1..2224: mol_type = unassigned DNA; mol_type = unassigned DNA
gcctgacatacgctggcgtatgctacagaggtctctcctcattcctgacttccttggcaggtgtcagagtgatatcgacgagtgctctggaaacccttgcctgcacggggccctctgtgagaacacgcacggctcctatcactgcaactgcagccacgagtacaggggacgtcactgcgaggatgctgcgcccaaccagtatgtgtccacgccgtggaacattgggttggcggaaggaattggaatcgttgtgtttgttgcagggatatttttactggtggtggtgtttgttctctgccgtaagatgattagtcggaaaaagaagcatcaggctgaacctaaagacaagcacctgggacccgctacggctttcttgcaaagaccgtattttgattccaagctaaataagaacatttactcagacataccaccccaggtgcctgtccggcctatttcctacaccccgagtattccaagtgactcaagaaacaatctggaccgaaattccttcgaaggatctgctatcccagagcatcccgaattcagcacttttaaccccgagtctgtgcacgggcaccgaaaagcagtggcggtctgcagcgtggcgccaaacctgcctcccccacccccttcaaactccccttctgacagcgactccatccagaagcctagctgggactttgactatgacacaaaagtggtggatcttgatccctgtctttccaagaagcctctagaggaaaagccttcccagccatacagtgcccgggaaagcctgtctgaagtgcagtctctgagctccttccagtccgaatcgtgcgatgacaatgggtatcactgggatacatcagattggatgccaagcgttcctctgccggacatacaagagttccccaactatgaggtgattgatgagcagacacccctgtactcagcagatccaaacgccatcgatacggactattaccctggaggctacgacatcgaaagtgattttcctccacccccagaagacttccccgcagctgatgagctaccaccgttaccgcccgaattcagcaatcagtttgaatccatccaccctcctagagacatgcctgccgcgggtagcttgggttcttcatcaagaaaccggcagaggttcaacttgaatcagtatttgcccaatttttatcccctcgatatgtctgaacctcaaacaaaaggcactggtgagaatagtacttgtagagaaccccatgccccttacccgccagggtatcaaagacacttcgaggcgcccgctgtcgagagcatgcccatgtctgtgtacgcctccaccgcctcctgctctgacgtgtcagcctgctgcgaagtggagtccgaggtcatgatgagtgactatgagagcggggacgacggccacttcgaagaggtgacgatcccgcccctggattcccagcagcacacggaagtctgactctcaactccccccaaagtgcctgactttagtgaacctagaggtgatgtgagtaatccgcgctgttctttgcagcagtgcttccaagctttttttggtgagccgaatgggcatggctgcgctggatcctgcgcctctggacgtgctagccatttccagtgtcccaactactgtcatcgtgaggttttcatcggctgtgccatttcccaacgtcttttgggatttacatctgtctgtgttaaaataatcaaacgaaaaatcagtcctgtgttgtcagcatgattcatgtatttatatagatttgattattttaattttcctgtctcttttttttgtaaattttatgtacagatttgatttttcatagttttaactagatttccaagatattttgtgcatttgtttcaactgaattttggtggtgtcagtgccattatctagcaccctgatttttttttttttactataaccagggtttcattctgtctttttccactgaagtgtgacattttgttagtacatttcagtgtagtcattcatttctagctgtacataggatgaaggagagatcagatacatgaacatgtcttacatgggttgctgtatttagaattataaacatttttcattattggaaagtgtaacggggaccttctgcatacctgtttagaaccaaaaccaccatgacacagtttttatagtgtctgtatatttgtgatgcaatggtcttgtaaaggtttttaatgaaaactaccattagccagt

SEQ ID NO: 7238 - DNA, 1305 bp, Homo sapiens
  source 1..1305: mol_type = unassigned DNA; mol_type = unassigned DNA
tgattccaagctaaataagaacatttactcagacataccaccccaggtgcctgtccggcctatttcctacaccccgagtattccaagtgactcaagaaacaatctggaccgaaattccttcgaaggatctgctatcccagagcatcccgaattcagcacttttaaccccgagtctgtgcacgggcaccgaaaagcagtggcggtctgcagcgtggcgccaaacctgcctcccccacccccttcaaactccccttctgacagcgactccatccagaagcctagctgggactttgactatgacacaaaagtggtggatcttgatccctgtctttccaagaagcctctagaggaaaagccttcccagccatacagtgcccgggaaagcctgtctgaagtgcagtctctgagctccttccagtccgaatcgtgcgatgacaatgaatctttggctgctcctgacctcagcaaaccaagagggtatcactgggatacatcagattggatgccaagcgttcctctgccggacatacaagagttccccaactatgaggtgattgatgagcagacacccctgtactcagcagatccaaacgccatcgatacggactattaccctggaggctacgacatcgaaagtgattttcctccacccccagaagacttccccgcagctgatgagctaccaccgttaccgcccgaattcagcaatcagtttgaatccatccaccctcctagagacatgcctgccgcgggtagcttgggttcttcatcaagaaaccggcagaggttcaacttgaatcagtatttgcccaatttttatcccctcgatatgtctgaacctcaaacaaaaggcactggtgagaatagtacttgtagagaaccccatgccccttacccgccagggtatcaaagacacttcgaggcgcccgctgtcgagagcatgcccatgtctgtgtacgcctccaccgcctcctgctctgacgtgtcagcctgctgcgaagtggagtccgaggtcatgatgagtgactatgagagcggggacgacggccacttcgaagaggtgacgatcccgcccctggattcccagcagcacacggaagtctgactctcaactccccccaaagtgcctgactttagtgaacctagaggtgatgtgagtaatccgcgctgttctttgcagcagtgcttccaagctttttttggtgagccgaatgggcatggctgcgctggatcctgcgcctctggacgtgctagccatttccagtgtcccaactactgtcatcgtgaggttttcatcggctgtgc

SEQ ID NO: 7239 - DNA, 854 bp, Homo sapiens
  source 1..854: mol_type = unassigned DNA; mol_type = unassigned DNA
gtcgacaacggaggctttgtttgccagtgtagaggattatatactggtcagaggtgtcagcttagtccatactgcaaagatgaaccctgtaagaatggcggaacatgctttgacagtttggatggcgccgtttgtcagtgtgattcgggttttaggggagaaaggtgtcagagtgatatcgacgagtgctctggaaacccttgcctgcacggggccctctgtgagaacacgcacggctcctatcactgcaactgcagccacgagtacaggggacgtcactgcgaggatgctgcgcccaaccacaaaagtggtggatcttgatccctgtctttccaagaagcctctagaggaaaagccttcccagccatacagtgcccgggaaagcctgtctgaagtgcagtctctgagctccttccagtccgaatcgtgcgatgacaatgggtatcactgggatacatcagattggatgccaagcgttcctctgccggacatacaagagttccccaactatgaggtgattgatgagcagacacccctgtactcagcagatccaaacgccatcgatacggactattaccctggaggctacgacatcgaaagtgattttcctccacccccagaagacttccccgcagctgatgagctaccaccgttaccgcccgaattcagcaatcagtttgaatccatccaccctcctagagacatgcctgccgcgggtagcttgggttcttcatcaagaaaccggcagaggttcaacttgaatcagtatttgcccaatttttatcccctcgatatgtctgaacctcaaacaaaaggcactggtgagaatagtacttgtagagaaccccatgccc

SEQ ID NO: 7240 - DNA, 479 bp, Homo sapiens
  source 1..479: mol_type = unassigned DNA; mol_type = unassigned DNA
gcctgtctgaagtgcagtctctgagctccttccagtccgaatcgtgcgatgacaatggctgtgattgtcagaaacaaggaaaagaaagtaatatttgagttttctggccaaatttctggttcctcattccgcagtcactttcctccacttccatattccattttatttgtggtacatacatttctcagccatttggaattgtcatagatactggcgtaaggacatgctgtatggctgattgggcctctggtatcactgggatacatcagattggatgccaagcgttcctctgccggacatacaagagttccccaactatgaggtgattgatgagcagacacccctgtactcagcagatccaaacgccatcgatacggactattaccctggaggctacgacatcgaaagtgattttcctccacccccagaagacttccccgcagctgatgagctaccaccgttaccgcccgaattcagca

SEQ ID NO: 7241 - DNA, 357 bp, Homo sapiens
  source 1..357: mol_type = unassigned DNA; mol_type = unassigned DNA
ctttccaagaagcctctagaggaaaagccttcccagccatacagtgcccgggaaagcctgtctgaagtgcagtctctgagctccttccagtccgaatcgtgcgatgacaatgcttccatagtgaccgtaatgcaccttgtcaatgctgtggttgacacggtgagcacagaagaatctttggctgctcctgacctcagcaaaccaagagggtatcactgggatacatcagattggatgccaagcgttcctctgccggacatacaagagttccccaactatgaggtgattgatgagcagacacccctgtactcagcagatccaaacgccatcgatacggactattaccctggaggctac

SEQ ID NO: 7242 - DNA, 428 bp, Homo sapiens
  source 1..428: mol_type = unassigned DNA; mol_type = unassigned DNA
aggttattactgcaaatgcagtgccttgtacatagggacccactgtgagataagcgtcaatccgtgttcctccaagccatgcctctatgggggcacgtgtgttgtcgacaacggaggctttgtttgccagtgtagaggattatatactggtcagaggtgtcagcttagtccatactgcaaagatgaaccctgtaagaatggcggaacatgctttgacagtttggatggcgccgtttgtcagtgtgattcgggttttaggggagaaagctcatcaaggagggattagtcttcagtctctaaggattgagcctgacatacgctggcgtatgctacagaggtctctcctcattcctgacttccttggcaggtgtcagagtgatatcgacgagtgctctggaaacccttgcctgcacggggccctctgtgag

SEQ ID NO: 7243 - DNA, 512 bp, Homo sapiens
  source 1..512: mol_type = unassigned DNA; mol_type = unassigned DNA
cagatgtgatgatctcctttcttaaatctttacatgtttgagaggctgaggcaggaggatcacttgaggctagaagtgaggcagcctgggcgttacagggaaaccccatctctacaaaaacttaaaaaatcagccaggcatgtggcatgcctctagttccagctactcaggaggctgaggtgggaggatccctgagcccgggagtttgaggatgcaatgagctgagattgcgccactgcactccagcctgggtggcagagcgagaccctgtctcaaaaaataaaaatattgaaaggttattactgcaaatgcagtgccttgtacatagggacccactgtgagataagcgtcaatccgtgttcctccaagccatgcctctatgggggcacgtgtgttgtcgacaacggaggctttgtttgccagtgtagaggattatatactggtcagaggtgtcagcttagtccatactgcaaagatgaaccctgtaagaatggcggaacatgctttgacag

SEQ ID NO: 7244 - DNA, 462 bp, Homo sapiens
  source 1..462: mol_type = unassigned DNA; mol_type = unassigned DNA
aattttatactgaacatttttatatttaatctttcattactttagaattcatttctctgtgatgcagtcgtcaaatttattctttccaaacagagagccagtcatgctgggcttttcattaagcaaatagacgttttcccacagaattggatagtaaaatgttatcatcttaaataaaaccctaaatcagtctcaaggggtgcaggggagtcatactttaaaaaatatgcttaaacttggttctggtttattttttcctctgtgtgattcacagggagttcatctatgacactgactggaaacagctacgtgaaataccgtctgacggaaaatgaaaacaaattagagatgaaactgaccatgaggctcagaacatattccacgcatgcggttgtcatgtatgctcgaggaactgactatagcatcttggagattcatcatggaaggctgcagtacaagttt

SEQ ID NO: 7245 - DNA, 341 bp, Homo sapiens
  source 1..341: mol_type = unassigned DNA; mol_type = unassigned DNA
tgggaaaatgtggtggcattgcagaatgctggaagtaattttgatttctattcaggggccgtatttatcattgagaatctggattatgagagctctcatgagtattacctaacagtagaggccactgatggaggcacgccttcactgagcgacgttgccactgtgaacgttaatgtaacagatatcaacgataatacccctgtgttcagccaagacacctacacgacagtcatcagtgaagatgccgttcttgagcagtctgtcatcacggttatggccgatgatgccgatggaccttccaacagccacatccactactcaattatagatggcaaccaagg

SEQ ID NO: 7246 - DNA, 1852 bp, Homo sapiens
  source 1..1852: mol_type = unassigned DNA; mol_type = unassigned DNA
aagggggagggagtggggaaagaggcagcgagtcgccgcagccggcggccgcaactcctcaactcggcggctggctgcctgggcacgtcctgacaaacttggctgctcccgggccctcgttccggccccgcgcactctcttttcgcctgcgtttggtgcttaagtttgccctggtcggaagcctccggagatgcggccgcctgggtcccggcggcacggacgttggcactctggttagggacatgctgaagatcccggggaggcaaagttggtacttcaaacccggctcttaacacatatctacaccgcgaggggatcacggagctgccgaggactttagagcccagggccgaggactcggctagactgattcccgacagttaagcaatggggagacatttggctttgctcctgcttctgctccttctcttccaacattttggagacagtgatggcagccaacgacttgaacagactcctctgcagtttacacacctcgagtacaacgtcaccgtgcaggagaactctgcagctaagacttatgtggggcatcctgtcaagatgggtgtttacattacacatccagcgtgggaagtaaggtacaaaattgtttccggagacagtgaaaacctgttcaaagctgaagagtacattctcggagacttttgctttctaagaataaggaccaaaggaggaaatacagctattcttaatagagaagtgaaggatcactacacattgatagtgaaagcacttgaaaaaaatactaatgtggaggcgcgaacaaaggtcagggtgcaggtgctggatacaaatgacttgagaccgttattctcacccacctcatacagcgtttctttacctgaaaacacagctataaggaccagtatcgcaagagtcagcgccacggatgcagacataggaaccaacggggaattttactacagttttaaagatcgaacagatatgtttgctattcacccaaccagtggtgtgatagtgttaactggtagacttgattacctagagaccaagctctatgagatggaaatcctcgctgcggaccgtggcatgaagttgtatgggagcagtggcatcagcagcatggccaagctaacggtgcacatcgaacaggccaatgaatgtgctccggtgataacagcagtgacattgtcaccatcagaactggacagggacccagcatatgcaattgtgacagtggatgactgcgatcagggtgccaatggtgacatagcatctttaagcatcgtggcaggtgaccttctccagcagtttagaacagtgaggtcctttccagggagtaaggagtataaagtcaaagccatcggtggcattgattgggacagtcatcctttcggctacaatctcacactacaggctaaagataaaggaactccgccccagttctcttctgttaaagtcattcacgtgacttctccacagttcaaagccgggccagtcaagtttgaaaaggatgtttacagagcagaaataagtgaatttgctcctcccaacacacctgtggtcatggtaaaggccattcctgcttattcccatttgaggtatgtttttaaaagtacacctggaaaagctaaattcagtttaaattacaacactggtctcatttctattttagaaccagttaaaagacagcaggcagcccattttgaacttgaagtaacaacaagtgacagaaaagcgtccaccaaggtcttggtgaaagtcttaggtgcaaatagcaatccccctgaatttacccagacagcgtacaaagctgcttttgatgagaacgtgcccattggtactactgtcatgagcctgagtgccgtag

SEQ ID NO: 7247 - DNA, 14758 bp, Homo sapiens
  source 1..14758: mol_type = unassigned DNA; mol_type = unassigned DNA
ctgggcggccgggcgcggggagagggcgcgggagcggctcgtgcggcaggtaccatgcggacgcgcgagcccggcgagggccccggcaggcccggtccctgctcgggggcgcgctgagacggcgggtgagctccacgagagcgccgtcgccacttcgggccaactttgcgattcccgacagttaagcaatggggagacatttggctttgctcctgcttctgctccttctcttccaacattttggagacagtgatggcagccaacgacttgaacagactcctctgcagtttacacacctcgagtacaacgtcaccgtgcaggagaactctgcagctaagacttatgtggggcatcctgtcaagatgggtgtttacattacacatccagcgtgggaagtaaggtacaaaattgtttccggagacagtgaaaacctgttcaaagctgaagagtacattctcggagacttttgctttctaagaataaggaccaaaggaggaaatacagctattcttaatagagaagtgaaggatcactacacattgatagtgaaagcacttgaaaaaaatactaatgtggaggcgcgaacaaaggtcagggtgcaggtgctggatacaaatgacttgagaccgttattctcacccacctcatacagcgtttctttacctgaaaacacagctataaggaccagtatcgcaagagtcagcgccacggatgcagacataggaaccaacggggaattttactacagttttaaagatcgaacagatatgtttgctattcacccaaccagtggtgtgatagtgttaactggtagacttgattacctagagaccaagctctatgagatggaaatcctcgctgcggaccgtggcatgaagttgtatgggagcagtggcatcagcagcatggccaagctaacggtgcacatcgaacaggccaatgaatgtgctccggtgataacagcagtgacattgtcaccatcagaactggacagggacccagcatatgcaattgtgacagtggatgactgcgatcagggtgccaatggtgacatagcatctttaagcatcgtggcaggtgaccttctccagcagtttagaacagtgaggtcctttccagggagtaaggagtataaagtcaaagccatcggtggcattgattgggacagtcatcctttcggctacaatctcacactacaggctaaagataaaggaactccgccccagttctcttctgttaaagtcattcacgtgacttctccacagttcaaagccgggccagtcaagtttgaaaaggatgtttacagagcagaaataagtgaatttgctcctcccaacacacctgtggtcatggtaaaggccattcctgcttattcccatttgaggtatgtttttaaaagtacacctggaaaagctaaattcagtttaaattacaacactggtctcatttctattttagaaccagttaaaagacagcaggcagcccattttgaacttgaagtaacaacaagtgacagaaaagcgtccaccaaggtcttggtgaaagtcttaggtgcaaatagcaatccccctgaatttacccagacagcgtacaaagctgcttttgatgagaacgtgcccattggtactactgtcatgagcctgagtgccgtagaccctgatgagggtgagaacgggtacgtgacatacagtatcgcaaatttaaatcatgtgccgtttgcgattgaccatttcactggtgccgtgagtacgtcagaaaacctggactacgaactgatgcctcgggtttatactctgaggattcgtgcatcagactggggcttgccgtaccgccgggaagtcgaagtccttgctacaattactctcaataacttgaatgacaacacacctttgtttgagaaaataaattgtgaagggacaattcccagagatctaggcgtgggagagcaaataaccactgtttctgctattgatgcagatgaacttcagttggtacagtatcagattgaagctggaaatgaactggatttctttagtttaaaccccaactcgggggtattgtcattaaagcgatcgctaatggatggcttaggtgcaaaggtgtctttccacagtctgagaatcacagctacagatggagaaaattttgccacaccattatatatcaacataacagtggctgccagtcacaagctggtaaacttgcagtgtgaagagactggtgttgccaaaatgctggcagagaagctcctgcaggcaaataaattacacaaccagggagaggtggaggatattttcttcgattctcactctgtcaatgctcacataccgcagtttagaagcactcttccgactggtattcaggtaaaggaaaaccagcctgtgggttccagtgtaattttcatgaactccactgaccttgacactggcttcaatggaaaactggtctatgctgtttctggaggaaatgaggatagttgcttcatgattgatatggaaacaggaatgctgaaaattttatctcctcttgaccgtgaaacaacagacaaatacaccctgaatattaccgtctatgaccttgggataccccagaaggctgcgtggcgtcttctacatgtcgtggttgtcgatgccaatgataatccacccgagtttttacaggagagctattttgtggaagtgagtgaagacaaggaggtacatagtgaaatcatccaggttgaagccacagataaagacctggggcccaacggacacgtgacgtactcaattgttacagacacagacacattttcaattgacagcgtgacgggtgttgttaacatcgcacgccctctggatcgagagctgcagcatgagcactccttaaagattgaggccagggaccaagccagagaagagcctcagctgttctccactgtcgttgtgaaagtatcactagaagatgttaatgacaacccacctacatttattccacctaattatcgtgtgaaagtccgagaggatcttccagaaggaaccgtcatcatgtggttagaagcccacgatcctgatttaggtcagtctggtcaggtgagatacagccttctggaccacggagaaggaaacttcgatgtggataaactcagtggagcagttaggatcgtccagcagttggactttgagaagaagcaagtgtataatctcactgtgagggccaaagacaagggaaagccagtttctctgtcttctacttgctatgttgaagttgaggtggttgatgtgaatgagaacctgcacccacccgtgttttccagctttgtggaaaaggggacagtgaaagaagatgcacctgttggttcattggtaatgacggtgtcggctcatgatgaggacgccagaagagatggggagatccgatactccattagagatggctctggcgttggtgttttcaaaataggtgaagagacaggtgtcatagagacgtcagatcgactggaccgtgaatcgacctcccattattggctaacagtctttgcaaccgatcagggtgtcgtgcctctttcatcgttcatagagatctacatagaggttgaggatgtcaatgacaatgcaccacagacatcagagcctgtttattacccagaaatcatggaaaattctcctaaagatgtatctgtggtccagatcgaggcatttgatccagattcgagctctaatgacaagctcatgtacaaaattacaagtggaaatccacaaggattcttttcaatacatcctaaaacaggtctcatcacaactacgtcaaggaagctagaccgagaacagcaagatgaacacatattagaggttactgtgacagacaatggtagtccccccaaatcaaccattgcaagagtcattgtgaaaatccttgatgaaaatgacaacaaacctcagtttctgcaaaagttctacaaaatcagactccctgagcgggaaaagccagaccgagaaagaaatgccagacgggagccgctctatcacgtcatagccaccgacaaggatgagggccccaatgcagaaatctcctacagcatcgaagacgggaatgagcatggcaaatttttcatcgaaccgaaaactggagtggtttcgtccaagaggttttcagcagctggagaatatgatattctttcaattaaggcagttgacaatggtcgccctcaaaagtcatcaaccaccagactccatattgaatggatctccaagcccaaaccgtccctggagcccatttcatttgaagaatcattttttacctttactgtgatggaaagtgaccccgttgctcacatgattggagtaatatctgtggagcctcctggcatacccctttggtttgacatcactggtggcaactacgacagtcacttcgatgtggacaagggaactggaaccatcattgttgccaaacctcttgatgcagaacagaagtcaaactacaacctcacagtcgaggctacagatggaaccaccactatcctcactcaggtattcatcaaagtaatagacacaaatgaccatcgtcctcagttttctacatcaaagtatgaagttgttattcctgaagatacagcgccagaaacagaaattttgcaaatcagtgctgtggatcaggatgagaaaaacaaactaatctacactctgcagagcagtagagatccactgagtctcaagaaatttcgtcttgatcctgcaaccggctctctctatacttctgagaaactggatcatgaagctgttccagcacacctcacggtcatggtacgagatcaagatgtgcctgtaaaacgcaactttgcaaggattgtggtcaatgtcagcgacacgaatgaccacgccccgtggttcaccgcttcctcctacaaagggcgggtttatgaatcggcagccgttggctcagttgtgttgcaggtgacggctctggacaaggacaaagggaaaaatgctgaagtgctgtactcgatcgagtcaggtacttttggaaatattggaaattcttttatgattgatcctgtcttgggctctattaaaactgccaaagaattagatcgaagtaaccaagcggagtatgatttaatggtaaaagctacagataagggcagtccaccaatgagtgaaataacttctgtgcgtatctttgtcacaattgctgacaacgcctctccgaagtttacatcaaaagaatattctgttgaacttagtgaaactgtcagcattgggagtttcgttgggatggttacagcccatagtcaatcatcagtggtgtatgaaataaaagatggaaatacaggtgatgcttttgatattaatccacattctggaactatcatcactcagaaagccctggactttgaaactttgcccatttacacattgataatacaaggaactaacatggctggtttgtccactaatacaacggttctagttcacttgcaggatgagaatgacaacgcgccagtttttatgcaggcagaatatacaggactcattagtgaatcagcctcaattaacagcgtggtcctaacagacaggaatgtcccactggtgattcgagcagctgatgctgataaagactcaaatgctttgcttgtatatcacattgttgaaccatctgtacacacatattttgctattgattctagcactggtgctattcatacagtactaagtctggactatgaagaaacaagtatttttcactttaccgtccaagtgcatgacatgggaaccccacgtttatttgctgagtatgcagcgaatgtaacagtacatgtaattgacattaatgactgcccccctgtgtttgccaagccattatatgaagcatctcttttgttaccaacatacaaaggagtaaaagtcatcacagtaaatgctacagatgctgattcaagtgcattctcacagttgatttactccatcaccgaaggcaacatcggggagaagttttctatggactacaagactggtgctctcactgtccaaaacacaactcagttaagaagccgctacgagctaaccgttagagcttccgatggcagatttgccggccttacctctgtcaaaattaatgtgaaagaaagcaaagaaagtcacctaaagtttacccaggatgtctactctgcggtagtgaaagagaattccaccgaggccgaaacattagctgtcattactgctattgggaatccaatcaatgagcctttgttttatcacatcctcaacccagatcgcagatttaaaataagccgcacttcaggagttctgtcaaccactggcacgcccttcgatcgtgagcagcaggaggcgtttgatgtggttgtagaagtgacagaggaacataagccttctgcagtggcccacgttgtcgtgaaggtcattgtagaagaccaaaatgataatgcgccggtgtttgtcaaccttccctactacgccgttgttaaagtggacactgaggtgggccatgtcattcgctatgtcactgctgtagacagagacagtggcagaaacggggaagtgcattactacctcaaggaacatcatgaacactttcaaattggacccttgggtgaaatttcactgaaaaagcaatttgagcttgacaccttaaataaagaatatcttgttacagtggttgcaaaagatggagggaacccggccttttcagcggaagttatcgttccgatcactgtcatgaataaagccatgcctgtgtttgaaaaacctttctacagtgcagagattgcagagagcatccaggtgcacagccctgtggtccacgtgcaggctaacagcccggaaggcctgaaagtgttctacagcatcacagacggagaccctttcagccagttcactattaacttcaatactggagttatcaatgtcatagctcctctggactttgaggcccacccggcatataagctgagcatacgcgcaactgactccttgacgggcgctcatgctgaagtatttgtggacatcatagtagacgacatcaatgataaccctcctgtgtttgctcagcagtcttatgcggtgaccctgtctgaggcatctgtaattggaacgtctgttgttcaagttagagccaccgattctgattcagaaccaaatagaggaatctcataccagatgtttgggaatcacagcaagagtcatgatcattttcatgtagacagcagcactggcctcatctcactactcagaaccctggattacgagcagtcccggcagcacacgatttttgtgagggcagttgatggtggtatgcccacgctgagcagtgatgtgattgtcacggtggacgttaccgacctcaatgataatccaccactctttgaacaacagatttatgaagccagaattagcgagcacgcccctcatgggcatttcgtgacctgtgtaaaagcctatgatgcagacagttcagacatagacaagttgcagtattccattctgtctggcaatgatcataaacattttgtcattgacagtgcaacagggattatcaccctctcaaacctgcaccggcacgccctgaagccattttacagtcttaacctgtcagtgtctgatggagtttttagaagttccacccaggttcatgtaactgtaattggaggcaatttgcacagtcctgctttccttcagaacgaatatgaagtggaactagctgaaaacgctcccctacataccctggtgatggaggtgaaaactacggatggggattctggtatttatggtcacgttacttaccatattgtaaatgactttgccaaagacagattttacataaatgagagaggacagatatttactttggaaaaacttgatcgagaaaccccggcggagaaagtgatctcagtccgtttaatggctaaggatgctggaggaaaagttgctttctgcaccgtgaatgtcatccttacagatgacaatgacaatgcaccacaatttcgagcaaccaaatacgaagtgaatatcgggtccagtgctgctaaagggacttcagtcgttaaagttcttgcaagtgatgccgatgagggctccaatgccgacatcacctatgccattgaagcagactctgaaagtgtaaaagagaatttggaaattaacaaactgtccggcgtaatcactacaaaggagagcctcattggcttggaaaatgaattcttcactttctttgttagagctgtggataatgggtctccatcaaaagaatctgttgttcttgtctatgttaaaatccttccaccggaaatgcagcttccaaaattttcagaacctttctatacctttacagtgtcagaggacgtgcctattggaacagagatagatctcatccgagcagaacatagtgggactgttctttacagcctggtcaaagggaatactccagaaagcaatagggatgagtcctttgtgattgacagacagagcgggagactgaagttggagaagagtcttgatcatgagacaactaagtggtatcagttttccatactggccaggtgcactcaagatgaccatgagatggtggcttctgtagatgttagtatccaagtgaaagatgcaaatgacaacagcccggtctttgaatctagtccatatgaggcattcattgttgaaaacctgccagggggaagtagagtaattcagatcagggcatctgatgctgactcaggaaccaacggccaagttatgtatagcctggatcagtcacaaagtgtggaagtcattgaatcctttgccattaacatggaaacaggctggattacaactttaaaggaacttgaccatgaaaagagagacaattaccagattaaagtggttgcatcagatcatggtgaaaagatccagctatcctccacagccattgtggatgttaccgtcaccgatgtcaacgatagtccaccacgattcacggccgagatctataaagggactgtgagtgaggatgacccccaaggtggggtgattgccatcttaagtaccacggatgctgattctgaagagatcaacagacaagttacatatttcataacaggaggggatcctttaggacagtttgccgttgaaactatacagaatgaatggaaggtatatgtgaagaaacctctagacagggaaaaaagggacaattaccttcttactatcacggcaactgatggcaccttctcatcaaaagcgatagttgaagtgaaagttctggatgcaaatgacaacagtccagtttgtgaaaagactttatattcagacactattcctgaagacgtccttcctggaaaattgatcatgcagatctctgctacagacgcagacatccgctctaacgctgaaattacttacacgttattgggttcaggtgcagaaaaattcaaactaaatccagacacaggtgaactgaaaacgtcaaccccccttgatcgtgaggagcaagctgtttatcatcttctcgtcagggccacagatggaggaggaagattctgccaagccagtattgtgctcacgctagaagatgtgaacgataacgcccccgaattctctgccgatccttatgccatcaccgtgtttgaaaacacagagccgggaacgctgctgacaagagtgcaggccacagatgccgacgcaggattaaatcggaagattttatactcactgattgactctgctgatgggcagttctccattaacgaattatctggaattattcagttagaaaaacctttggacagagaactccaggcagtatacaccctctctttgaaagctgtggatcaaggcttgccaaggaggctgactgccactggcactgtgattgtatcagttcttgacataaatgacaacccccctgtgtttgagtaccgtgaatatggtgccaccgtgtctgaggacattcttgttggaactgaagttcttcaagtgtatgcagcaagtcgggatattgaagcaaatgcagaaatcacctactcaataataagtggaaatgaacatgggaaattcagcatagattctaaaacaggggccgtatttatcattgagaatctggattatgagagctctcatgagtattacctaacagtagaggccactgatggaggcacgccttcactgagcgacgttgccactgtgaacgttaatgtaacagatatcaacgataatacccctgtgttcagccaagacacctacacgacagtcatcagtgaagatgccgttcttgagcagtctgtcatcacggttatggccgatgatgccgatggaccttccaacagccacatccactactcaattatagatggcaaccaaggaagctcgttcacaattgaccccgtcaggggagaagtcaaagtgaccaaacttctcgaccgagaaacgatttcaggttacacgctcacggttcaagcttctgataatggcagtccacccagagtcaacacgacgaccgtgaacatcgatgtgtccgatgtcaatgacaacgcgcccgtcttctccaggggaaactacagtgtcattatccaggaaaataagccagtgggcttcagcgtgctgcagctggtagtaacagatgaggattcttcccataacggtccacccttcttctttactattgtaactggaaatgatgagaaggcttttgaagttaacccgcaaggagtcctcctgacatcatctgccatcaagaggaaggagaaagatcattacttactgcaggtgaaggtggcagataatggaaagcctcagttgtcatctttgacatacattgacattagggtaattgaggagagcatctatccgcctgcgattttgcccctggagattttcatcacctcttctggagaagaatactcaggtggcgtcattgggaagatccatgccacagaccaggacgtgtatgatactctaacctacagtctcgaccctcagatggacaacctgttctctgtttccagcacagggggcaagctgatagcacacaaaaagctagacatagggcaataccttctcaatgtcagcgtaacagatgggaagttcacgacggtggccgacatcacagtgcatatcagacaagtcacacaggagatgttgaaccacaccatcgcgatccgctttgccaacctcactccggaagaattcgttggtgactactggcgcaacttccagcgagctttacggaacatcctgggtgtgaggaggaacgacatacagattgttagtttgcagtcctctgaacctcacccacatctggacgtcttactttttgtagagaaaccaggtagtgctcagatctcaacaaaacaacttctgcacaagattaactcttccgtgactgacattgaggaaatcattggagttaggatactgaatgtattccagaaactctgcgcgggactggactgcccctggaagttctgcgatgaaaaggtgtctgtggatgaaagtgtgatgtcaacacacagcacagccagactgagttttgtgactccccgccaccacagggcagcggtgtgtctctgcaaagagggaaggtgcccacctgtccaccatggctgtgaagatgatccgtgccctgagggatccgaatgtgtgtctgatccctgggaggagaaacacacctgtgtctgtcccagcggcaggtttggtcagtgcccagggagttcatctatgacactgactggaaacagctacgtgaaataccgtctgacggaaaatgaaaacaaattagagatgaaactgaccatgaggctcagaacatattccacgcatgcggttgtcatgtatgctcgaggaactgactatagcatcttggagattcatcatggaaggctgcagtacaagtttgactgtggaagtggccctggaattgtctctgttcagagcattcaggtcaatgatgggcagtggcacgcagtggccctggaagtgaatggaaactatgctcgcttggttctagaccaagttcatactgcatcgggcacagccccagggactctgaaaaccctgaacctggataactatgtgttttttggtggccacatccgtcagcagggaacaaggcatggaagaagtcctcaagttggtaatggtttcaggggttgtatggactccatttatttgaatgggcaggagctccctttaaacagcaaacccagaagctatgcacacatcgaagagtcggtggatgtatctccaggctgcttcctgacggccacggaagactgcgccagcaacccttgccagaatggaggcgtttgcaatccgtcacctgctggaggttattactgcaaatgcagtgccttgtacatagggacccactgtgagataagcgtcaatccgtgttcctccaagccatgcctctatgggggcacgtgtgttgtcgacaacggaggctttgtttgccagtgtagaggattatatactggtcagaggtgtcagcttagtccatactgcaaagatgaaccctgtaagaatggcggaacatgctttgacagtttggatggcgccgtttgtcagtgtgattcgggttttaggggagaaaggtgtcagagtgatatcgacgagtgctctggaaacccttgcctgcacggggccctctgtgagaacacgcacggctcctatcactgcaactgcagccacgagtacaggggacgtcactgcgaggatgctgcgcccaaccagtatgtgtccacgccgtggaacattgggttggcggaaggaattggaatcgttgtgtttgttgcagggatatttttactggtggtggtgtttgttctctgccgtaagatgattagtcggaaaaagaagcatcaggctgaacctaaagacaagcacctgggacccgctacggctttcttgcaaagaccgtattttgattccaagctaaataagaacatttactcagacataccaccccaggtgcctgtccggcctatttcctacaccccgagtattccaagtgactcaagaaacaatctggaccgaaattccttcgaaggatctgctatcccagagcatcccgaattcagcacttttaaccccgagtctgtgcacgggcaccgaaaagcagtggcggtctgcagcgtggcgccaaacctgcctcccccacccccttcaaactccccttctgacagcgactccatccagaagcctagctgggactttgactatgacacaaaagtggtggatcttgatccctgtctttccaagaagcctctagaggaaaagccttcccagccatacagtgcccgggaaagcctgtctgaagtgcagtctctgagctccttccagtccgaatcgtgcgatgacaatgggtatcactgggatacatcagattggatgccaagcgttcctctgccggacatacaagagttccccaactatgaggtgattgatgagcagacacccctgtactcagcagatccaaacgccatcgatacggactattaccctggaggctacgacatcgaaagtgattttcctccacccccagaagacttccccgcagctgatgagctaccaccgttaccgcccgaattcagcaatcagtttgaatccatccaccctcctagagacatgcctgccgcgggtagcttgggttcttcatcaagaaaccggcagaggttcaacttgaatcagtatttgcccaatttttatcccctcgatatgtctgaacctcaaacaaaaggcactggtgagaatagtacttgtagagaaccccatgccccttacccgccagggtatcaaagacacttcgaggcgcccgctgtcgagagcatgcccatgtctgtgtacgcctccaccgcctcctgctctgacgtgtcagcctgctgcgaagtggagtccgaggtcatgatgagtgactatgagagcggggacgacggccacttcgaagaggtgacgatcccgcccctggattcccagcagcacacggaagtctgactctcaactccccccaaagtgcctgactttagtgaacctagaggtgatgtgagtaatccgcgctgttctttgcagcagtgcttccaagctttttttggtgagccgaatgggcatggctgcgctggatcctgcgcctctggacgtgctagccatttccagtgtcccaactactgtcatcgtgaggttttcatcggctgtgccatttcccaacgtcttttgggatttacatctgtctgtgttaaaataatcaaacgaaaaatcagtcctgtgttgtcagcatgattcatgtatttatatagatttgattattttaattttcctgtctcttttttttgtaaattttatgtacagatttgatttttcatagttttaactagatttccaagatattttgtgcatttgtttcaactgaattttggtggtgtcagtgccattatctagcaccctgatttttttttttttactataaccagggtttcattctgtctttttccactgaagtgtgacattttgttagtacatttcagtgtagtcattcatttctagctgtacataggatgaaggagagatcagatacatgaacatgtcttacatgggttgctgtatttagaattataaacatttttcattattggaaagtgtaacggggaccttctgcatacctgtttagaaccaaaaccaccatgacacagtttttatagtgtctgtatatttgtgatgcaatggtcttgtaaaggtttttaatgaaaactaccattagccagtctttcttactgacaataaattattaataaaat

SEQ ID NO: 7248 - DNA, 4839 bp, Homo sapiens
  source 1..4839: mol_type = unassigned DNA; mol_type = unassigned DNA
aggcgccaatgcccaggtggtttactctctgccggattcagccgaaggccacttttccatcgacgccaccacgggggtgatccgcctggaaaagccgctgcaggtcaggccccaggcaccactggagctcacggtccgtgcctctgacctgggcaccccaataccgctgtccacgctgggcaccgtcacagtctcggtggtgggcctagaagactacctgcccgtgttcctgaacaccgagcacagcgtgcaggtgcccgaggacgccccacctggcacggaggtgctgcagctggccaccctcactcgcccgggcgcagagaagaccggctaccgcgtggtcagcgggaacgagcaaggcaggttccgcctggatgctcgcacagggatcctgtatgtcaacgcaagcctggactttgagacaagccccaagtacttcctgtccattgagtgcagccggaagagctcctcttccctcagtgacgtgaccacagtcatggtcaacatcactgatgtcaatgaacaccggccccaattcccccaagatccatatagcacaagggtcttagagaatgcccttgtgggtgacgtcatcctcacggtatcagcgactgatgaagatggacccctaaatagtgacattacctatagcctcataggagggaaccagcttgggcacttcaccattcaccccaaaaagggggagctacaggtggccaaggccctggaccgggaacaggcctctagttattccctgaagctccgagccacagacagtgggcagcctccactgcatgaggacacagacatcgctatccaagtggctgatgtcaatgataacccaccgagattcttccagctcaactacagcaccactgtccaggagaactcccccattggcagcaaagtcctgcagctgatcctgagtgacccagattctccagagaatggccccccctactcgtttcgaatcaccaaggggaacaacggctctgccttccgagtgaccccggatggatggctggtgactgctgagggcctaagcaggagggctcaggaatggtatcagcttcagatccaggcgtcagacagtggcatccctcccctctcgtctttgacgtctgtccgtgtccatgtcacagagcagagccactatgcaccttctgctctcccactggagatcttcatcactgttggagaggatgagttccagggtggcatggtgggtaagatccatgccacagaccgagacccccaggacacgctgacctatagcctggcagaagaggagaccctgggcaggcacttctcagtgggtgcgcctgatggcaagattatcgccgcccagggcctgcctcgtggccactactcgttcaacgtcacggtcagcgatgggaccttcaccacgactgctggggtccatgtgtacgtgtggcatgtggggcaggaggctctgcagcaggccatgtggatgggcttctaccagctcacccccgaggagctggtgagtgaccactggcggaacctgcagaggttcctcagccataagctggacatcaaacgggctaacattcacttggccagcctccagcctgcagaggccgtggctggtgtggatgtgctcctggtctttgaggggcattctggaaccttctacgagtttcaggagctagcatccatcatcactcactcagccaaggagatggagcattcagtgggggttcagatgcggtcagctatgcccatggtgccctgccaggggccaacctgccagggtcaaatctgccataacacagtgcatctggaccccaaggttgggcccacgtacagcaccgccaggctcagcatcctaaccccgcggcaccacctgcagaggagctgctcctgcaatggtactgctacaaggttcagtggtcagagctatgtgcggtacagggccccagcggctcggaactggcacatccatttctatctgaaaacactccagccacaggccattcttctattcaccaatgaaacagcgtccgtctccctgaagggctttgaaggctgcctggatgctgtcgtggtcaacgaagaggctctagatctgctggcccctggcaagacggtggcaggcttgctggagacacaagccctcacccagtgctgcctccacagtgactactgcagccagaacacatgcctcaatggtgggaagtgctcatggacccatggggcaggctatgtctgcaaatgtcccccacagttctctgggaagcactgtgaacaaggaagggagaactgtacttttgcaccctgcctggaaggtggaacttgcatcctctcccccaaaggagcttcctgtaactgccctcatccttacacaggagacaggtgtgaaatggaggcgaggggttgttcagaaggacactgcctagtcactcccgagatccaaaggggggactgggggcagcaggagttactgatcatcacagtggccgtggcgttcattatcataagcactgtcgggcttctcttctactgccgccgttgcaagtctcacaagcctgtggccatggaggacccagacctcctggccaggagtgttggtgttgacacccaagccatgcctgccatcgagctcaacccattgagtgccagctcctgcaacaacctcaaccaaccggaacccagcaaggcctctgttccaaatgaactcgtcacatttggacccaattctaagcaacggccagtggtctgcagtgtgccccccagactcccgccagctgcggtcccttcccactctgacaatgagcctgtcattaagagaacctggtccagcgaggagatggtgtaccctggcggagccatggtctggccccctacttactccaggaacgaacgctgggaatacccccactccgaagtgactcagggccctctgccgccctcggctcaccgccactcaaccccagtcgtgatgccagagcctaatggcctctatgggggcttccccttccccctggagatggaaaacaagcgggcacctctcccaccccgttacagcaaccagaacctggaagatctgatgccctctcggccccctagtccccgggagcgcctggttgccccctgtctcaatgagtacacggccatcagctactaccactcgcagttccggcagggagggggagggccctgcctggcagacgggggctacaagggggtgggtatgcgcctcagccgagctgggccctcttatgctgtctgtgaggtggagggggcacctcttgcaggccagggccagccccgggtgccccccaactatgagggctctgacatggtggagagtgattatggcagctgtgaggaggtcatgttctagcttcccattcccagagcaaggcaggcgggaggccaaggactggacttggcttatttcttcctgtctcgtagggggtgagttgagtgtggctgggagagtgggagggaagccctcagcccaggctgttgtcccttgaaatgtgctcttccaatcccccacctagtccctgagggtggagggaagctgaggatagagctccagaaacagcactagggtcccaggagaggggcatttctagagcagtgaccctggaaaaccaggaacaattgactcccggggtgggcgagagacaggagggctccctgatctgccggctctcagtccccggggcagagcctgattgactgtgctggctcaacttcaccaagatgcattctcatacctgcccacagctccattttggaggcaggcaggttggtgcctgacagacaaccactacgcgggccgtacagaggagctctagagggctgcgtggcatcctcctaggggctgagaggtgagcagcaggggagcgggcacagtcccctctgcccctgcctcagtcgagcactcactgtgtctttgtcaagtgtctgctccacgtcaggcactgtgctttgcaccggggagaaaatggtgatggagggcaacaaggactccgaggagcaccaccaggcctcgggccccagaggtcccactcctcagcctacacgcagaggaacgggcccacctcagagtcacaccactggctgccagtcagggcctgccaggagtctacacagctctgaaccttctttgttaaagaattcagacctcatggaactctgggttcttcatcccaagtttcccaggcacttttggccaaaggaaggaaggaactaattcttcattttaaaaattcttaggcactttttgaccttgctgtctggatgagtttcctcaatgggatttttcttccctagacacaaggaagtctgaactcctatttagggccggttggaagcagggagctggaccgcagtgtccaggctggacacctgccattgcctcctctccattgcagacgcctgcccatcaagtattacctgcggcgactcaaccctatgcatggagggtcaatgtgggcacatgtctacacatgtgggtgcccatggatagtacgtgtgtacacatgtgtagagtgtatgtagccaggagtggtggggaccagaagcctctgtggcctttggtgacctcaccactccctcccacccagtccctccctctggtccactgccttttcatatgtgttgtttctggagacagaagtcaaaaggaagagcagtggagccttgcccacagggctgctgcttcatgcgagagggagatgtgtgggcgagagccaatttgtgtgagtggtttgtggctgtgtgtgtgactgtgagtgtgagtgacagatacatagtttcattggtcattttttttttaacaataaagtatctttttttactgtt

SEQ ID NO: 7249 - DNA, 14534 bp, Homo sapiens
  source 1..14534: mol_type = unassigned DNA; mol_type = unassigned DNA
ggagttttccaccatgactattgccctgctgggttttgccatattcttgctccattgtgcgacctgtgagaagcctctagaagggattctctcctcctctgcttggcacttcacacactcccattacaatgccaccatctatgaaaattcttctcccaagacctatgtggagagcttcgagaaaatgggcatctacctcgcggagccacagtgggcagtgaggtaccggatcatctctggggatgtggccaatgtatttaaaactgaggagtatgtggtgggcaacttctgcttcctaagaataaggacaaagagcagcaacacagctcttctgaacagagaggtgcgagacagctacaccctcatcatccaagccacagagaagaccttggagttggaagctttgacccgtgtggtggtccacatcctggaccagaatgacctgaagcctctcttctctccaccttcgtacagagtcaccatctctgaggacatgcccctgaagagccccatctgcaaggtgactgccacagatgctgatctaggccagaatgctgagttctattatgcctttaacacaaggtcagagatgtttgccatccatcccaccagcggtgtggtcactgtggctgggaagcttaacgtcacctggcgaggaaagcatgagctccaggtgctagctgtggaccgcatgcggaaaatctctgagggcaatgggtttggcagcctggctgcacttgtggttcatgtggagcctgccctcaggaagcccccagccattgcttcggtggtggtgactccaccagacagcaatgatggtaccacctatgccactgtactggtcgatgcaaatagctcaggagctgaagtggagtcagtggaagttgttggtggtgaccctggaaagcacttcaaagccatcaagtcttatgcccggagcaatgagttcagtttggtgtctgtcaaagacatcaactggatggagtaccttcatgggttcaacctcagcctccaggccaggagtgggagcggcccttatttttattcccagatcaggggctttcacctaccaccttccaaactgtcttccctcaaattcgagaaggctgtttacagagtgcagcttagtgagttttcccctcctggcagccgcgtggtgatggtgagagtcaccccagccttccccaacctgcagtatgttctaaagccatcttcagagaatgtaggatttaaacttaatgctcgaactgggttgatcaccaccacaaagctcatggacttccacgacagagcccactatcagctacacatcagaacctcaccgggccaggcctccaccgtggtggtcattgacattgtggactgcaacaaccatgcccccctcttcaacaggtcttcctatgatggtaccttggatgagaacatccctccaggcaccagtgttttggctgtgactgccactgaccgggatcatggggaaaatggatatgtcacctattccattgctggaccaaaagctttgccattttctattgacccctacctggggatcatctccacctccaaacccatggactatgaactcatgaaaagaatttataccttccgggtaagagcatcagactggggatccccttttcgccgggagaaggaagtgtccatttttcttcagctcaggaacttgaatgacaaccagcctatgtttgaagaagtcaactgtacagggtctatccgccaagactggccagtagggaaatcgataatgactatgtcagccatagatgtggatgagcttcagaacctaaaatacgagattgtatcaggcaatgaactagagtattttgatctaaatcatttctccggagtgatatccctcaaacgcccttttatcaatcttactgctggtcaacccaccagttattccctgaagattacagcctcagatggcaaaaactatgcctcacccacaactttgaatattactgtggtgaaggaccctcattttgaagttcctgtaacatgtgataaaacaggggtattgacacaattcacaaagactatcctccactttattgggcttcagaaccaggagtccagtgatgaggaattcacttctttaagcacatatcagattaatcattacaccccacagtttgaggaccacttcccccaatccattgatgtccttgagagtgtccctatcaacacccccttggcccgcctagcagccactgaccctgatgctggttttaatggcaaactggtctatgtgattgcagatggcaatgaggagggctgctttgacatagagctggagacagggctgctcactgtagctgctcccttggactatgaagccaccaatttctacatcctcaatgtaacagtatatgacctgggcacaccccagaagtcctcctggaagctgctgacagtgaatgtgaaagactggaatgacaacgcacccagatttcctcccggtgggtaccagttaaccatctcggaggacacagaagttggaaccacaattgcagagctgacaaccaaagatgctgactcggaagacaatggcagggttcgctacaccctgctaagtcccacagagaagttctccctccaccctctcactggggaactggttgttacaggacacctggaccgcgaatcagagcctcggtacatactcaaggtggaggccagggatcagcccagcaaaggccaccagctcttctctgtcactgacctgataatcacattggaggatgtcaacgacaactctccccagtgcatcacagaacacaacaggctgaaggttccagaggacctgccccccgggactgtcttgacatttctggatgcctctgatcctgacctgggccccgcaggtgaagtgcgatatgttctgatggatggcgcccatgggaccttccgggtggacctgatgacaggggcgctcattctggagagagagctggactttgagaggcgagctgggtacaatctgagcctgtgggccagtgatggtgggaggcccctagcccgcaggactctctgccatgtggaggtgatcgtcctggatgtgaatgagaatctccaccctccccactttgcctccttcgtgcaccagggccaggtgcaggagaacagcccctcgggaactcaggtgattgtagtggctgcccaggacgatgacagtggcttggatggggagctccagtacttcctgcgtgctggcactggactcgcagccttcagcatcaaccaagatacaggaatgattcagactctggcacccctggaccgagaatttgcatcttactactggttgacggtattagcagtggacaggggttctgtgcccctctcttctgtaactgaagtctacatcgaggttacggatgccaatgacaacccaccccagatgtcccaagctgtgttctacccctccatccaggaggatgctcccgtgggcacctctgtgcttcaactggatgcctgggacccagactccagctccaaagggaagctgaccttcaacatcaccagtgggaactacatgggattctttatgattcaccctgttacaggtctcctatctacagcccagcagctggacagagagaacaaggatgaacacatcctggaggtgactgtgctggacaatggggaaccctcactgaagtccacctccagggtggtggtaggcatcttggacgtcaatgacaatccacctatattctcccacaagctcttcaatgtccgccttccagagaggctgagccctgtgtcccctgggcctgtgtacaggctggtggcttcagacctggatgagggtcttaatggcagagtcacctacagtatcgaggacagcgatgaggaggccttcagtatcgacctggtcacaggtgtggtttcatccagcagcacttttacagctggagagtacaacatcctaacgatcaaggcaacagacagtgggcagccaccactctcagccagtgtccggctacacattgagtggatcccttggccccggccgtcctccatccctctggcctttgatgagacctactacagctttacggtcatggagacggaccctgtgaaccacatggtgggggtcatcagcgtagagggcagacccggactcttctggttcaacatctcaggtggggataaggacatggactttgacattgagaagaccacaggcagcatcgtcattgccaggcctcttgataccaggagaaggtcgaactataacttgactgttgaggtgacagatgggtcccgcaccattgccacacaggtccacatcttcatgattgccaacattaaccaccatcggccccagtttctggaaactcgttatgaagtcagagttccccaggacaccgtgccaggggtagagctcctgcgagtccaggccatagatcaagacaagggcaaaagcctcatctataccatacatggcagccaagacccaggaagtgccagcctcttccagctggacccaagcagtggtgtcctggtaacggtgggaaaattggacctcggctcggggccctcccagcacacactgacagtcatggtccgagaccaggaaatacctatcaagaggaacttcgtgtgggtgaccattcatgtggaggatggaaacctccacccaccccgcttcactcagctccattatgaggcaagtgttcctgacaccatagcccccggcacagagctgctgcaggtccgagccatggatgctgaccggggagtcaatgctgaggtccactactccctcctgaaagggaacagcgaaggtttcttcaacatcaatgccctgctaggcatcattactctagctcaaaagcttgatcaggcaaatcatgccccacatactctgacagtgaaggcagaagatcaaggctccccacaatggcatgacctggctacagtgatcattcatgtctatccctcagataggagtgcccccatcttttcaaaatctgagtactttgtagagatccctgaatcaatccctgttggttccccaatcctccttgtctctgctatgagcccctctgaagttacctatgagttaagagagggaaataaggatggagtcttctctatgaactcatattctggccttatttccacccagaagaaattggaccatgagaaaatctcgtcttaccagctgaaaatccgaggcagcaatatggcaggtgcatttactgatgtcatggtggtggttgacataattgatgaaaatgacaatgctcctatgttcttaaagtcaacttttgtgggccaaattagtgaagcagctccactgtatagcatgatcatggataaaaacaacaacccctttgtgattcatgcctctgacagtgacaaagaagctaattccttgttggtctataaaattttggagccggaggccttgaagtttttcaaaattgatcccagcatgggaaccctaaccattgtatcagagatggattatgagagcatgccctctttccaattctgtgtctatgtccatgaccaaggaagccctgtattatttgcacccagacctgcccaagtcatcattcatgtcagagatgtgaatgattcccctcccagattctcagaacagatatatgaggtagcaatagtcgggcctatccatccaggcatggagcttctcatggtgcgggccagcgatgaagactcagaagtcaattatagcatcaaaactggcaatgctgatgaagctgttaccatccatcctgtcactggtagcatatctgtgctgaatcctgctttcctgggactctctcggaagctcaccatcagggcttctgatggcttgtatcaagacactgcgctggtaaaaatttctttgacccaagtgcttgacaaaagcttgcagtttgatcaggatgtctactgggcagctgtgaaggagaacttgcaggacagaaaggcactggtgattcttggtgcccagggcaatcatttgaatgacaccctttcctactttctcttgaatggcacagatatgtttcatatggtccagtcagcaggtgtgttgcagacaagaggtgtggcgtttgaccgggagcagcaggacactcatgagttggcagtggaagtgagggacaatcggacacctcagcgggtggctcagggtttggtcagagtctctattgaggatgtcaatgacaatccccccaaatttaagcatctgccctattacacaatcatccaagatggcacagagccaggggatgtcctctttcaggtatctgccactgatgaggacttggggacaaatggggctgttacatatgaatttgcagaagattacacatatttccgaattgacccctatcttggggacatatcactcaagaaaccctttgattatcaagctttaaataaatatcacctcaaagtcattgctcgggatggaggaacgccatccctccagagtgaggaagaggtacttgtcactgtgagaaataaatccaacccactgtttcagagtccttattacaaagtcagagtacctgaaaatatcaccctctataccccaattctccacacccaggcccggagtccagagggactccggctcatctacaacattgtggaggaagaacccttgatgctgttcaccactgacttcaagactggtgtcctaacagtaacagggcctttggactatgagtccaagaccaaacatgtgttcacagtcagagccacggatacagctctggggtcattttctgaagccacagtggaagtcctagtggaggatgtcaatgataaccctcccactttttcccaattggtctataccacttccatctcagaaggcttgcctgctcagacccctgtgatccaactgttggcttctgaccaggactcagggcggaaccgtgacgtctcttatcagattgtggaggatggctcagatgtttccaagttcttccagatcaatgggagcacaggggagatgtccacagttcaagaactggattatgaagcccaacaacactttcatgtgaaagtcagggccatggataaaggagatcccccactcactggtgaaacccttgtggttgtcaatgtgtctgatatcaatgacaaccccccagagttcagacaacctcaatatgaagccaatgtcagtgaactggcaacctgtggacacctggttcttaaagtccaggctattgaccctgacagcagagacacctcccgcctggagtacctgattctttctggcaatcaggacaggcacttcttcattaacagctcatcgggaataatttctatgttcaacctttgcaaaaagcacctggactcttcttacaatttgagggtaggtgcttctgatggagtcttccgagcaactgtgcctgtgtacatcaacactacaaatgccaacaagtacagcccagagttccagcagcacctttatgaggcagaattagcagagaatgcaatggttggaaccaaggtgattgatttgctagccatagacaaagatagtggtccctatggcactatagattatactatcatcaataaactagcaagtgagaagttctccataaaccccaatggccagattgccactctgcagaaactggatcgggaaaattcaacagagagagtcattgctattaaggtcatggctcgggatggaggaggaagagtagccttctgcacggtgaagatcatcctcacagatgaaaatgacaaccccccacagttcaaagcatctgagtacacagtatccattcaatccaatgtcagtaaagactctccggttatccaggtgttggcctatgatgcagatgaaggtcagaacgcagatgtcacctactcagtgaacccagaggacctagttaaagatgtcattgaaattaacccagtcactggtgtggtcaaggtgaaagacagcctggtgggattggaaaatcagacccttgacttcttcatcaaagcccaagatggaggccctcctcactggaactctctggtgccagtacgacttcaggtggttcctaaaaaagtatccttaccgaaattttctgaacctttgtatactttctctgcacctgaagaccttccagaggggtctgaaattgggattgttaaagcagtggcagctcaagatccagtcatctacagtctagtgcggggcactacacctgagagcaacaaggatggtgtcttctccctagacccagacacaggggtcataaaggtgaggaagcccatggaccacgaatccaccaaattgtaccagattgatgtgatggcacattgccttcagaacactgatgtggtgtccttggtctctgtcaacatccaagtgggagacgtcaatgacaataggcctgtatttgaggctgatccatataaggctgtcctcactgagaatatgccagtggggacctcagtcattcaagtgactgccattgacaaggacactgggagagatggccaggtgagctacaggctgtctgcagaccctggtagcaatgtccatgagctctttgccattgacagtgagagtggttggatcaccacactccaggaacttgactgtgagacctgccagacttatcattttcatgtggtggcctatgaccacggacagaccatccagctatcctctcaggccctggttcaggtctccattacagatgagaatgacaatgctccccgatttgcttctgaagagtacagaggatctgtggttgagaacagtgagcctggcgaactggtggcgactctaaagaccctggatgctgacatttctgagcagaacaggcaggtcacctgctacatcacagagggagaccccctgggccagtttggcatcagccaagttggagatgagtggaggatttcctcaaggaagaccctggaccgcgagcatacagccaagtacttgctcagagtcacagcatctgatggcaagttccaggcttcggtcactgtggagatctttgtcctggacgtcaatgataacagcccacagtgttcacagcttctctatactggcaaggttcatgaagatgtatttccaggacacttcattttgaaggtttctgccacagacttggacactgataccaatgctcagatcacatattctctgcatggccctggggcgcatgaattcaagctggatcctcatacaggggagctgaccacactcactgccctagaccgagaaaggaaggatgtgttcaaccttgttgccaaggcgacggatggaggtggccgatcgtgccaggcagacatcaccctccatgtggaggatgtgaatgacaatgccccgcggttcttccccagccactgtgctgtggctgtcttcgacaacaccacagtgaagacccctgtggctgtagtatttgcccgggatcccgaccaaggcgccaatgcccaggtggtttactctctgccggattcagccgaaggccacttttccatcgacgccaccacgggggtgatccgcctggaaaagccgctgcaggtcaggccccaggcaccactggagctcacggtccgtgcctctgacctgggcaccccaataccgctgtccacgctgggcaccgtcacagtctcggtggtgggcctagaagactacctgcccgtgttcctgaacaccgagcacagcgtgcaggtgcccgaggacgccccacctggcacggaggtgctgcagctggccaccctcactcgcccgggcgcagagaagaccggctaccgcgtggtcagcgggaacgagcaaggcaggttccgcctggatgctcgcacagggatcctgtatgtcaacgcaagcctggactttgagacaagccccaagtacttcctgtccattgagtgcagccggaagagctcctcttccctcagtgacgtgaccacagtcatggtcaacatcactgatgtcaatgaacaccggccccaattcccccaagatccatatagcacaagggtcttagagaatgcccttgtgggtgacgtcatcctcacggtatcagcgactgatgaagatggacccctaaatagtgacattacctatagcctcataggagggaaccagcttgggcacttcaccattcaccccaaaaagggggagctacaggtggccaaggccctggaccgggaacaggcctctagttattccctgaagctccgagccacagacagtgggcagcctccactgcatgaggacacagacatcgctatccaagtggctgatgtcaatgataacccaccgagattcttccagctcaactacagcaccactgtccaggagaactcccccattggcagcaaagtcctgcagctgatcctgagtgacccagattctccagagaatggccccccctactcgtttcgaatcaccaaggggaacaacggctctgccttccgagtgaccccggatggatggctggtgactgctgagggcctaagcaggagggctcaggaatggtatcagcttcagatccaggcgtcagacagtggcatccctcccctctcgtctttgacgtctgtccgtgtccatgtcacagagcagagccactatgcaccttctgctctcccactggagatcttcatcactgttggagaggatgagttccagggtggcatggtgggtaagatccatgccacagaccgagacccccaggacacgctgacctatagcctggcagaagaggagaccctgggcaggcacttctcagtgggtgcgcctgatggcaagattatcgccgcccagggcctgcctcgtggccactactcgttcaacgtcacggtcagcgatgggaccttcaccacgactgctggggtccatgtgtacgtgtggcatgtggggcaggaggctctgcagcaggccatgtggatgggcttctaccagctcacccccgaggagctggtgagtgaccactggcggaacctgcagaggttcctcagccataagctggacatcaaacgggctaacattcacttggccagcctccagcctgcagaggccgtggctggtgtggatgtgctcctggtctttgaggggcattctggaaccttctacgagtttcaggagctagcatccatcatcactcactcagccaaggagatggagcattcagtgggggttcagatgcggtcagctatgcccatggtgccctgccaggggccaacctgccagggtcaaatctgccataacacagtgcatctggaccccaaggttgggcccacgtacagcaccgccaggctcagcatcctaaccccgcggcaccacctgcagaggagctgctcctgcaatggtactgctacaaggttcagtggtcagagctatgtgcggtacagggccccagcggctcggaactggcacatccatttctatctgaaaacactccagccacaggccattcttctattcaccaatgaaacagcgtccgtctccctgaagctggccagtggagtgccccagctggaataccactgtctgggtggtttctatggaaacctttcctcccagcgccatgtgaatgaccacgagtggcactccatcctggtggaggagatggacgcttccattcgcctgatggttgacagcatgggcaacacctcccttgtggtcccagagaactgccgtggtctgaggcccgaaaggcacctcttgctgggcggcctcattctgttgcattcttcctcgaatgtctcccagggctttgaaggctgcctggatgctgtcgtggtcaacgaagaggctctagatctgctggcccctggcaagacggtggcaggcttgctggagacacaagccctcacccagtgctgcctccacagtgactactgcagccagaacacatgcctcaatggtgggaagtgctcatggacccatggggcaggctatgtctgcaaatgtcccccacagttctctgggaagcactgtgaacaaggaagggagaactgtacttttgcaccctgcctggaaggtggaacttgcatcctctcccccaaaggagcttcctgtaactgccctcatccttacacaggagacaggtgtgaaatggaggcgaggggttgttcagaaggacactgcctagtcactcccgagatccaaaggggggactgggggcagcaggagttactgatcatcacagtggccgtggcgttcattatcataagcactgtcgggcttctcttctactgccgccgttgcaagtctcacaagcctgtggccatggaggacccagacctcctggccaggagtgttggtgttgacacccaagccatgcctgccatcgagctcaacccattgagtgccagctcctgcaacaacctcaaccaaccggaacccagcaaggcctctgttccaaatgaactcgtcacatttggacccaattctaagcaacggccagtggtctgcagtgtgccccccagactcccgccagctgcggtcccttcccactctgacaatgagcctgtcattaagagaacctggtccagcgaggagatggtgtaccctggcggagccatggtctggccccctacttactccaggaacgaacgctgggaatacccccactccgaagtgactcagggccctctgccgccctcggctcaccgccactcaaccccagtcgtgatgccagagcctaatggcctctatgggggcttccccttccccctggagatggaaaacaagcgggcacctctcccaccccgttacagcaaccagaacctggaagatctgatgccctctcggccccctagtccccgggagcgcctggttgccccctgtctcaatgagtacacggccatcagctactaccactcgcagttccggcagggagggggagggccctgcctggcagacgggggctacaagggggtgggtatgcgcctcagccgagctgggccctcttatgctgtctgtgaggtggagggggcacctcttgcaggccagggccagccccgggtgccccccaactatgagggctctgacatggtggagagtgattatggcagctgtgaggaggtcatgttctagcttcccattcccagagcaaggcaggcgggaggccaaggactggacttggcttatttcttcctgtctcgtagggggtgagttgagtgtggctgggagagtgggagggaagccctcagcccaggctgttgtcccttgaaatgtgctcttccaatcccccacctagtccctgagggtggagggaagctgaggatagagctccagaaacagcactagggtcccaggagaggggcatttctagagcagtgaccctggaaaaccaggaacaattgactcccggggtgggcgagagacaggagggctccctgatctgccggctctcagtccccggggcagagcctgattgactgtgctggctcaacttcaccaagatgcattctcatacctgcccacagctccattttggaggcaggcaggttggtgcctgacagacaaccactacgcgggccgtacagaggagctctagagggctgcgtggcatcctcctaggggctgagaggtgagcagcaggggagcgggcacagtcccctctgcccctgcctcagtcgagcactcactgtgtctttgtcaagtgtctgctccacgtcaggcactgtgctttgcaccggggagaaaatggtgatggagggcaacaaggactccgaggagcaccaccaggcctcgggccccagaggtcccactcctcagcctacacgcagaggaacgggcccacctcagagtcacaccactggctgccagtcagggcctgccaggagtctacacagctctgaaccttctttgttaaagaattcagacctcatggaactctgggttcttcatcccaagtttcccaggcacttttggccaaaggaaggaaggaactaattcttcattttaaaaattcttaggcactttttgaccttgctgtctggatgagtttcctcaatgggatttttcttccctagacacaaggaagtctgaactcctatttagggccggttggaagcagggagctggaccgcagtgtccaggctggacacctgccattgcctcctctccattgcagacgcctgcccatcaagtattacctgcggcgactcaaccctatgcatggagggtcaatgtgggcacatgtctacacatgtgggtgcccatggatagtacgtgtgtacacatgtgtagagtgtatgtagccaggagtggtggggaccagaagcctctgtggcctttggtgacctcaccactccctcccacccagtccctccctctggtccactgccttttcatatgtgttgtttctggagacagaagtcaaaaggaagagcagtggagccttgcccacagggctgctgcttcatgcgagagggagatgtgtgggcgagagccaatttgtgtgagtggtttgtggctgtgtgtgtgactgtgagtgtgagtgacagatacatagtttcattggtcattttttttttaacaataaagtatctttttttactgt

SEQ ID NO: 7250 - DNA, 18699 bp, Homo sapiens
  source 1..18699: mol_type = unassigned DNA; mol_type = unassigned DNA
agtgaatatacaggttttagatatgaatgatctgagacctttgttttcacccacaacatactctgttaccatagcagaaagcacacctctaaggactagtgttgcccaggtgactgcaacagacgcagatattggttccaatggagaattctactactactttaaaaataaagttgatctcttttcagttcaccccacgagtggtgtcatctccttaagtggtcgattaaattatgatgaaaagaataggtatgatctggaaattttggctgtggaccggggaatgaaactgtatgggaacaatggagtgagcagtactgcaaagctttatgttcacattgagcgcataaatgaacatgccccaacaatccatgtagtcactcatgttcctttctcgttggaaaaagagccaacatatgcagtggtgacagttgatgacttagatgatggagcgaatggagagatcgaatctgtttccattgtggctggggatcctttagatcagttcttcctggctaaggaaggaaagtggttgaatgagtacaagattaaggagaggaagcagattgactgggagagctttccctatggctacaatctcactcttcaagcaaaagacaagggatctcctcaaaaatgttcagcattaaaggcagtctacattggcaaccccacaagagacactgtccccattagatttgaaaaagaagtgtacgatgtgagcataagtgaattttcccctcctggtgtcgtggttgctatagtaaaattaagtcctgaaccgatagatgtggaatacaaattatctcctggtgaggatgcagtgtactttaaaattaatcctcggtcgggtctgattgttacagcacggccactgaatactgttaagaaggaggtttataaactggaggtgacaaacaaggaaggagatttaaaagcacaggtcaccatcagcatagaagatgcaaatgaccacaccccagaatttcagcaaccactgtatgatgcttatgtgaatgaaagtgtcccagtgggaaccagcgttctaacagtttcagcttctgataaggataaaggagaaaatgggtacatcacctatagtatcgctagcctgaatttgttaccatttgtcattaatcagtttacaggtgttattagcacaactgaagaactggattttgaatcctccccagaaatttacagattcattgttagagcctctgactggggttcaccataccgccatgaaagtgaggtcaatgtgactattcgaataggaaatgtcaacgacaacagccctctctttgaaaaagtggcttgccagggagttatttcatatgactttccagttggtggtcacatcacagcagtctcagcgatcgatatcgatgaacttgaacttgtaaagtacaaaatcatttctggaaatgaacttggcttcttttatttaaacccagattctggtgttttacagcttaaaaaatcactgacaaattctggcattaaaaatggcaattttgccctcagaattacagcaactgatggagagaatcttgcagaccccatgtctattaacatttcagtcctacatgggaaagtgtcttcaaagagcttcagttgcagagaaactcgtgtggctcaaaagctggcagagaaactactcattaaggcaaaagcaaatgggaaactgaatctggaagatggatttcttgacttttattcaattaatagacagggaccatattttgacaagtcttttccttctgatgtggctgtaaaggaggatctgccagttggtgctaacattctgaagattaaagcctatgatgccgactctggcttcaatggaaaagtgctatttacaatatcagatggaaatacggatagttgctttaatattgatatggagactgggcagcttaaagtccttatgcccatggatcgagaacacacagacctctatctccttaatatcaccatctatgacttaggtaatccacagaaatcgtcatggagactgctgaccatcaatgtggaggatgctaatgacaatagcccagtttttattcaagacagttactcagttaacattcttgaaagttcaggcattggtactgaaatcattcaagtggaagccagagacaaagacttaggttctaatggtgaagtgacttactcagtcttgacagatacacagcagtttgccatcaatagctcaactggaatcgtttatgtagccgaccagttggaccgggaatccaaagccaattattctttgaaaatagaagccagggacaaggcagagagtggtcagcagctgttttcagttgtcactcttaaagtttttttagatgatgtcaatgactgctccccagctttcattcccagtagctatagtgtgaaggttcttgaagatctccctgttggcactgtcattgcttggcttgagacccatgatccagatcttggactggggggtcaagtgcgctattctttggtcaatgactataatgggagatttgaaatagataaagcaagtggtgccatccgcttgagcaaagagcttgattatgagaaacagcagttctataaccttactgtgcgggccaaagacaaagggcggcctgtctctctgtcatctgtttcctttgttgaggtggaagtggtggatgtcaatgaaaacctccacactccctatttcccagactttgctgttgttggatctgtaaaggaaaactcacgcattggaacaagcgtgctgcaggtgactgctcgagatgaagactccggaagggatggagagatccagtactccatcagggatggcagtggtcttggaaggttcagtatagacgacgagagtggggtcatcactgccgcagacattcttgatcgggagacaatggggtcatactggctaacagtgtatgccacagacaggggcgttgttccactctactccaccattgaggtctacattgaagttgaagatgtgaatgacaatgccccgctgacctcagaacctatatattatcctgttgtcatggaaaactctccaaaggacgtatctgtcattcagatccaggctgaagatcctgactccagttccaatgaaaaactgacatacaggattacaagtggaaatcctcagaatttttttgccatcaatatcaaaacaggtctgattacaacaacttcaaggaaattggatcgagaacagcaggcagaacattttctggaggtgactgtgacagatggtggtccctctccaaaacagtcaaccatttgggtggtggttcaggttctagatgaaaatgacaacaagccccagttcccagagaaggtctaccagatcaagctgccagaacgtgaccgaaagaagagaggagaaccgatttacagggcttttgcatttgatagagatgagggccccaacgcagaaatctcctacagtattgtggatgggaatgatgacggaaagttctttattgaccctaaaactgggatggtttcttctagaaagcagtttacagcaggcagttatgacatcctaacgataaaggcagtggacaatgggcgcccacagaaatcctccacggcccgcctccacattgaatggattaagaaaccacccccttcacctataccattgaccttcgatgagccgttttataacttcacagtcatggaaagtgatagagtgactgaaattgtaggggtggtgtctgtgcagccagctaacacccctctgtggtttgacatagttggggggaattttgacagcgcttttgatgcagagaagggtgttgggacaattgtcatcgcaaaacctttggatgcagagcagaggtccatctataatatgagtgtggaagtcaccgatgggacaaatgttgctgttactcaggtatttatcaaagtgctggataataatgataatggcccagaattctctcagccgaattacgatgtgacaatttccgaggatgtgcttccagacacggagatcctgcagattgaagccacagatagagatgagaagcacaagctgagctacactgttcatagcagcatcgactccatcagcatgagaaaattccggattgaccctagcactggcgtgctctatactgccgagaggctggaccatgaggcccaggacaagcacattctcaacataatggtcagagatcaggagtttccttatcgaagaaacttggcccgagtcattgtgaatgtggaggatgctaatgatcacagtccttattttaccaacccactgtatgaagcgtctgtgtttgaatctgctgctctgggatcagctgttctgcaagtgacggctctggacaaagacaaaggagaaaatgcagaactcatatataccatagaagcagggaacactgggaacatgtttaagatcgaaccggtcctaggcatcatcaccatttgcaaagaaccagacatgacgacgatgggtcagtttgtcctatccatcaaagtcacagatcagggatccccgccaatgtctgctactgcaattgtgcgcatttccgtcaccatgtctgacaattctcaccccaagttcattcacaaagactaccaagcagaagtaaatgaaaatgttgacattggaacatcagtcattctaatctctgccatcagtcaatctaccctcatttatgaagtcaaagatggagacattaatgggatctttaccataaatccatattctggagtcatcaccactcagaaggccctggattatgagcgcacatcctcttatcaactcatcattcaggccaccaatatggcaggaatggcttccaatgctacagtcaatattcagattgttgatgaaaatgataatgccccagtttttctcttttctcaatactcaggcagcctaagtgaggctgccccaattaatagcattgtcaggagcttggataacagcccactggtgattcgagccacagatgctgacagcaaccggaatgctctgcttgtgtatcagattgtggagtcaacagcaaaaaagtttttcacggtggactccagtacaggtgcaatcagaacaattgccaacctggaccatgaaaccattgcccatttccattttcatgtgcatgtgagagacagtggtagcccccaactgactgcagagagtcccgttgaagtcaacattgaggtgacagatgtgaatgataacccacctgtttttactcaggctgtgtttgagactatcttacttctacctacctatgttggagtggaggttctgaaagttagtgccacagatcctgactctgaggtaccccctgaactgacatacagcctaatggaaggcagtttggatcattttttaattgactcaaacagtggagtacttaccataaaaaacaacaacctctccaaggatcactacatgctgatagttaaggtgtctgatggaaagttctacagtacctccatggtcaccatcatggttaaagaagccatggacagcggcctccactttacacaaagcttctattccacctcaatctcagagaacaacactaacataaccaaagttgctattgtcaatgcagttggaaatcgccttaatgagcccttaaaatacagcatcttaaacccaggaaataagttcaagataaaatctacctcaggggtcattcagacgactggagtcccctttgaccgtgaagaacaagagttatatgagctggtggtagaagccagccgtgagctggaccatctgcgtgtggccagagtggtggtcagggttaacattgaagacataaatgacaattctccagtctttgtgggcctcccatactatgctgctgttcaagtggatgcggaacccgggactctgatttatcaggtgacagccattgacaaagataaaggtccaaatggagaagtgacctatgtcctgcaggatgactatggccactttgaaattaaccctaattcagggaatgttattttaaaggaagcattcaactctgacttgtccaacattgagtatggagtcaccatcctagccaaggatggcggaaaaccttctttgtctacatctgtggagcttcccatcactattgtcaacaaagcaatgcctgtgtttgataagcccttttatacagcatctgtcaatgaagacatcagaatgaacacacccatcctaagcatcaatgccaccagtccagaaggccaaggcatcatatatatcattatcgatggggacccttttaaacagtttaacattgactttgacactggggtcctgaaagttgttagccctttggattatgaagttacatctgcttacaagctgacaataagagccagcgacgcccttactggtgctagggctgaagtcactgttgacttgctagttaatgatgtaaatgacaacccccctattttcgatcagcctacatacaatacaacactatcagaagcatctcttattgggacacctgttttacaagttgtctctattgatgcagactcagaaaacaataaaatggtacattatcagattgtccaggatacctacaatagcacagattattttcacatagatagctcaagtggcttaatcctgacagcacgaatgctggaccatgagttagtacaacactgcactttgaaagtcagatcaatagatagtggcttcccatcactgagcagtgaggttctcgttcatatctacatctctgatgtaaatgacaaccctccagtttttaatcagctcatttatgagtcatatgtgagtgaattagccccccggggccattttgtaacctgtgtacaagcctctgatgcagacagctctgattttgaccggttggaatatagcattttatctgggaatgaccggacgagctttctgatggacagcaagagtggagttatcacattgtccaaccatcggaagcagcggatggagcctctgtacagtctcaatgtgtctgtctctgatgggttgttcaccagcactgcacaggtgcatattagggtacttggggctaacttgtacagccctgccttttcacaaagcacatacgtagctgaggtgagagagaacgtggctgcaggaacaaaggtaattcatgttcgagccacagatggtgatccagggacttatgggcagatcagctatgccatcatcaatgactttgccaaggatcgattcctcatagacagcaatgggcaggtcatcaccacagaaaggctagaccgggaaaaccctctagaaggggatgttagtatttttgtgagggcccttgatggtggagggagaacaactttctgcactgtgagagtgattgttgtggatgaaaatgacaatgctccccagttcatgacagtggaatatagagccagtgtcagggcagatgttggaaggggccacttggtcactcaagttcaagccatagatcccgatgatggagcaaattcaaggattacttattccctctatagcgaggcctctgtttcagtggccgacctcctggaaatcgatcctgacaatggctggatggtcacaaagggtaattttaaccagctgaaaaatacagtgctttcgttctttgtcaaagcagtagatgggggcatcccagtaaagcactccctcattcctgtctatatccacgtcttgccccctgaaacgttcttgccatcattcacccagtctcagtattcctttaccattgcagaagatacagccattgggagtacagtggacaccctgaggattttgcccagtcagaatgtctggttcagcacagttaatggggaacggccagaaaataacaaagggggcatattcgtcatagaacaggaaacaggcactattaagcttgacaaacgccttgaccgtgaaaccagcccagctttccactttaaagtagcagccactatacccctggacaaagtagacattgtgtttactgtggatgtagatatcaaggtattggatttgaatgacaacaagccagtctttgaaacttcaagctatgacaccattataatggaagggatgcctgttggcaccaaactcacacaagtgagagctattgatatggactggggagccaatggacaagtcacttactccctccactcggattcccagcccgaaaaggtaatggaagcattcaatattgacagcaacacgggctggatcagtaccttgaaggacctagatcacgagacagaccccacattcaccttctctgtggtggcctctgaccttggagaggcattctctctttcctccacggccttggtctctgtcagagtgacagatataaatgacaatgcaccagtcttcgcgcaggaagtgtaccgagggaatgtgaaggagagcgacccaccgggcgaggtggtagccgtcctcagcacctgggacagagacacatccgacgttaatcgccaagtgagctaccatattacaggaggaaaccctcgaggaaggtttgctctgggcctggtgcaaagtgagtggaaggtctatgtgaagaggcctctagacagagaagaacaggacatttactttctcaatatcactgccactgatgggctttttgtcacacaggccatggtggaagtgagcgtcagtgatgtgaatgacaatagcccagtgtgtgatcaggttgcatatacagcattacttcctgaagacattccatcaaataaaatcatcctgaaagtcagtgcaaaggatgctgatattggatccaatggatatatacgatactcactctatggatctggaaacagtgaattttttctagatccagaaagtggcgagttaaaaaccttggctctgttggaccgggagaggatccccgtgtacagcctgatggccaaggccactgacgggggtggcaggttctgccagtccaacatccacctaatcctggaggatgtgaatgataacccccctgtgttttcttctgaccactacaacacctgtgtctatgagaacacagccaccaaggctctgttgaccagagttcaagccgtggaccccgacattggcatcaataggaaggtcgtgtactccctggcagactcagctggtggggtcttctccattgacagctcatctggcatcatcatcctggagcagccactggaccgtgagcagcagtcttcgtacaacatcagcgtgcgggccactgaccagagtcctggacagtccctgtcctctctcactactgtcaccatcaccgttctggacattaatgacaacccccctgtgtttgagaggagggactacctggtgacggtgcctgaggacacctcccctggcacccaagtccttgctgtttttgccaccagcaaagatattggcacaaatgctgagatcacttatctcatccggtctgggaacgaacaagggaaatttaagatcaaccccaagacagggggtatttctgtctctgaagtcctggactatgaattatgcaaaaggttttacctggtagtggaagccaaagatgggggcaccccagctctcagcgctgtggccactgtcaacatcaacctcacagatgttaatgacaaccctcccaagttcagccaagacgtctacagtgcggttatcagtgaagacgccttggtgggagactctgtcattttgctaatagcagaagatgtagacagccagcccaacggacagattcatttttccattgtgaatggagatcgggacaatgaatttactgtagatcctgtcttgggacttgtgaaagttaagaagaaattggaccgggaacgggtgtctggatactctctgcttgtccaggccgtagacagtggcattcctgcaatgtcatcaactgcaactgtcaacattgatatttctgatgtgaatgacaacagcccggtgtttacacctgccaactatactgctgtgattcaggaaaataagccagtgggcaccagcatcttgcagctggtggtgacagacagagactcctttcacaatgggcctcccttttcattctctattttgtcgggaaatgaagaggaggagtttgtgttggaccctcatgggatcttgcggtcggctgtggtcttccagcacacagagtctctggaatacgtgttgtgtgtccaggcaaaggattcaggcaaaccccagcaagtttctcacacttacatccgcgtgcgagtcattgaggaaagcacccacaagcccacagccattcccctggaaattttcattgtcaccatggaggatgactttcctggtggggtcattgggaagattcatgccacagatcaagacatgtatgatgtgctcacatttgccctgaaatcggagcagaaaagcttatttaaagtgaacagtcacgatgggaaaatcatcgccctgggaggcctggacagcggcaagtatgtcctgaatgtgtctgtgagtgatggtcgcttccaggtacccattgatgtggtcgtgcatgtggagcagttggtgcatgagatgctgcagaacactgtcaccatccgctttgaaaatgtgtcccctgaggacttcgtggggctgcacatgcatgggttccggcgcaccctgcggaatgcagtcctcacccagaagcaggacagcctgcgcatcatcagcatccagcccgtggcaggcaccaaccaactggacatgctgtttgcggtggagatgcacagcagcgagttctacaagccagcctacctgatccagaagctgtccaatgctagaagacacctggagaatatcatgcgcatctcagccatcttggagaagaactgctcagggctggactgtcaggaacagcattgtgagcaaggcttgtcactcgattcccacgcgctcatgacctacagcacggctcgcatcagctttgtgtgtccgcgtttctacaggaacgtgcgttgcacctgcaatggaggactgtgtccggggtccaacgatccttgtgtggagaagccgtgtccaggggacatgcagtgtgtcagttatgaagccagcaggagaccgttcctctgccagtgtccaccagggaagctcggagagtgctcagggcacacttctctcagctttgctggaaacagttacatcaaatatcggctttctgaaaatagcaaagaagaggatttcaaactagctctgcgtcttcgaacactgcaaagcaatgggattataatgtacaccagagcaaatccctgcataattctgaagattgtggatggcaagctgtggttccagctggactgcggcagcggccctggaatcttgggcatctcgggccgtgctgtcaacgacgggagctggcactcggtcttcctggagctcaaccgcaatttcacgagcctgtccctggatgacagctacgtggagcggcgccgggcgcccctctacttccagacgctgagcactgagagtagcatctacttcggcgccctggtgcaagcggataacatccgcagcctgactgacacgcgggtcacgcaggtgctcagcggcttccagggctgcctggactcggtgatactgaataacaatgagctgccgctgcagaacaagcgcagcagcttcgcggaggtggtgggcctgacggagctgaagctgggctgcgtgctctatcccgacgcctgcaagcgcagcccgtgccagcacgggggcagctgcactggcctgccatcggggggctatcagtgtacctgtctctcacagtttacggggagaaactgtgaatctgagattacagcctgcttcccaaacccctgccggaatggaggatcctgcgatccaataggaaacactttcatctgcaattgtaaagctgggctcactggagtcacgtgtgaggaggacatcaatgagtgcgaacgagaggagtgtgagaacggaggctcctgcgtgaacgtgttcggctccttcctctgcaactgcacgccgggctacgtgggccagtactgcgggctgcgccccgtggtggtacccaatatccaggctggccactcctacgtggggaaggaggagctcatcggcatcgccgtggtcctcttcgtcatcttcatcctggtggttctcttcatagtcttccgcaagaaggtcttccgcaagaactactcccgcaacaacatcacgctagtgcaggacccggccaccgccgccctgcttaacaagagcaatggcatcccgttccggaacctgcgcggcagtggggacggccgcaacgtctaccaggaggtggggcccccgcaggtccccgtgcgccccatggcctacacaccctgcttccagagtgactccaggagcaacctggataagatcgtggacgggctgggaggcgagcaccaggaaatgaccacgtttcaccctgagtcgccccgcatcctgacagcccggcggggcgtggtcgtgtgcagtgtggcccccaacctccccgccgtgtcaccctgccgctccgactgcgactccatccggaagaatggctgggacgcgggaactgagaacaaaggggttgatgacccgggagaagtgacctgctttgcaggtagtaataaaggcagcaactctgaagttcagtccctcagctccttccagtcagattctggtgacgacaatgcctccatagtgactgtcattcagcttgtcaacaatgtagttgacactatagagaatgaagtgtctgtcatggaccaaggacagaactacaaccgagcctatcactgggacacctctgattggatgccaggggcccgcctgtcggacatagaggaagtgcccaactatgagaaccaggatggagggtctgcacaccaggggagcacacgggagctggagagcgattactacctgggtggttatgacattgacagtgaatacccaccccctcatgaagaggagttcttgagtcaggaccagctgcctcctcctctcccggaggacttcccagaccaatatgaggccctgccaccctcccagcctgtctccctggccagcacactgagcccagactgcaggagaaggccccagtttcatcctagccagtatctccctcctcacccattccccaacgaaacggatttggtgggcccgcctgccagctgtgaatttagtacttttgctgtgagcatgaaccagggcacagagcccacaggcccagcagacagcgtgtctctgtccttgcacaattccagaggcacctcatcctcggatgtgtctgccaactgcggctttgacgattccgaagtagccatgagtgactacgagagcgtgggagagctcagcctcgccagccttcacattccctttgtggagactcagcatcagactcaagtgtagacatcacatcttgggtacttcaccctgtttgttacagaaaagtggaagcagattggctgggcttctgtcccagtggagcattgtctgtggaatgagaagggaatactgtatttttccactagaaacttcttcacaagtcatactgtcccaacaagcaagcttgattccagttgggtgaaaatgaaaggctcagaaattgtttttgagaggtgactggtaatccttgatgtaggtacctatgttcacagctaaaaatgcaaagagggaaaaattatttcacccactaagttatacagccagtcttgtatggctttgtgcagtattgtgccctggaaagtgttacagcatcagtccttgcagtattaaaaactggcaacaatcaaagaggcattgttgcatgtaattttgagccaatgaaatgaaaatagtagtaatgattgttggaaaagttagtctcttaggcgaaagagaagagaaacaaatattattaaacaaaccagaaaatgggctgaagccttttaaatcaactctatttttttgataagctgcccaattttcagctataaaattaggcttgaataacatgtttagtatgctcagttatttctgtttgtttgtgttaagcatccaatctaatatagttgggttttatgatcttcaagaaaggtatcaatgaagagcaacatgaggctttttgggttccatttggtgggtgggggaggaagttaaagttgtttgaacattagaaagaatgtgattatctggttggttttgtgttttctggtaaatattccagttggtaaatctaacattgctacagaagttggctttgttcatatagcttctctacaattagatatttttagaagtttaagcaaaactcacaaattcaggggggaaaaaagaaaaaacgataccttcaaagtttgcggcctagataatcacaattcttcataatgcagaggaaaggtgtctgttattctaaatcggtagcatcaccattataaatacaattatgttaagaaaagaggaaagtagactagttattgtgtataaattataatagtgtgtgtgtgtctgggcctatgtacaaatatgtgcttgcactcagtaaggctgctcttgaggaaagctaatgtgaaggttttgggaaatggaccatgttgaaaattctgccggcgagcatggcatacctttcaatttctctgatctctatggtgttagagaaacatcaaatgccatattttactctggttcagttaactttattttggtactgccaataaagcaaaattgtgcttttttttttttttctcaagacagagtcttgctctgtcacccaggctagagtgcaatggcatgatctcagctcactgcaatctccacctcctgggttcaagcgattctcctgcctcagcctcccaggttgctggggttacaggtgtgtgccaccacgcctggctaattttttgtatttttagtagagatggggtttcaccatgttggccaggctggtctcaaactcctgacctcgtaatccacctgccgtggcctcccaaagtgctgggattacaggcatgagccaccgtgcccagcccaaaactgtgctttttaaaaacagtattttgttataattttccagaacttacctctgttttaaaagtgtgtaatgtttgattacaccctgggattcccttctcatctgtgggctttggccatgatttccaaaattaacaggagaatcattccactggaaatataacaatccagtcctcaaaactgaaagttgacaggttgagggactttccttttttgcttcaatcagattacggccgcctgtgcagtggccatggtaaatatatgcatatttgcactatctgcttaatgagcaaatctgtgtccacagtttctgatgacatatggcattggtgtgtaaattgtactgtccctagtctgtgcattattcactcagacatatttttagttatttcaattgcgtttaatccacttcttttttatgagtcagtgtttctgaatgtttatgcaaaaaaaaaaatcctttttcattcccaaactttctaagtaagtggatacactacacttcacaagttttccagcctttctcttcctgtctcttggtcagacctactcatggaggtattatccacactgtgatcttgaaataaatgaatttcactaaggctgctttcgagaacaaagtctttggtatttttcttatgtaagaagcacatttgcaagaatcatggaaaaaaatgacaaactaatggcctagaatagagtgactgctacactttaagtaatgcaatgacataaaaaccatcaaagtaaaaccaacatgtcatttcctgcccccaggaaatattagaatgagattaatgctgatgagtccctactgcttacacagcatctctttgagggagaatgcctgactgacacagtaatgaaagaataaatagatcctaatgcagtcatgaagccactgaagaaaattgtgcccaccctttgctgtgacctatataaaatatctctttctttgggatatcatcccctgattttctgcagaatagctctgcagctaaatatataccaggcaagcatgtattgtgttttgatttattatctttaaacacatgatatctcttcactttttggaaagttagatttctctgtagattatgaaatgctttgcagtcaggccaagatgctactaggtggggatgatcactaattcaaaaaagctggaagaatcctatttgctagtccaaactccttattttatcaaagaggaaacatacccagagtgggaaagagacttgcccaagcccacagaggaagttaattcgcttaacaaggagtagaacccatccatctagccaatattctttttacatcatattgttcacccctacactgccttgagcatgggagtcacctggttctgatggaccctctgacttccaccattccttctttggaatatgctataaaagaaaattcatggagaatatttttctgaaagcctcatgatcttatgtttccttgcagtccccctagggagaggggttatagaattcatacatttctgtagacattcatcgaaatgctgcttttgccaaatgaatgtttgtataatagggatgaaatgataattacagagttcagctcagaccagtcatcagttgtagtgaaactttgattatactgttacctactggttgcatttttggttttggttttgcatttttttcttcccacaaacactggctactctttgtcctaccccctccaccatgatgaaccatgtggaaactatttaaatcaattaatgtctttctcatttttcgaacatgtatgtgccacctcctggaagccatttcccataatctgttgtaggcactttactagtattgcacacattctggttaggttgagaatagctagactcttggtgctcgtcatatagtaagcaagaacttgggagtaataaaaggtgaataaaatgcatgcttcatttattccctttcctctatgaatattttgctgctgcattctagtctatgccagctttccatgtacccttggcctgcctattcatgaaatgccatataaaagacttaggaacatgagtaggtggtccatgctttgaggttcatccaattagggaataaatgtgaaaggctggaaagggaactagtttctgggatttgcctggaacttcccttggacattactagcacattctggaaaaaaagcaagttgaacatatctaccatcagtcctctcctacttacttcccaccccaccctatccactacccccactgatgctatgtttgcatcatcaaagtcaggggaattgagaaaagagattatcaaaataaattattaaaatccagaaaacagttttatgtgaagtaattcaggaagatctagtgttcattttgcatggattgtccagataattggctcttcactccgctgccttcccagtgcacaggtattgctaaagtggttaggctttaatgttttatgtttttagtttcaaactatgggaaatggagatttgaagaggcatttattccttgtcatcattttgtgtgctctgtgagaaggtggttatatgtttttgctggtttgtgtcccacagtgttcaactgcacattattctgatgaaaatccacaatgtctttgagcttctggttgtgtaatgctggggtttaaagtcaccatttgtgggtttggcatcaattaatatttagccagctggctaagagataggaaaagaatatgatatttctttccttatgtaataatgaaaagcaataattacaagtaggtaataatacacaaaggccataattagtctcttctagtgtttagaatgcacttgagaatcgtagagtcatttggagcgtgtttggaccaattagtatgtactgtagtacccttctggcaaacaaataactgaattgctactatttaacaatcttatgagcccacactactgcattttgggagtggcaaatgtgtttggaaatggaagcagttctttttaagcactgtatcagagagattgtcttgtacgtttgcctgttgcaaacaggctggtttgtaaaagatgtatgttttggtgtttgaaatgtttataaaattgtatataaatggtttcaattttccaggcttttgtagatactatatttgatgcctatcaggatgctttaatttggggggtcgaatataattgtaagtcatccacgctgttggtctgcaaacttttgaggtaactacacacacacacacacacacaaggattttagatttgaaaatgatgttttttactcatttcaaaatgtactgtaacctttctttggttcttactgttttcatttaactttctctgttttcaagaaaaattgtctttattgacatttgtaaaaaagaatgtgttttgcccagttattaagtattttatttttatgcaatttcagaatcacaatgaggtatgccatttcttcatatacatgcacattcacctcaacttgcacacacatcacacaccaaaccttatgcaaaggggaaagctaacacttagagtggattttgtcccttaaggaaatggattgttcctgcatatattgctggtggcagtattcagtcttgtgttctttttctaaaaaaaaagaaaagaaaagaaaaaaaaaacaaaagcaaacaaaaaaaaagacagccaaaaaaaagaaacaacaacaacaaaaaaaaacacaacagtgtacaggtttgtaactgccaaaatttgatggttaaaacaagttttcaagtaaaaagaaaaaaatgaaa

SEQ ID NO: 7251 - DNA, 535 bp, Homo sapiens
  source 1..535: mol_type = unassigned DNA; mol_type = unassigned DNA
cctttgttgaggtggaagtggtggatgtcaatgaaaacctccacactccctatttcccagactttgctgttgttggatctgtaaaggaaaactcacgcattggaacaagcgtgctgcaggtgactgctcgagatgaagactccggaagggatggagagatccagtactccatcagggatggcagtggtcttggaaggttcagtatagacgacgagagtggggtcatcactgccgcagacattcttgatcgggagacaatggggtcatactggctaacagtgtatgccacagacaggggcgttgttccactctactccaccattgaggtctacattgaagttgaagatgtgaatgacaatgccccgctgacctcagaacctatatattatcctgttgtcatggaaaactctccaaaggacgtatctgtcattcagatccaggctgaagatcctgactccagttccaatgaaaaactgacatacaggattacaagtggaaatcctcagaatttttttgccatcaatatcaaaacagg

SEQ ID NO: 7252 - DNA, 7894 bp, Homo sapiens
  source 1..7894: mol_type = unassigned DNA; mol_type = unassigned DNA
ctgaggacttcgtggggctgcacatgcatgggttccggcgcaccctgcggaatgcagtcctcacccagaagcaggacagcctgcgcatcatcagcatccagcccgtggcaggcaccaaccaactggacatgctgtttgcggtggagatgcacagcagcgagttctacaagccagcctacctgatccagaagctgtccaatgctagaagacacctggagaatatcatgcgcatctcagccatcttggagaagaactgctcagggctggactgtcaggaacagcattgtgagcaaggcttgtcactcgattcccacgcgctcatgacctacagcacggctcgcatcagctttgtgtgtccgcgtttctacaggaacgtgcgttgcacctgcaatggaggactgtgtccggggtccaacgatccttgtgtggagaagccgtgtccaggggacatgcagtgtgtcagttatgaagccagcaggagaccgttcctctgccagtgtccaccagggaagctcggagagtgctcagggcacacttctctcagctttgctggaaacagttacatcaaatatcggctttctgaaaatagcaaagaagaggatttcaaactagctctgcgtcttcgaacactgcaaagcaatgggattataatgtacaccagagcaaatccctgcataattctgaagattgtggatggcaagctgtggttccagctggactgcggcagcggccctggaatcttgggcatctcgggccgtgctgtcaacgacgggagctggcactcggtcttcctggagctcaaccgcaatttcacgagcctgtccctggatgacagctacgtggagcggcgccgggcgcccctctacttccagacgctgagcactgagagtagcatctacttcggcgccctggtgcaagcggataacatccgcagcctgactgacacgcgggtcacgcaggtgctcagcggcttccagggctgcctggactcggtgatactgaataacaatgagctgccgctgcagaacaagcgcagcagcttcgcggaggtggtgggcctgacggagctgaagctgggctgcgtgctctatcccgacgcctgcaagcgcagcccgtgccagcacgggggcagctgcactggcctgccatcggggggctatcagtgtacctgtctctcacagtttacggggagaaactgtgaatctgagattacagcctgcttcccaaacccctgccggaatggaggatcctgcgatccaataggaaacactttcatctgcaattgtaaagctgggctcactggagtcacgtgtgaggaggacatcaatgagtgcgaacgagaggagtgtgagaacggaggctcctgcgtgaacgtgttcggctccttcctctgcaactgcacgccgggctacgtgggccagtactgcgggctgcgccccgtggtggtacccaatatccaggctggccactcctacgtggggaaggaggagctcatcggcatcgccgtggtcctcttcgtcatcttcatcctggtggttctcttcatagtcttccgcaagaaggtcttccgcaagaactactcccgcaacaacatcacgctagtgcaggacccggccaccgccgccctgcttaacaagagcaatggcatcccgttccggaacctgcgcggcagtggggacggccgcaacgtctaccaggaggtggggcccccgcaggtccccgtgcgccccatggcctacacaccctgcttccagagtgactccaggagcaacctggataagatcgtggacgggctgggaggcgagcaccaggaaatgaccacgtttcaccctgagtcgccccgcatcctgacagcccggcggggcgtggtcgtgtgcagtgtggcccccaacctccccgccgtgtcaccctgccgctccgactgcgactccatccggaagaatggctgggacgcgggaactgagaacaaaggggttgatgacccgggagaagtgacctgctttgcaggtagtaataaaggcagcaactctgaagttcagtccctcagctccttccagtcagattctggtgacgacaatgcctatcactgggacacctctgattggatgccaggggcccgcctgtcggacatagaggaagtgcccaactatgagaaccaggatggagggtctgcacaccaggggagcacacgggagctggagagcgattactacctgggtggttatgacattgacagtgaatacccaccccctcatgaagaggagttcttgagtcaggaccagctgcctcctcctctcccggaggacttcccagaccaatatgaggccctgccaccctcccagcctgtctccctggccagcacactgagcccagactgcaggagaaggccccagtttcatcctagccagtatctccctcctcacccattccccaacgaaacggatttggtgggcccgcctgccagctgtgaatttagtacttttgctgtgagcatgaaccagggcacagagcccacaggcccagcagacagcgtgtctctgtccttgcacaattccagaggcacctcatcctcggatgtgtctgccaactgcggctttgacgattccgaagtagccatgagtgactacgagagcgtgggagagctcagcctcgccagccttcacattccctttgtggagactcagcatcagactcaagtgtagacatcacatcttgggtacttcaccctgtttgttacagaaaagtggaagcagattggctgggcttctgtcccagtggagcattgtctgtggaatgagaagggaatactgtatttttccactagaaacttcttcacaagtcatactgtcccaacaagcaagcttgattccagttgggtgaaaatgaaaggctcagaaattgtttttgagaggtgactggtaatccttgatgtaggtacctatgttcacagctaaaaatgcaaagagggaaaaattatttcacccactaagttatacagccagtcttgtatggctttgtgcagtattgtgccctggaaagtgttacagcatcagtccttgcagtattaaaaactggcaacaatcaaagaggcattgttgcatgtaattttgagccaatgaaatgaaaatagtagtaatgattgttggaaaagttagtctcttaggcgaaagagaagagaaacaaatattattaaacaaaccagaaaatgggctgaagccttttaaatcaactctatttttttgataagctgcccaattttcagctataaaattaggcttgaataacatgtttagtatgctcagttatttctgtttgtttgtgttaagcatccaatctaatatagttgggttttatgatcttcaagaaaggtatcaatgaagagcaacatgaggctttttgggttccatttggtgggtgggggaggaagttaaagttgtttgaacattagaaagaatgtgattatctggttggttttgtgttttctggtaaatattccagttggtaaatctaacattgctacagaagttggctttgttcatatagcttctctacaattagatatttttagaagtttaagcaaaactcacaaattcaggggggaaaaaagaaaaaacgataccttcaaagtttgcggcctagataatcacaattcttcataatgcagaggaaaggtgtctgttattctaaatcggtagcatcaccattataaatacaattatgttaagaaaagaggaaagtagactagttattgtgtataaattataatagtgtgtgtgtgtctgggcctatgtacaaatatgtgcttgcactcagtaaggctgctcttgaggaaagctaatgtgaaggttttgggaaatggaccatgttgaaaattctgccggcgagcatggcatacctttcaatttctctgatctctatggtgttagagaaacatcaaatgccatattttactctggttcagttaactttattttggtactgccaataaagcaaaattgtgcttttttttttttttctcaagacagagtcttgctctgtcacccaggctagagtgcaatggcatgatctcagctcactgcaatctccacctcctgggttcaagcgattctcctgcctcagcctcccaggttgctggggttacaggtgtgtgccaccacgcctggctaattttttgtatttttagtagagatggggtttcaccatgttggccaggctggtctcaaactcctgacctcgtaatccacctgccgtggcctcccaaagtgctgggattacaggcatgagccaccgtgcccagcccaaaactgtgctttttaaaaacagtattttgttataattttccagaacttacctctgttttaaaagtgtgtaatgtttgattacaccctgggattcccttctcatctgtgggctttggccatgatttccaaaattaacaggagaatcattccactggaaatataacaatccagtcctcaaaactgaaagttgacaggttgagggactttccttttttgcttcaatcagattacggccgcctgtgcagtggccatggtaaatatatgcatatttgcactatctgcttaatgagcaaatctgtgtccacagtttctgatgacatatggcattggtgtgtaaattgtactgtccctagtctgtgcattattcactcagacatatttttagttatttcaattgcgtttaatccacttcttttttatgagtcagtgtttctgaatgtttatgcaaaaaaaaaaatcctttttcattcccaaactttctaagtaagtggatacactacacttcacaagttttccagcctttctcttcctgtctcttggtcagacctactcatggaggtattatccacactgtgatcttgaaataaatgaatttcactaaggctgctttcgagaacaaagtctttggtatttttcttatgtaagaagcacatttgcaagaatcatggaaaaaaatgacaaactaatggcctagaatagagtgactgctacactttaagtaatgcaatgacataaaaaccatcaaagtaaaaccaacatgtcatttcctgcccccaggaaatattagaatgagattaatgctgatgagtccctactgcttacacagcatctctttgagggagaatgcctgactgacacagtaatgaaagaataaatagatcctaatgcagtcatgaagccactgaagaaaattgtgcccaccctttgctgtgacctatataaaatatctctttctttgggatatcatcccctgattttctgcagaatagctctgcagctaaatatataccaggcaagcatgtattgtgttttgatttattatctttaaacacatgatatctcttcactttttggaaagttagatttctctgtagattatgaaatgctttgcagtcaggccaagatgctactaggtggggatgatcactaattcaaaaaagctggaagaatcctatttgctagtccaaactccttattttatcaaagaggaaacatacccagagtgggaaagagacttgcccaagcccacagaggaagttaattcgcttaacaaggagtagaacccatccatctagccaatattctttttacatcatattgttcacccctacactgccttgagcatgggagtcacctggttctgatggaccctctgacttccaccattccttctttggaatatgctataaaagaaaattcatggagaatatttttctgaaagcctcatgatcttatgtttccttgcagtccccctagggagaggggttatagaattcatacatttctgtagacattcatcgaaatgctgcttttgccaaatgaatgtttgtataatagggatgaaatgataattacagagttcagctcagaccagtcatcagttgtagtgaaactttgattatactgttacctactggttgcatttttggttttggttttgcatttttttcttcccacaaacactggctactctttgtcctaccccctccaccatgatgaaccatgtggaaactatttaaatcaattaatgtctttctcatttttcgaacatgtatgtgccacctcctggaagccatttcccataatctgttgtaggcactttactagtattgcacacattctggttaggttgagaatagctagactcttggtgctcgtcatatagtaagcaagaacttgggagtaataaaaggtgaataaaatgcatgcttcatttattccctttcctctatgaatattttgctgctgcattctagtctatgccagctttccatgtacccttggcctgcctattcatgaaatgccatataaaagacttaggaacatgagtaggtggtccatgctttgaggttcatccaattagggaataaatgtgaaaggctggaaagggaactagtttctgggatttgcctggaacttcccttggacattactagcacattctggaaaaaaagcaagttgaacatatctaccatcagtcctctcctacttacttcccaccccaccctatccactacccccactgatgctatgtttgcatcatcaaagtcaggggaattgagaaaagagattatcaaaataaattattaaaatccagaaaacagttttatgtgaagtaattcaggaagatctagtgttcattttgcatggattgtccagataattggctcttcactccgctgccttcccagtgcacaggtattgctaaagtggttaggctttaatgttttatgtttttagtttcaaactatgggaaatggagatttgaagaggcatttattccttgtcatcattttgtgtgctctgtgagaaggtggttatatgtttttgctggtttgtgtcccacagtgttcaactgcacattattctgatgaaaatccacaatgtctttgagcttctggttgtgtaatgctggggtttaaagtcaccatttgtgggtttggcatcaattaatatttagccagctggctaagagataggaaaagaatatgatatttctttccttatgtaataatgaaaagcaataattacaagtaggtaataatacacaaaggccataattagtctcttctagtgtttagaatgcacttgagaatcgtagagtcatttggagcgtgtttggaccaattagtatgtactgtagtacccttctggcaaacaaataactgaattgctactatttaacaatcttatgagcccacactactgcattttgggagtggcaaatgtgtttggaaatggaagcagttctttttaagcactgtatcagagagattgtcttgtacgtttgcctgttgcaaacaggctggtttgtaaaagatgtatgttttggtgtttgaaatgtttataaaattgtatataaatggtttcaattttccaggcttttgtagatactatatttgatgcctatcaggatgctttaatttggggggtcgaatataattgtaagtcatccacgctgttggtctgcaaacttttgaggtaactacacacacacacacacacacaaggattttagatttgaaaatgatgttttttactcatttcaaaatgtactgtaacctttctttggttcttactgttttcatttaactttctctgttttcaagaaaaattgtctttattgacatttgtaaaaaagaatgtgttttgcccagttattaagtattttatttttatgcaatttcagaatcacaatgaggtatgccatttcttcatatacatgcacattcacctcaacttgcacacacatcacacaccaaaccttatgcaaaggggaaagctaacacttagagtggattttgtcccttaaggaaatggattgttcctgcatatattgctggtggcagtattcagtcttgtgttctttttct

SEQ ID NO: 7253 - DNA, 581 bp, Homo sapiens
  source 1..581: mol_type = unassigned DNA; mol_type = unassigned DNA
cgtgtgcagtgtggcccccaacctccccgccgtgtcaccctgccgctccgactgcgactccatccggaagaatggctgggacgcgggaactgagaacaaaggggttgatgacccgggagaagtgacctgctttgcaggtagtaataaaggcagcaactctgaagttcagtccctcagctccttccagtcagattctggtgacgacaatgcctatcactgggacacctctgattggatgccaggggcccgcctgtcggacatagaggaagtgcccaactatgagaaccaggatggagggtctgcacaccaggggagcacacgggagctggagagcgattactacctgggtggttatgacattgacagtgaatacccaccccctcatgaagaggagttcttgagtcaggaccagctgcctcctcctctcccggaggacttcccagaccaatatgaggccctgccaccctcccagcctgtctccctggccagcacactgagcccagactgcaggagaaggccccagtttcatcctagccagtatctccctcctcacccattccccaacgaaacggatttggtgg

SEQ ID NO: 7254 - DNA, 481 bp, Homo sapiens
  source 1..481: mol_type = unassigned DNA; mol_type = unassigned DNA
tgtggagctaaattattttctctaagcaaatgaaagtgcctcgagaagtgaactagctgagaggggtgggtgggactggaaataggcacaaggtaaccagtgtaatttctgctttctctttcactgtccatgaagacaaaggggttgatgacccgggagaagtgacctgctttgcaggtagtaataaaggcagcaactctgaagttcagtccctcagctccttccagtcagattctggtgacgacaatgcctccatagtgactgtcattcagcttgtcaacaatgtagttgacactatagagaatgaagtgtctgtcatggaccaaggacagaactacaaccgagcctatcactgggacacctctgattggatgccaggggcccgcctgtcggacatagaggaagtgcccaactatgagaaccaggatggagggtctgcacaccaggggagcacacgggagctggagagcgattactacct

SEQ ID NO: 7255 - DNA, 19030 bp, Homo sapiens
  source 1..19030: mol_type = unassigned DNA; mol_type = unassigned DNA
gatggaagtatgatgtgatggatataattatgggacactgtgtgggcacacggcctcctgcttgttgcctcatcctcctgcttttcaagcttttggccactgtctcccaggggctgccagggactggacccctgggcttccacttcacacattccatttataatgctaccgtgtatgagaactcagcagcaaggacctacgtcaacagccagagtagaatgggcatcaccttaatagatctatcctgggatatcaaatacagaatagtgtccggagacgaggaaggctttttcaaagcagaggaagtcatcattgcagatttctgttttctcagaataagaactaaaggtggcaattctgccatattaaatagggaaatccaggataattatttattgatagtaaaaggttctgtcagaggagaggatttggaagcatggaccaaagtgaatatacaggttttagatatgaatgatctgagacctttgttttcacccacaacatactctgttaccatagcagaaagcacacctctaaggactagtgttgcccaggtgactgcaacagacgcagatattggttccaatggagaattctactactactttaaaaataaagttgatctcttttcagttcaccccacgagtggtgtcatctccttaagtggtcgattaaattatgatgaaaagaataggtatgatctggaaattttggctgtggaccggggaatgaaactgtatgggaacaatggagtgagcagtactgcaaagctttatgttcacattgagcgcataaatgaacatgccccaacaatccatgtagtcactcatgttcctttctcgttggaaaaagagccaacatatgcagtggtgacagttgatgacttagatgatggagcgaatggagagatcgaatctgtttccattgtggctggggatcctttagatcagttcttcctggctaaggaaggaaagtggttgaatgagtacaagattaaggagaggaagcagattgactgggagagctttccctatggctacaatctcactcttcaagcaaaagacaagggatctcctcaaaaatgttcagcattaaaggcagtctacattggcaaccccacaagagacactgtccccattagatttgaaaaagaagtgtacgatgtgagcataagtgaattttcccctcctggtgtcgtggttgctatagtaaaattaagtcctgaaccgatagatgtggaatacaaattatctcctggtgaggatgcagtgtactttaaaattaatcctcggtcgggtctgattgttacagcacggccactgaatactgttaagaaggaggtttataaactggaggtgacaaacaaggaaggagatttaaaagcacaggtcaccatcagcatagaagatgcaaatgaccacaccccagaatttcagcaaccactgtatgatgcttatgtgaatgaaagtgtcccagtgggaaccagcgttctaacagtttcagcttctgataaggataaaggagaaaatgggtacatcacctatagtatcgctagcctgaatttgttaccatttgtcattaatcagtttacaggtgttattagcacaactgaagaactggattttgaatcctccccagaaatttacagattcattgttagagcctctgactggggttcaccataccgccatgaaagtgaggtcaatgtgactattcgaataggaaatgtcaacgacaacagccctctctttgaaaaagtggcttgccagggagttatttcatatgactttccagttggtggtcacatcacagcagtctcagcgatcgatatcgatgaacttgaacttgtaaagtacaaaatcatttctggaaatgaacttggcttcttttatttaaacccagattctggtgttttacagcttaaaaaatcactgacaaattctggcattaaaaatggcaattttgccctcagaattacagcaactgatggagagaatcttgcagaccccatgtctattaacatttcagtcctacatgggaaagtgtcttcaaagagcttcagttgcagagaaactcgtgtggctcaaaagctggcagagaaactactcattaaggcaaaagcaaatgggaaactgaatctggaagatggatttcttgacttttattcaattaatagacagggaccatattttgacaagtcttttccttctgatgtggctgtaaaggaggatctgccagttggtgctaacattctgaagattaaagcctatgatgccgactctggcttcaatggaaaagtgctatttacaatatcagatggaaatacggatagttgctttaatattgatatggagactgggcagcttaaagtccttatgcccatggatcgagaacacacagacctctatctccttaatatcaccatctatgacttaggtaatccacagaaatcgtcatggagactgctgaccatcaatgtggaggatgctaatgacaatagcccagtttttattcaagacagttactcagttaacattcttgaaagttcaggcattggtactgaaatcattcaagtggaagccagagacaaagacttaggttctaatggtgaagtgacttactcagtcttgacagatacacagcagtttgccatcaatagctcaactggaatcgtttatgtagccgaccagttggaccgggaatccaaagccaattattctttgaaaatagaagccagggacaaggcagagagtggtcagcagctgttttcagttgtcactcttaaagtttttttagatgatgtcaatgactgctccccagctttcattcccagtagctatagtgtgaaggttcttgaagatctccctgttggcactgtcattgcttggcttgagacccatgatccagatcttggactggggggtcaagtgcgctattctttggtcaatgactataatgggagatttgaaatagataaagcaagtggtgccatccgcttgagcaaagagcttgattatgagaaacagcagttctataaccttactgtgcgggccaaagacaaagggcggcctgtctctctgtcatctgtttcctttgttgaggtggaagtggtggatgtcaatgaaaacctccacactccctatttcccagactttgctgttgttggatctgtaaaggaaaactcacgcattggaacaagcgtgctgcaggtgactgctcgagatgaagactccggaagggatggagagatccagtactccatcagggatggcagtggtcttggaaggttcagtatagacgacgagagtggggtcatcactgccgcagacattcttgatcgggagacaatggggtcatactggctaacagtgtatgccacagacaggggcgttgttccactctactccaccattgaggtctacattgaagttgaagatgtgaatgacaatgccccgctgacctcagaacctatatattatcctgttgtcatggaaaactctccaaaggacgtatctgtcattcagatccaggctgaagatcctgactccagttccaatgaaaaactgacatacaggattacaagtggaaatcctcagaatttttttgccatcaatatcaaaacaggtctgattacaacaacttcaaggaaattggatcgagaacagcaggcagaacattttctggaggtgactgtgacagatggtggtccctctccaaaacagtcaaccatttgggtggtggttcaggttctagatgaaaatgacaacaagccccagttcccagagaaggtctaccagatcaagctgccagaacgtgaccgaaagaagagaggagaaccgatttacagggcttttgcatttgatagagatgagggccccaacgcagaaatctcctacagtattgtggatgggaatgatgacggaaagttctttattgaccctaaaactgggatggtttcttctagaaagcagtttacagcaggcagttatgacatcctaacgataaaggcagtggacaatgggcgcccacagaaatcctccacggcccgcctccacattgaatggattaagaaaccacccccttcacctataccattgaccttcgatgagccgttttataacttcacagtcatggaaagtgatagagtgactgaaattgtaggggtggtgtctgtgcagccagctaacacccctctgtggtttgacatagttggggggaattttgacagcgcttttgatgcagagaagggtgttgggacaattgtcatcgcaaaacctttggatgcagagcagaggtccatctataatatgagtgtggaagtcaccgatgggacaaatgttgctgttactcaggtatttatcaaagtgctggataataatgataatggcccagaattctctcagccgaattacgatgtgacaatttccgaggatgtgcttccagacacggagatcctgcagattgaagccacagatagagatgagaagcacaagctgagctacactgttcatagcagcatcgactccatcagcatgagaaaattccggattgaccctagcactggcgtgctctatactgccgagaggctggaccatgaggcccaggacaagcacattctcaacataatggtcagagatcaggagtttccttatcgaagaaacttggcccgagtcattgtgaatgtggaggatgctaatgatcacagtccttattttaccaacccactgtatgaagcgtctgtgtttgaatctgctgctctgggatcagctgttctgcaagtgacggctctggacaaagacaaaggagaaaatgcagaactcatatataccatagaagcagggaacactgggaacatgtttaagatcgaaccggtcctaggcatcatcaccatttgcaaagaaccagacatgacgacgatgggtcagtttgtcctatccatcaaagtcacagatcagggatccccgccaatgtctgctactgcaattgtgcgcatttccgtcaccatgtctgacaattctcaccccaagttcattcacaaagactaccaagcagaagtaaatgaaaatgttgacattggaacatcagtcattctaatctctgccatcagtcaatctaccctcatttatgaagtcaaagatggagacattaatgggatctttaccataaatccatattctggagtcatcaccactcagaaggccctggattatgagcgcacatcctcttatcaactcatcattcaggccaccaatatggcaggaatggcttccaatgctacagtcaatattcagattgttgatgaaaatgataatgccccagtttttctcttttctcaatactcaggcagcctaagtgaggctgccccaattaatagcattgtcaggagcttggataacagcccactggtgattcgagccacagatgctgacagcaaccggaatgctctgcttgtgtatcagattgtggagtcaacagcaaaaaagtttttcacggtggactccagtacaggtgcaatcagaacaattgccaacctggaccatgaaaccattgcccatttccattttcatgtgcatgtgagagacagtggtagcccccaactgactgcagagagtcccgttgaagtcaacattgaggtgacagatgtgaatgataacccacctgtttttactcaggctgtgtttgagactatcttacttctacctacctatgttggagtggaggttctgaaagttagtgccacagatcctgactctgaggtaccccctgaactgacatacagcctaatggaaggcagtttggatcattttttaattgactcaaacagtggagtacttaccataaaaaacaacaacctctccaaggatcactacatgctgatagttaaggtgtctgatggaaagttctacagtacctccatggtcaccatcatggttaaagaagccatggacagcggcctccactttacacaaagcttctattccacctcaatctcagagaacaacactaacataaccaaagttgctattgtcaatgcagttggaaatcgccttaatgagcccttaaaatacagcatcttaaacccaggaaataagttcaagataaaatctacctcaggggtcattcagacgactggagtcccctttgaccgtgaagaacaagagttatatgagctggtggtagaagccagccgtgagctggaccatctgcgtgtggccagagtggtggtcagggttaacattgaagacataaatgacaattctccagtctttgtgggcctcccatactatgctgctgttcaagtggatgcggaacccgggactctgatttatcaggtgacagccattgacaaagataaaggtccaaatggagaagtgacctatgtcctgcaggatgactatggccactttgaaattaaccctaattcagggaatgttattttaaaggaagcattcaactctgacttgtccaacattgagtatggagtcaccatcctagccaaggatggcggaaaaccttctttgtctacatctgtggagcttcccatcactattgtcaacaaagcaatgcctgtgtttgataagcccttttatacagcatctgtcaatgaagacatcagaatgaacacacccatcctaagcatcaatgccaccagtccagaaggccaaggcatcatatatatcattatcgatggggacccttttaaacagtttaacattgactttgacactggggtcctgaaagttgttagccctttggattatgaagttacatctgcttacaagctgacaataagagccagcgacgcccttactggtgctagggctgaagtcactgttgacttgctagttaatgatgtaaatgacaacccccctattttcgatcagcctacatacaatacaacactatcagaagcatctcttattgggacacctgttttacaagttgtctctattgatgcagactcagaaaacaataaaatggtacattatcagattgtccaggatacctacaatagcacagattattttcacatagatagctcaagtggcttaatcctgacagcacgaatgctggaccatgagttagtacaacactgcactttgaaagtcagatcaatagatagtggcttcccatcactgagcagtgaggttctcgttcatatctacatctctgatgtaaatgacaaccctccagtttttaatcagctcatttatgagtcatatgtgagtgaattagccccccggggccattttgtaacctgtgtacaagcctctgatgcagacagctctgattttgaccggttggaatatagcattttatctgggaatgaccggacgagctttctgatggacagcaagagtggagttatcacattgtccaaccatcggaagcagcggatggagcctctgtacagtctcaatgtgtctgtctctgatgggttgttcaccagcactgcacaggtgcatattagggtacttggggctaacttgtacagccctgccttttcacaaagcacatacgtagctgaggtgagagagaacgtggctgcaggaacaaaggtaattcatgttcgagccacagatggtgatccagggacttatgggcagatcagctatgccatcatcaatgactttgccaaggatcgattcctcatagacagcaatgggcaggtcatcaccacagaaaggctagaccgggaaaaccctctagaaggggatgttagtatttttgtgagggcccttgatggtggagggagaacaactttctgcactgtgagagtgattgttgtggatgaaaatgacaatgctccccagttcatgacagtggaatatagagccagtgtcagggcagatgttggaaggggccacttggtcactcaagttcaagccatagatcccgatgatggagcaaattcaaggattacttattccctctatagcgaggcctctgtttcagtggccgacctcctggaaatcgatcctgacaatggctggatggtcacaaagggtaattttaaccagctgaaaaatacagtgctttcgttctttgtcaaagcagtagatgggggcatcccagtaaagcactccctcattcctgtctatatccacgtcttgccccctgaaacgttcttgccatcattcacccagtctcagtattcctttaccattgcagaagatacagccattgggagtacagtggacaccctgaggattttgcccagtcagaatgtctggttcagcacagttaatggggaacggccagaaaataacaaagggggcatattcgtcatagaacaggaaacaggcactattaagcttgacaaacgccttgaccgtgaaaccagcccagctttccactttaaagtagcagccactatacccctggacaaagtagacattgtgtttactgtggatgtagatatcaaggtattggatttgaatgacaacaagccagtctttgaaacttcaagctatgacaccattataatggaagggatgcctgttggcaccaaactcacacaagtgagagctattgatatggactggggagccaatggacaagtcacttactccctccactcggattcccagcccgaaaaggtaatggaagcattcaatattgacagcaacacgggctggatcagtaccttgaaggacctagatcacgagacagaccccacattcaccttctctgtggtggcctctgaccttggagaggcattctctctttcctccacggccttggtctctgtcagagtgacagatataaatgacaatgcaccagtcttcgcgcaggaagtgtaccgagggaatgtgaaggagagcgacccaccgggcgaggtggtagccgtcctcagcacctgggacagagacacatccgacgttaatcgccaagtgagctaccatattacaggaggaaaccctcgaggaaggtttgctctgggcctggtgcaaagtgagtggaaggtctatgtgaagaggcctctagacagagaagaacaggacatttactttctcaatatcactgccactgatgggctttttgtcacacaggccatggtggaagtgagcgtcagtgatgtgaatgacaatagcccagtgtgtgatcaggttgcatatacagcattacttcctgaagacattccatcaaataaaatcatcctgaaagtcagtgcaaaggatgctgatattggatccaatggatatatacgatactcactctatggatctggaaacagtgaattttttctagatccagaaagtggcgagttaaaaaccttggctctgttggaccgggagaggatccccgtgtacagcctgatggccaaggccactgacgggggtggcaggttctgccagtccaacatccacctaatcctggaggatgtgaatgataacccccctgtgttttcttctgaccactacaacacctgtgtctatgagaacacagccaccaaggctctgttgaccagagttcaagccgtggaccccgacattggcatcaataggaaggtcgtgtactccctggcagactcagctggtggggtcttctccattgacagctcatctggcatcatcatcctggagcagccactggaccgtgagcagcagtcttcgtacaacatcagcgtgcgggccactgaccagagtcctggacagtccctgtcctctctcactactgtcaccatcaccgttctggacattaatgacaacccccctgtgtttgagaggagggactacctggtgacggtgcctgaggacacctcccctggcacccaagtccttgctgtttttgccaccagcaaagatattggcacaaatgctgagatcacttatctcatccggtctgggaacgaacaagggaaatttaagatcaaccccaagacagggggtatttctgtctctgaagtcctggactatgaattatgcaaaaggttttacctggtagtggaagccaaagatgggggcaccccagctctcagcgctgtggccactgtcaacatcaacctcacagatgttaatgacaaccctcccaagttcagccaagacgtctacagtgcggttatcagtgaagacgccttggtgggagactctgtcattttgctaatagcagaagatgtagacagccagcccaacggacagattcatttttccattgtgaatggagatcgggacaatgaatttactgtagatcctgtcttgggacttgtgaaagttaagaagaaattggaccgggaacgggtgtctggatactctctgcttgtccaggccgtagacagtggcattcctgcaatgtcatcaactgcaactgtcaacattgatatttctgatgtgaatgacaacagcccggtgtttacacctgccaactatactgctgtgattcaggaaaataagccagtgggcaccagcatcttgcagctggtggtgacagacagagactcctttcacaatgggcctcccttttcattctctattttgtcgggaaatgaagaggaggagtttgtgttggaccctcatgggatcttgcggtcggctgtggtcttccagcacacagagtctctggaatacgtgttgtgtgtccaggcaaaggattcaggcaaaccccagcaagtttctcacacttacatccgcgtgcgagtcattgaggaaagcacccacaagcccacagccattcccctggaaattttcattgtcaccatggaggatgactttcctggtggggtcattgggaagattcatgccacagatcaagacatgtatgatgtgctcacatttgccctgaaatcggagcagaaaagcttatttaaagtgaacagtcacgatgggaaaatcatcgccctgggaggcctggacagcggcaagtatgtcctgaatgtgtctgtgagtgatggtcgcttccaggtacccattgatgtggtcgtgcatgtggagcagttggtgcatgagatgctgcagaacactgtcaccatccgctttgaaaatgtgtcccctgaggacttcgtggggctgcacatgcatgggttccggcgcaccctgcggaatgcagtcctcacccagaagcaggacagcctgcgcatcatcagcatccagcccgtggcaggcaccaaccaactggacatgctgtttgcggtggagatgcacagcagcgagttctacaagccagcctacctgatccagaagctgtccaatgctagaagacacctggagaatatcatgcgcatctcagccatcttggagaagaactgctcagggctggactgtcaggaacagcattgtgagcaaggcttgtcactcgattcccacgcgctcatgacctacagcacggctcgcatcagctttgtgtgtccgcgtttctacaggaacgtgcgttgcacctgcaatggaggactgtgtccggggtccaacgatccttgtgtggagaagccgtgtccaggggacatgcagtgtgtcagttatgaagccagcaggagaccgttcctctgccagtgtccaccagggaagctcggagagtgctcagggcacacttctctcagctttgctggaaacagttacatcaaatatcggctttctgaaaatagcaaagaagaggatttcaaactagctctgcgtcttcgaacactgcaaagcaatgggattataatgtacaccagagcaaatccctgcataattctgaagattgtggatggcaagctgtggttccagctggactgcggcagcggccctggaatcttgggcatctcgggccgtgctgtcaacgacgggagctggcactcggtcttcctggagctcaaccgcaatttcacgagcctgtccctggatgacagctacgtggagcggcgccgggcgcccctctacttccagacgctgagcactgagagtagcatctacttcggcgccctggtgcaagcggataacatccgcagcctgactgacacgcgggtcacgcaggtgctcagcggcttccagggctgcctggactcggtgatactgaataacaatgagctgccgctgcagaacaagcgcagcagcttcgcggaggtggtgggcctgacggagctgaagctgggctgcgtgctctatcccgacgcctgcaagcgcagcccgtgccagcacgggggcagctgcactggcctgccatcggggggctatcagtgtacctgtctctcacagtttacggggagaaactgtgaatctgagattacagcctgcttcccaaacccctgccggaatggaggatcctgcgatccaataggaaacactttcatctgcaattgtaaagctgggctcactggagtcacgtgtgaggaggacatcaatgagtgcgaacgagaggagtgtgagaacggaggctcctgcgtgaacgtgttcggctccttcctctgcaactgcacgccgggctacgtgggccagtactgcgggctgcgccccgtggtggtacccaatatccaggctggccactcctacgtggggaaggaggagctcatcggcatcgccgtggtcctcttcgtcatcttcatcctggtggttctcttcatagtcttccgcaagaaggtcttccgcaagaactactcccgcaacaacatcacgctagtgcaggacccggccaccgccgccctgcttaacaagagcaatggcatcccgttccggaacctgcgcggcagtggggacggccgcaacgtctaccaggaggtggggcccccgcaggtccccgtgcgccccatggcctacacaccctgcttccagagtgactccaggagcaacctggataagatcgtggacgggctgggaggcgagcaccaggaaatgaccacgtttcaccctgagtcgccccgcatcctgacagcccggcggggcgtggtcgtgtgcagtgtggcccccaacctccccgccgtgtcaccctgccgctccgactgcgactccatccggaagaatggctgggacgcgggaactgagaacaaaggggttgatgacccgggagaagtgacctgctttgcaggtagtaataaaggcagcaactctgaagttcagtccctcagctccttccagtcagattctggtgacgacaatgcctatcactgggacacctctgattggatgccaggggcccgcctgtcggacatagaggaagtgcccaactatgagaaccaggatggagggtctgcacaccaggggagcacacgggagctggagagcgattactacctgggtggttatgacattgacagtgaatacccaccccctcatgaagaggagttcttgagtcaggaccagctgcctcctcctctcccggaggacttcccagaccaatatgaggccctgccaccctcccagcctgtctccctggccagcacactgagcccagactgcaggagaaggccccagtttcatcctagccagtatctccctcctcacccattccccaacgaaacggatttggtgggcccgcctgccagctgtgaatttagtacttttgctgtgagcatgaaccagggcacagagcccacaggcccagcagacagcgtgtctctgtccttgcacaattccagaggcacctcatcctcggatgtgtctgccaactgcggctttgacgattccgaagtagccatgagtgactacgagagcgtgggagagctcagcctcgccagccttcacattccctttgtggagactcagcatcagactcaagtgtagacatcacatcttgggtacttcaccctgtttgttacagaaaagtggaagcagattggctgggcttctgtcccagtggagcattgtctgtggaatgagaagggaatactgtatttttccactagaaacttcttcacaagtcatactgtcccaacaagcaagcttgattccagttgggtgaaaatgaaaggctcagaaattgtttttgagaggtgactggtaatccttgatgtaggtacctatgttcacagctaaaaatgcaaagagggaaaaattatttcacccactaagttatacagccagtcttgtatggctttgtgcagtattgtgccctggaaagtgttacagcatcagtccttgcagtattaaaaactggcaacaatcaaagaggcattgttgcatgtaattttgagccaatgaaatgaaaatagtagtaatgattgttggaaaagttagtctcttaggcgaaagagaagagaaacaaatattattaaacaaaccagaaaatgggctgaagccttttaaatcaactctatttttttgataagctgcccaattttcagctataaaattaggcttgaataacatgtttagtatgctcagttatttctgtttgtttgtgttaagcatccaatctaatatagttgggttttatgatcttcaagaaaggtatcaatgaagagcaacatgaggctttttgggttccatttggtgggtgggggaggaagttaaagttgtttgaacattagaaagaatgtgattatctggttggttttgtgttttctggtaaatattccagttggtaaatctaacattgctacagaagttggctttgttcatatagcttctctacaattagatatttttagaagtttaagcaaaactcacaaattcaggggggaaaaaagaaaaaacgataccttcaaagtttgcggcctagataatcacaattcttcataatgcagaggaaaggtgtctgttattctaaatcggtagcatcaccattataaatacaattatgttaagaaaagaggaaagtagactagttattgtgtataaattataatagtgtgtgtgtgtctgggcctatgtacaaatatgtgcttgcactcagtaaggctgctcttgaggaaagctaatgtgaaggttttgggaaatggaccatgttgaaaattctgccggcgagcatggcatacctttcaatttctctgatctctatggtgttagagaaacatcaaatgccatattttactctggttcagttaactttattttggtactgccaataaagcaaaattgtgcttttttttttttttctcaagacagagtcttgctctgtcacccaggctagagtgcaatggcatgatctcagctcactgcaatctccacctcctgggttcaagcgattctcctgcctcagcctcccaggttgctggggttacaggtgtgtgccaccacgcctggctaattttttgtatttttagtagagatggggtttcaccatgttggccaggctggtctcaaactcctgacctcgtaatccacctgccgtggcctcccaaagtgctgggattacaggcatgagccaccgtgcccagcccaaaactgtgctttttaaaaacagtattttgttataattttccagaacttacctctgttttaaaagtgtgtaatgtttgattacaccctgggattcccttctcatctgtgggctttggccatgatttccaaaattaacaggagaatcattccactggaaatataacaatccagtcctcaaaactgaaagttgacaggttgagggactttccttttttgcttcaatcagattacggccgcctgtgcagtggccatggtaaatatatgcatatttgcactatctgcttaatgagcaaatctgtgtccacagtttctgatgacatatggcattggtgtgtaaattgtactgtccctagtctgtgcattattcactcagacatatttttagttatttcaattgcgtttaatccacttcttttttatgagtcagtgtttctgaatgtttatgcaaaaaaaaaaatcctttttcattcccaaactttctaagtaagtggatacactacacttcacaagttttccagcctttctcttcctgtctcttggtcagacctactcatggaggtattatccacactgtgatcttgaaataaatgaatttcactaaggctgctttcgagaacaaagtctttggtatttttcttatgtaagaagcacatttgcaagaatcatggaaaaaaatgacaaactaatggcctagaatagagtgactgctacactttaagtaatgcaatgacataaaaaccatcaaagtaaaaccaacatgtcatttcctgcccccaggaaatattagaatgagattaatgctgatgagtccctactgcttacacagcatctctttgagggagaatgcctgactgacacagtaatgaaagaataaatagatcctaatgcagtcatgaagccactgaagaaaattgtgcccaccctttgctgtgacctatataaaatatctctttctttgggatatcatcccctgattttctgcagaatagctctgcagctaaatatataccaggcaagcatgtattgtgttttgatttattatctttaaacacatgatatctcttcactttttggaaagttagatttctctgtagattatgaaatgctttgcagtcaggccaagatgctactaggtggggatgatcactaattcaaaaaagctggaagaatcctatttgctagtccaaactccttattttatcaaagaggaaacatacccagagtgggaaagagacttgcccaagcccacagaggaagttaattcgcttaacaaggagtagaacccatccatctagccaatattctttttacatcatattgttcacccctacactgccttgagcatgggagtcacctggttctgatggaccctctgacttccaccattccttctttggaatatgctataaaagaaaattcatggagaatatttttctgaaagcctcatgatcttatgtttccttgcagtccccctagggagaggggttatagaattcatacatttctgtagacattcatcgaaatgctgcttttgccaaatgaatgtttgtataatagggatgaaatgataattacagagttcagctcagaccagtcatcagttgtagtgaaactttgattatactgttacctactggttgcatttttggttttggttttgcatttttttcttcccacaaacactggctactctttgtcctaccccctccaccatgatgaaccatgtggaaactatttaaatcaattaatgtctttctcatttttcgaacatgtatgtgccacctcctggaagccatttcccataatctgttgtaggcactttactagtattgcacacattctggttaggttgagaatagctagactcttggtgctcgtcatatagtaagcaagaacttgggagtaataaaaggtgaataaaatgcatgcttcatttattccctttcctctatgaatattttgctgctgcattctagtctatgccagctttccatgtacccttggcctgcctattcatgaaatgccatataaaagacttaggaacatgagtaggtggtccatgctttgaggttcatccaattagggaataaatgtgaaaggctggaaagggaactagtttctgggatttgcctggaacttcccttggacattactagcacattctggaaaaaaagcaagttgaacatatctaccatcagtcctctcctacttacttcccaccccaccctatccactacccccactgatgctatgtttgcatcatcaaagtcaggggaattgagaaaagagattatcaaaataaattattaaaatccagaaaacagttttatgtgaagtaattcaggaagatctagtgttcattttgcatggattgtccagataattggctcttcactccgctgccttcccagtgcacaggtattgctaaagtggttaggctttaatgttttatgtttttagtttcaaactatgggaaatggagatttgaagaggcatttattccttgtcatcattttgtgtgctctgtgagaaggtggttatatgtttttgctggtttgtgtcccacagtgttcaactgcacattattctgatgaaaatccacaatgtctttgagcttctggttgtgtaatgctggggtttaaagtcaccatttgtgggtttggcatcaattaatatttagccagctggctaagagataggaaaagaatatgatatttctttccttatgtaataatgaaaagcaataattacaagtaggtaataatacacaaaggccataattagtctcttctagtgtttagaatgcacttgagaatcgtagagtcatttggagcgtgtttggaccaattagtatgtactgtagtacccttctggcaaacaaataactgaattgctactatttaacaatcttatgagcccacactactgcattttgggagtggcaaatgtgtttggaaatggaagcagttctttttaagcactgtatcagagagattgtcttgtacgtttgcctgttgcaaacaggctggtttgtaaaagatgtatgttttggtgtttgaaatgtttataaaattgtatataaatggtttcaattttccaggcttttgtagatactatatttgatgcctatcaggatgctttaatttggggggtcgaatataattgtaagtcatccacgctgttggtctgcaaacttttgaggtaactacacacacacacacacacacaaggattttagatttgaaaatgatgttttttactcatttcaaaatgtactgtaacctttctttggttcttactgttttcatttaactttctctgttttcaagaaaaattgtctttattgacatttgtaaaaaagaatgtgttttgcccagttattaagtattttatttttatgcaatttcagaatcacaatgaggtatgccatttcttcatatacatgcacattcacctcaacttgcacacacatcacacaccaaaccttatgcaaaggggaaagctaacacttagagtggattttgtcccttaaggaaatggattgttcctgcatatattgctggtggcagtattcagtcttgtgttctttttctaaaaaaaaagaaaagaaaagaaaaaaaaaacaaaagcaaacaaaaaaaaagacagccaaaaaaaagaaacaacaacaacaaaaaaaaacacaacagtgtacaggtttgtaactgccaaaatttgatggttaaaacaagttttcaagt

SEQ ID NO: 7256 - DNA, 19030 bp, Homo sapiens; identical to SEQ ID NO: 7255
  source 1..19030: mol_type = unassigned DNA

SEQ ID NO: 7257 - DNA, 18699 bp, Homo sapiens; identical to SEQ ID NO: 7250
  source 1..18699: mol_type = unassigned DNA

SEQ ID NO: 7258 - DNA, 535 bp, Homo sapiens; identical to SEQ ID NO: 7251
  source 1..535: mol_type = unassigned DNA

SEQ ID NO: 7259 - DNA, 7894 bp, Homo sapiens; identical to SEQ ID NO: 7252
  source 1..7894: mol_type = unassigned DNA

SEQ ID NO: 7260 - DNA, 581 bp, Homo sapiens; identical to SEQ ID NO: 7253
  source 1..581: mol_type = unassigned DNA; mol_type = unassigned DNA

SEQ ID NO: 7261 - DNA, 481 bp, Homo sapiens; identical to SEQ ID NO: 7254
  source 1..481: mol_type = unassigned DNA; mol_type = unassigned DNA

SEQ ID NO: 7262 - DNA, 4318 bp, Homo sapiens
  source 1..4318: mol_type = unassigned DNA; mol_type = unassigned DNA
agccaggggccgcccgggctctcgacgcgccgacggccgggcggacggacggacggacgccgagcgcagtgccccgcgggtcttacaggagaggggaccgtcctgggctggcctggaccatggtgctgctctgggagcctgcaggagcctggcttgctctgggcctggccctggccctgggccccagcgtggccgcagctgcccctcggcaggactgcacgggcgtggagtgcccgccgctggagaactgcattgaggaggcgctggagccgggtgcctgctgtgccacgtgtgtgcagcagggctgcgcctgcgagggctaccagtactatgactgcctacagggtggcttcgtgcgcggccgcgtgcccgccggtcagtcctattttgtggacttcgggagcactgagtgctcctgcccaccaggcggcggcaagatcagctgccagttcatgctgtgcccggagctgccgcccaactgcatcgaggctgtagtggtggctgacagctgcccacagtgcggccaggtgggctgcgtccacgcgggccacaagtacgccgctggccacactgttcacctgccgccctgccgggcctgccactgccctgacgccggtggagagctcatctgctaccagctccccggttgccacgggaacttctcagatgccgaggagggtgaccccgagcgacactacgaagacccctacagctatgaccaggaggtggccgaggtggaagcagcaacagccctggggggtgaggtccaggcgggtgcagtccaggcaggcgcagggggccccccagctgctctgggaggtgggagtcagccactgtccaccatccaggcacccccctggccagctgtcctccccaggcccacagcggctgctgccctgggtcccccagccccagtgcaggccaaagctaggagagtgaccgaggacagtgaggaggaagaagaggaggaggaggagagagaggaaatggctgtcactgagcagctggcagcaggtggccacagggggctggatgggctgcccactacagccccagctggacccagtcttcctatccaggaggagagggcagaagctggggcaagggcagaagctggggcaaggcctgaagagaacctcatcctggatgcccaagccacgtcccgcagcactgggccggagggcgtgacgcatgcaccgagcctgggcaaggctgctctcgtcccaactcaggccgtgcctggctctcccagggacccagtcaagcccagcccccacaacatcctgtccacatcactgcctgatgcagcctggatcccacccacccgagaagtgcccaggaagccgcaagttctgccccattcccacgtggaggaggacacagaccccaactctgtccattctatccccagaagtagccctgaaggctccaccaaggacctgatcgagacttgctgcgcagccggacagcagtgggccattgacaatgacgagtgcctggagatccctgagagtggcactgaggacaacgtctgcaggacagcccagaggcactgctgtgtctcctacttgcaggagaagagctgcatggccggcgtcctgggagccaaggagggtgagacctgtggggctgaggacaacgacagctgcggcatctccctgtacaagcaatgctgtgactgctgtggcctgggcctccgcgtgcgggccgagggccagtcgtgtgagtccaatcctaacctgggctatccctgcaatcatgtcatgctctcctgctgtgagggtgaagagcctctcatagtacctgaggttcgccgacctccagagcccgcagctgcaccacggagagtttcagaggcagagatggcgggccgagaggccctgtcactgggcacagaggccgagctgccgaacagcctgccgggcgatgaccaggatgagtgccttctcctcccgggagagctgtgccagcacctttgcatcaatactgtgggttcttaccactgtgcctgctttcctggcttctcactgcaggacgatggccgcacttgccgcccagagggtcaccctccacagccggaagccccacaggagcctgcactgaagtcagaattttcccaggtggcctctaacaccatcccgctgccactgccgcagcccaatacctgcaaagacaatggaccctgcaagcaggtgtgcagcactgttgggggctcagccatatgctcctgttttcccggctatgccatcatggcggatggcgtgtcctgtgaagaccaagacgagtgcctgatgggtgctcacgattgtagccggcgacagttctgtgtgaacaccctgggatccttctactgtgtcaaccacacagtgctctgtgccgatggctatatcctcaatgcgcacaggaagtgcgtggacatcaacgagtgtgtgacggacctgcacacgtgcagccggggcgagcactgtgtgaacacactgggctccttccactgctacaaggcactcacctgtgagccaggctatgccctcaaggatggcgagtgcgaagacgtggatgagtgtgcgatgggcacgcacacctgccagccgggcttcttgtgccagaacaccaagggctccttctactgccaggccaggcagcgctgcatggatggcttcctgcaggatcctgaaggcaactgtgtggacatcaacgagtgcacgtcactgtccgagccatgtcggccaggcttcagctgcatcaacacggtgggctcctacacatgccagaggaacccgctgatctgcgcgcgcggctaccacgccagcgatgatgggaccaagtgtgtggacgtgaatgagtgtgagacaggtgtgcaccgctgcggtgagggccaagtgtgccacaacctccctggctcctaccgctgtgactgcaaagccggctttcagcgggatgcctttggccggggctgcatcgacgtgaatgagtgctgggcctcgccaggccgcctgtgccagcacacgtgtgagaacacactcggctcctaccgctgttcctgcgcctccgggttcctgctagcagcggacggcaagcgctgtgaagacgtgaatgagtgtgaggcccagcgctgcagccaggagtgtgccaacatctatggctcctaccagtgctactgccgccagggctaccagctggctgaggatgggcacacctgcacagacatcgacgagtgtgctcaaggcgccggcatcctctgcaccttccgctgtctcaacgtgccagggagctaccagtgtgcatgccctgagcagggctacaccatgacggccaacgggaggtcctgcaaggacgtggatgagtgtgcactgggtacccacaactgttccgaggctgagacctgccacaacatccagggtagcttccgctgcctgcgcttcgagtgtcctcccaactatgtccaagtctccaaaacgaagtgcgagcgcaccacgtgccatgacttcctggagtgccagaactcgccagcgcgcatcacgcactaccagctcaacttccagacgggcctcctggtgcctgcgcatatcttccgcattggccccgcgccagccttcacgggggacaccatcgccctgaacatcatcaagggcaatgaggagggctactttggcacgcgcaggctcaatgcctacacgggtgtggtctacctgcagcgggccgtgctggagccccgggactttgccctggacgtggagatgaagctctggaggcagggctccgtcaccaccttcctggccaagatgcacatcttcttcaccacctttgccctgtgaggtgccagcacgggccacctgcgggtgtggcgcagcccagggctcacactgcgtgggagggactgggtcactattgtggtttttactataactttgtaaattaacttaattttgctgacttgactcctgtggcttctggacccctcctctgccccgcaggaggaagttccacggcaggtggtgcgttcccacgcaggcaccaagtggaagcttgcacggtgggccacggccgtggcgggtgccctgtgggtgaggctgggtgatgacctgaggaccagagacacgcgaccatgttggggctcttggactcctctggatgacccgtccccaaagttgacattccatttcatgttccactgtgattaattcttttcttttttaaaaaatcattttaaagttttttgtttaactataaagtagtacatgtacattatataaaaaaaagttcaactagtatgaaagggttataaagtaacagaggaaaacgcctcttggtcccttta

SEQ ID NO: 7263 - DNA, 4127 bp, Homo sapiens
  source 1..4127: mol_type = unassigned DNA; mol_type = unassigned DNA
ggacggacgccgagcgcagtgccccgcgggtcttacaggagaggggaccgtcctgggctggcctggaccatggtgctgctctgggagcctgcaggagcctggcttgctctgggcctggccctggccctgggccccagcgtggccgcagctgcccctcggcaggactgcacgggcgtggagtgcccgccgctggagaactgcattgaggaggcgctggagccgggtgcctgctgtgccacgtgtgtgcagcagggctgcgcctgcgagggctaccagtactatgactgcctacagggtggcttcgtgcgcggccgcgtgcccgccggtcagtcctattttgtggacttcgggagcactgagtgctcctgcccaccaggcggcggcaagatcagctgccagttcatgctgtgcccggagctgccgcccaactgcatcgaggctgtagtggtggctgacagctgcccacagtgcggccaggtgggctgcgtccacgcgggccacaagtacgccgctggccacactgttcacctgccgccctgccgggcctgccactgccctgacgccggtggagagctcatctgctaccagctccccggttgccacgggaacttctcagatgccgaggagggtgaccccgagcgacactacgaagacccctacagctatgaccaggaggtggccgaggtggaagcagcaacagccctggggggtgaggtccaggcgggtgcagtccaggcaggcgcagggggccccccagctgctctgggaggtgggagtcagccactgtccaccatccaggcacccccctggccagctgtcctccccaggcccacagcggctgctgccctgggtcccccagccccagtgcaggccaaagctaggagagtgaccgaggacagtgaggaggaagaagaggaggaggaggagagagaggaaatggctgtcactgagcagctggcagcaggtggccacagggggctggatgggctgcccactacagccccagctggacccagtcttcctatccaggaggagagggcagaagctggggcaagggcagaagctggggcaaggcctgaagagaacctcatcctggatgcccaagccacgtcccgcagcactgggccggagggcgtgacgcatgcaccgagcctgggcaaggctgctctcgtcccaactcaggccgtgcctggctctcccagggacccagtcaagcccagcccccacaacatcctgtccacatcactgcctgatgcagcctggatcccacccacccgagaagtgcccaggaagccgcaagttctgccccattcccacgtggaggaggacacagaccccaactctgtccattctatccccagaagtagccctgaaggctccaccaaggacctgatcgagacttgctgcgcagccggacagcagtgggccattgacaatgacgagtgcctggagatccctgagagtggcactgaggacaacgtctgcaggacagcccagaggcactgctgtgtctcctacttgcaggagaagagctgcatggccggcgtcctgggagccaaggagggtgagacctgtggggctgaggacaacgacagctgcggcatctccctgtacaagcaatgctgtgactgctgtggcctgggcctccgcgtgcgggccgagggccagtcgtgtgagtccaatcctaacctgggctatccctgcaatcatgtcatgctctcctgctgtgagggtgaagagcctctcatagtacctgaggttcgccgacctccagagcccgcagctgcaccacggagagtttcagaggcagagatggcgggccgagaggccctgtcactgggcacagaggccgagctgccgaacagcctgccgggcgatgaccaggatgagtgccttctcctcccgggagagctgtgccagcacctttgcatcaatactgtgggttcttaccactgtgcctgctttcctggcttctcactgcaggacgatggccgcacttgccgcccagagggtcaccctccacagccggaagccccacaggagcctgcactgaagtcagaattttcccaggtggcctctaacaccatcccgctgccactgccgcagcccaatacctgcaaagacaatggaccctgcaagcaggtgtgcagcactgttgggggctcagccatatgctcctgttttcccggctatgccatcatggcggatggcgtgtcctgtgaagacatcaacgagtgtgtgacggacctgcacacgtgcagccggggcgagcactgtgtgaacacactgggctccttccactgctacaaggcactcacctgtgagccaggctatgccctcaaggatggcgagtgcgaagacgtggatgagtgtgcgatgggcacgcacacctgccagccgggcttcttgtgccagaacaccaagggctccttctactgccaggccaggcagcgctgcatggatggcttcctgcaggatcctgaaggcaactgtgtggacatcaacgagtgcacgtcactgtccgagccatgtcggccaggcttcagctgcatcaacacggtgggctcctacacatgccagaggaacccgctgatctgcgcgcgcggctaccacgccagcgatgatgggaccaagtgtgtggacgtgaatgagtgtgagacaggtgtgcaccgctgcggtgagggccaagtgtgccacaacctccctggctcctaccgctgtgactgcaaagccggctttcagcgggatgcctttggccggggctgcatcgacgtgaatgagtgctgggcctcgccaggccgcctgtgccagcacacgtgtgagaacacactcggctcctaccgctgttcctgcgcctccgggttcctgctagcagcggacggcaagcgctgtgaagacgtgaatgagtgtgaggcccagcgctgcagccaggagtgtgccaacatctatggctcctaccagtgctactgccgccagggctaccagctggctgaggatgggcacacctgcacagacatcgacgagtgtgctcaaggcgccggcatcctctgcaccttccgctgtctcaacgtgccagggagctaccagtgtgcatgccctgagcagggctacaccatgacggccaacgggaggtcctgcaaggacgtggatgagtgtgcactgggtacccacaactgttccgaggctgagacctgccacaacatccagggtagcttccgctgcctgcgcttcgagtgtcctcccaactatgtccaagtctccaaaacgaagtgcgagcgcaccacgtgccatgacttcctggagtgccagaactcgccagcgcgcatcacgcactaccagctcaacttccagacgggcctcctggtgcctgcgcatatcttccgcattggccccgcgccagccttcacgggggacaccatcgccctgaacatcatcaagggcaatgaggagggctactttggcacgcgcaggctcaatgcctacacgggtgtggtctacctgcagcgggccgtgctggagccccgggactttgccctggacgtggagatgaagctctggaggcagggctccgtcaccaccttcctggccaagatgcacatcttcttcaccacctttgccctgtgaggtgccagcacgggccacctgcgggtgtggcgcagcccagggctcacactgcgtgggagggactgggtcactattgtggtttttactataactttgtaaattaacttaattttgctgacttgactcctgtggcttctggacccctcctctgccccgcaggaggaagttccacggcaggtggtgcgttcccacgcaggcaccaagtggaagcttgcacggtgggccacggccgtggcgggtgccctgtgggtgaggctgggtgatgacctgaggaccagagacacgcgaccatgttggggctcttggactcctctggatgacccgtccccaaagttgacattccatttcatgttccactgtgattaattcttttcttttttaaaaaatcattttaaagttttttgtttaactataaagtagtacatgtacattatataaaaaaaagttcaactagtatgaaagggttataaagtaacagaggaaaacgcctcttggtcccttta

SEQ ID NO: 7264 - DNA, 584 bp, Homo sapiens
  source 1..584: mol_type = unassigned DNA; mol_type = unassigned DNA
acacatacacgccccattgggagcagctgtggagatgtgaggacagtgaggtctgctattctcccagggtcttacaggagaggggaccgtcctgggctggcctggaccatggtgctgctctgggagcctgcaggagcctggcttgctctgggcctggccctggccctgggccccagcgtggccgcagctgcccctcggcaggactgcacgggcgtggagtgcccgccgctggagaactgcattgaggaggcgctggagccgggtgcctgctgtgccacgtgtgtgcagcagggctgcgcctgcgagggctaccagtactatgactgcctacagggtggcttcgtgcgcggccgcgtgcccgccggtcagtcctattttgtggacttcgggagcactgagtgctcctgcccaccaggcggcggcaagatcagctgccagttcatgctgtgcccggagctgccgcccaactgcatcgaggctgtagtggtggctgacagctgcccacagtgcggccaggtgggctgcgtccacgcgggccacaagtacgccgctggccacactgttcacctgccgccctgccgggc

SEQ ID NO: 7265 - DNA, 4193 bp, Homo sapiens
  source 1..4193: mol_type = unassigned DNA; mol_type = unassigned DNA
gattcccttcatttatttcatcatggggctcatgcctgcctggcgttcagttctctacagatttgctcttgggtttattatctgcccctccacccctgagggtgtcagtgctgtgaggacgctgggaacctgtcttgctggctgataaacccctggttcctagaggggctgggtgcagaggaggcgttcctttagaaatggggcaggcttggggaccactgctgtggtaacgagtcctgctgtccctctgtcactgccctatggggctgcgctttaggctgggagtcggagaaggagctcttgcctgtgactttggggagcacgctgtctataagagtcagggtcttacaggagaggggaccgtcctgggctggcctggaccatggtgctgctctgggagcctgcaggagcctggcttgctctgggcctggccctggccctgggccccagcgtggccgcagctgcccctcggcaggactgcacgggcgtggagtgcccgccgctggagaactgcattgaggaggcgctggagccgggtgcctgctgtgccacgtgtgtgcagcagggctgcgcctgcgagggctaccagtactatgactgcctacagggtggcttcgtgcgcggccgcgtgcccgccggtcagtcctattttgtggacttcgggagcactgagtgctcctgcccaccaggcggcggcaagatcagctgccagttcatgctgtgcccggagctgccgcccaactgcatcgaggctgtagtggtggctgacagctgcccacagtgcggccaggtgggctgcgtccacgcgggccacaagtacgccgctggccacactgttcacctgccgccctgccgggcctgccactgccctgacgccggtggagagctcatctgctaccagctccccggttgccacgggaacttctcagatgccgaggagggtgaccccgagcgacactacgaagacccctacagctatgaccaggaggtggccgaggtggaagcagcaacagccctggggggtgaggtccaggcgggtgcagtccaggcaggcgcagggggccccccagctgctctgggaggtgggagtcagccactgtccaccatccaggcacccccctggccagctgtcctccccaggcccacagcggctgctgccctgggtcccccagccccagtgcaggccaaagctaggagagtgaccgaggacagtgaggaggaagaagaggaggaggaggagagagaggaaatggctgtcactgagcagctggcagcaggtggccacagggggctggatgggctgcccactacagccccagctggacccagtcttcctatccaggaggagagggcagaagctggggcaagggcagaagctggggcaaggcctgaagagaacctcatcctggatgcccaagccacgtcccgcagcactgggccggagggcgtgacgcatgcaccgagcctgggcaaggctgctctcgtcccaactcaggccgtgcctggctctcccagggacccagtcaagcccagcccccacaacatcctgtccacatcactgcctgatgcagcctggatcccacccacccgagaagtgcccaggaagccgcaagttctgccccattcccacgtggaggaggacacagaccccaactctgtccattctatccccagaagtagccctgaaggctccaccaaggacctgatcgagacttgctgcgcagccggacagcagtgggccattgacaatgacgagtgcctggagatccctgagagtggcactgaggacaacgtctgcaggacagcccagaggcactgctgtgtctcctacttgcaggagaagagctgcatggccggcgtcctgggagccaaggagggtgagacctgtggggctgaggacaacgacagctgcggcatctccctgtacaagcaatgctgtgactgctgtggcctgggcctccgcgtgcgggccgagggccagtcgtgtgagtccaatcctaacctgggctatccctgcaatcatgtcatgctctcctgctgtgagggtgaagagcctctcatagtacctgaggttcgccgacctccagagcccgcagctgcaccacggagagtttcagaggcagagatggcgggccgagaggccctgtcactgggcacagaggccgagctgccgaacagcctgccgggcgatgaccaggatgagtgccttctcctcccgggagagctgtgccagcacctttgcatcaatactgtgggttcttaccactgtgcctgctttcctggcttctcactgcaggacgatggccgcacttgccgcccagagggtcaccctccacagccggaagccccacaggagcctgcactgaagtcagaattttcccaggtggcctctaacaccatcccgctgccactgccgcagcccaatacctgcaaagacaatggaccctgcaagcaggtgtgcagcactgttgggggctcagccatatgctcctgttttcccggctatgccatcatggcggatggcgtgtcctgtgaagaccaagacgagtgcctgatgggtgctcacgattgtagccggcgacagttctgtgtgaacaccctgggatccttctactgtgtcaaccacacagtgctctgtgccgatggctatatcctcaatgcgcacaggaagtgcgtggacatcaacgagtgtgtgacggacctgcacacgtgcagccggggcgagcactgtgtgaacacactgggctccttccactgctacaaggcactcacctgtgagccaggctatgccctcaaggatggcgagtgcgaagacgtggatgagtgtgcgatgggcacgcacacctgccagccgggcttcttgtgccagaacaccaagggctccttctactgccaggccaggcagcgctgcatggatggcttcctgcaggatcctgaaggcaactgtgtggacatcaacgagtgcacgtcactgtccgagccatgtcggccaggcttcagctgcatcaacacggtgggctcctacacatgccagaggaacccgctgatctgcgcgcgcggctaccacgccagcgatgatgggaccaagtgtgtggacgtgaatgagtgtgagacaggtgtgcaccgctgcggtgagggccaagtgtgccacaacctccctggctcctaccgctgtgactgcaaagccggctttcagcgggatgcctttggccggggctgcatcgacgtgaatgagtgctgggcctcgccaggccgcctgtgccagcacacgtgtgagaacacactcggctcctaccgctgttcctgcgcctccgggttcctgctagcagcggacggcaagcgctgtgaagacgtgaatgagtgtgaggcccagcgctgcagccaggagtgtgccaacatctatggctcctaccagtgctactgccgccagggctaccagctggctgaggatgggcacacctgcacagacatcgacgagtgtgctcaaggcgccggcatcctctgcaccttccgctgtctcaacgtgccagggagctaccagtgtgcatgccctgagcagggctacaccatgacggccaacgggaggtcctgcaaggacgtggatgagtgtgcactgggtacccacaactgttccgaggctgagacctgccacaacatccagggtagcttccgctgcctgcgcttcgagtgtcctcccaactatgtccaagtctccaaaacgaagtgcgagcgcaccacgtgccatgacttcctggagtgccagaactcgccagcgcgcatcacgcactaccagctcaacttccagacgggcctcctggtgcctgcgcatatcttccgcattggccccgcgccagccttcacgggggacaccatcgccctgaacatcatcaagggcaatgaggagggctactttggcacgcgcaggctcaatgcctacacgggtgtggtctacctgcagcgggccgtgctggagccccgggactttgccctggacgtggagatgaagctctggaggcagggctccgtcaccaccttcctggccaagatgcacatcttcttcaccacctttgccctgtgaggtgccagcacgggccacctgcgggtgtggcgcagcccagggctcacactgcgtgggagggactgggtcactattgtggtttttactataactttgtaaattaacttaattttgc

SEQ ID NO: 7266 - DNA, 567 bp, Homo sapiens
  source 1..567: mol_type = unassigned DNA; mol_type = unassigned DNA
ttcatctccatttatcagtccctcccctgagcctagctccaggctggggccagagattgggcagtgataactgtctctccctgcagcaatgctgtgactgctgtggcctgggcctccgcgtgcgggccgagggccagtcgtgtgagtccaatcctaacctgggctatccctgcaatcatgtcatgctctcctgctgtgagggtgaagagcctctcatagtacctgaggttcgccgacctccagagcccgcagctgcaccacggagagtttcagaggcagagatggcgggccgagaggccctgtcactgggcacagaggccgagctgccgaacagcctgccgggcgatgaccaggatgagtgccttctcctcccgggagagctgtgccagcacctttgcatcaatactgtgggttcttaccactgtgcctgctttcctggcttctcactgcaggacgatggccgcacttgccgcccagagggtcaccctccacagccggaagccccacaggagcctgcactgaagtcagaattttcccaggtggcctctaacaccatcccgctgccac

SEQ ID NO: 7267 - DNA, 537 bp, Homo sapiens
  source 1..537: mol_type = unassigned DNA; mol_type = unassigned DNA
acatcgacgagtgtgctcaaggcgccggcatcctctgcaccttccgctgtctcaacgtgccagggagctaccagtgtgcatgccctgagcagggctacaccatgacggccaacgggaggtcctgcaaggacgtggatgagtgtgcactgggtacccacaactgttccgaggctgagacctgccacaacatccagggtagcttccgctgcctgcgcttcgagtgtcctcccaactatgtccaagtctccaaaacgtggtgcgttcccacgcaggcaccaagtggaagcttgcacggtgggccacggccgtggcgggtgccctgtgggtgaggctgggtgatgacctgaggaccagagacacgcgaccatgttggggctcttggactcctctggatgacccgtccccaaagttgacattccatttcatgttccactgtgattaattcttttcttttttaaaaaatcattttaaagttttttgtttaactataaagtagtacatgtacattatataaaaaaaagttcaactagtatgaaa

SEQ ID NO: 7268 - DNA, 427 bp, Homo sapiens
  source 1..427: mol_type = unassigned DNA; mol_type = unassigned DNA
acgtggatgagtgtgcactgggtacccacaactgttccgaggctgagacctgccacaacatccagggtagcttccgctgcctgcgcttcgagtgtcctcccaactatgtccaagtctccaaaacgaagtgcgagcgcaccaagtggaagcttgcacggtgggccacggccgtggcgggtgccctgtgggtgaggctgggtgatgacctgaggaccagagacacgcgaccatgttggggctcttggactcctctggatgacccgtccccaaagttgacattccatttcatgttccactgtgattaattcttttcttttttaaaaaatcattttaaagttttttgtttaactataaagtagtacatgtacattatataaaaaaaagttcaactagtatgaaagggttataaagtaacagaggaaaacgc

SEQ ID NO: 7269 - DNA, 11756 bp, Homo sapiens
  source 1..11756: mol_type = unassigned DNA; mol_type = unassigned DNA
gtggtgatgagggcgacgaaggagggggtgtcattttctttttctttctttttttaaaaaaagtatttctctcgcgagaaaccgctgcgcggacgatacttgaagaggtggggaaaggagggggctgcgggagccgcggcagagactgtgggtgccacaagcggacaggagccacagctgggacagctgcgagcggagccgagcagtggctgtagcggccacgactgggagcagccgccgccgcctcctcgggagtcggagccgccgcttctccactggcaggggccgcctgaagtgggagcagcgcctggagaaggcgggaggagcccggcccgggggacgggcggcgggatagcgggaccccggcggcgcggtgcgcttcagggcgcagcggcggccgcagaccgagccccgggcgcggcaagaggcggcgggagccggtggcggctcggcatcatgcgtcgagggcgtctgctggagatcgccctgggatttaccgtgcttttagcgtcctacacgagccatggggcggacgccaatttggaggctgggaacgtgaaggaaaccagagccagtcgggccaagagaagaggcggtggaggacacgacgcgcttaaaggacccaatgtctgtggatcacgttataatgcttactgttgccctggatggaaaaccttacctggcggaaatcagtgtattgtccccatttgccggcattcctgtggggatggattttgttcgaggccaaatatgtgcacttgcccatctggtcagatagctccttcctgtggctccagatccatacaacactgcaatattcgctgtatgaatggaggtagctgcagtgacgatcactgtctatgccagaaaggatacatagggactcactgtggacaacctgtttgtgaaagtggctgtctcaatggaggaaggtgtgtggccccaaatcgatgtgcatgcacttacggatttactggaccccagtgtgaaagagattacaggacaggcccatgttttactgtgatcagcaaccagatgtgccagggacaactcagcgggattgtctgcacaaaaacgctctgctgtgccacagtcggccgagcctggggccacccctgtgagatgtgtcctgcccagcctcacccctgccgccgtggcttcattccaaatatccgcacgggagcttgtcaagatgtggatgaatgccaggccatccccgggctctgtcagggaggaaattgcattaatactgttgggtcttttgagtgcaaatgccctgctggacacaaacttaatgaagtgtcacaaaaatgtgaagatattgatgaatgcagcaccattcctggaatctgtgaagggggtgaatgtacaaacacagtcagcagttacttttgcaaatgtccccctggtttttacacctctccagatggtaccagatgcatagatgttcgcccaggatactgttacacagctctgacaaacgggcgctgctctaaccagctgccacagtccataaccaaaatgcagtgctgctgtgatgccggccgatgctggtctccaggggtcactgtcgcccctgagatgtgtcccatcagagcaaccgaggatttcaacaagctgtgctctgttcctatggtaattcctgggagaccagaatatcctcccccaccccttggccccattcctccagttctccctgttcctcctggctttcctcctggacctcaaattccggtccctcgaccaccagtggaatatctgtatccatctcgggagccaccaagggtgctgccagtaaacgttactgattactgccagttggtccgctatctctgtcaaaatggacgctgcattccaactcctgggagttaccggtgtgagtgcaacaaagggttccagctggacctccgtggggagtgtattgatgttgatgaatgtgagaaaaacccctgtgctggtggtgagtgtattaacaaccagggttcgtacacctgtcagtgccgagctggatatcagagcacactcacgcggacagaatgccgagacattgatgagtgtttacagaatggccggatctgcaataatggacgctgcatcaacacagatggcagttttcattgcgtgtgtaatgcgggctttcatgttacacgagatgggaagaactgtgaagatatggatgaatgcagcataaggaacatgtgccttaatggaatgtgtatcaatgaagatggcagttttaaatgtatttgcaaacctggattccagctggcatcagatggacgttattgcaaagacattaacgagtgtgaaacccctgggatctgcatgaatgggcgttgcgtcaacactgatggctcctacagatgtgaatgcttccctggactggctgtgggtctggatggccgtgtgtgtgttgacacacacatgcggagcacatgctatggtggatacaagagaggccagtgtatcaaacctttgtttggtgctgtcactaaatctgaatgctgttgcgccagcactgagtatgcatttggggaaccttgccagccgtgtcctgcacagaattcagcggaatatcaggcactctgcagcagtgggccaggaatgacgtcagcaggcagtgatataaatgaatgtgcactagatcctgatatttgcccaaatggaatctgtgaaaaccttcgtgggacctataaatgtatatgcaattcaggatatgaagtggattcaactgggaaaaactgcgttgatattaatgaatgtgtactgaacagtctcctttgtgacaatggacaatgtagaaatactcctggaagttttgtctgtacctgccccaagggatttatctacaaacctgatctaaaaacatgtgaagacattgatgaatgcgaatcaagtccttgcattaatggagtctgcaagaacagcccaggctcttttatttgtgaatgttcttctgaaagtactttggatccaacaaaaaccatctgcatagaaaccatcaagggcacttgctggcagactgtcattgatgggcgatgtgagatcaacatcaatggagccaccttaaagtcccagtgctgctcctccctcggtgctgcgtggggaagcccgtgcaccctatgccaagttgatcccatatgtggtaaagggtactcaagaattaaaggaacacaatgtgaagatatagatgaatgtgaagtgttcccaggagtgtgtaaaaatggcctgtgtgttaacactagggggtcattcaagtgtcagtgtcccagtggaatgactttggatgccacaggaaggatctgtcttgatatccgcctggaaacctgcttcctgaggtacgaggacgaggagtgcaccctgcctattgctggccgccaccgcatggacgcctgctgctgctccgtcggggcagcctggggtactgaggaatgcgaggagtgtcccatgagaaatactcctgagtacgaggagctgtgtccgagaggacccggatttgccacaaaagaaattacaaatggaaagcctttcttcaaagatatcaatgagtgcaagatgatacccagcctctgcacccacggcaagtgcagaaacaccattggcagctttaagtgcaggtgtgacagcggctttgctcttgattctgaagaaaggaactgcacagacattgacgaatgccgcatatctcctgacctctgtggcagaggccagtgtgtgaacacccctggggactttgaatgcaagtgtgacgaaggctatgaaagtggattcatgatgatgaagaactgcatggatattgatgagtgtcagagagatcctctcctatgccgaggtggtgtttgccataacacagagggaagttaccgctgtgaatgcccgcctggccatcagctgtcccccaacatctccgcgtgtatcgacatcaatgaatgtgagctgagtgcacacctgtgccccaatggccgttgcgtgaacctcatagggaagtatcagtgtgcctgcaaccctggctaccattcaactcccgataggctattttgtgttgacattgatgaatgcagcataatgaatggtggttgtgaaaccttctgcacaaactctgaaggcagctatgaatgtagctgtcagccgggatttgcactaatgcctgaccagagatcatgcaccgacatcgatgagtgtgaagataatcccaatatctgtgatggtggtcagtgcacaaatatccctggagagtacaggtgcttgtgttatgatggattcatggcatctgaagacatgaagacttgtgtagatgtcaatgagtgtgacctgaatccaaatatctgcctaagtgggacctgtgaaaacacgaaaggctcatttatctgccactgtgatatgggctactccggcaaaaaaggaaaaactggctgtacagacatcaatgaatgtgaaattggagcacacaactgtggcaaacatgctgtatgtaccaatacagcaggaagcttcaaatgtagctgcagtcccgggtggattggagatggcattaagtgcactgatctggacgaatgttccaatggaacccatatgtgcagccagcatgcagactgcaagaataccatgggatcttaccgctgtctgtgcaaggaaggatacacaggtgatggcttcacttgtacagaccttgatgagtgctctgagaacctgaatctctgtggcaatggccagtgcctcaatgcaccaggaggataccgctgtgaatgcgacatgggcttcgtgcccagtgctgacgggaaagcctgtgaagatattgatgagtgctcccttccgaacatctgtgtctttggaacttgccacaacctccctggcctgttccgctgtgagtgtgagataggctacgaactggacagaagcggcgggaactgcacagatgtgaatgaatgcctggatccaaccacgtgcatcagtgggaactgtgtcaacactccaggcagctatatctgtgactgcccacctgattttgaactgaacccaactcgagttggctgtgttgatacccgctctggaaattgctatttggatattcgacctcgaggagacaatggagatacagcctgcagcaatgaaattggagttggtgtttccaaagcttcctgctgctgttctctgggtaaagcctggggtactccttgtgagatgtgtcctgctgtgaacacatccgagtacaaaattctttgtcctggaggggaaggtttccgaccaaatcctatcaccgttatattggaagatattgatgagtgccaggagctaccagggctgtgccaaggaggaaaatgtatcaacacctttgggagtttccagtgccgctgtccaaccggctactacctgaatgaagatacacgagtgtgtgatgatgtgaatgaatgtgagactcctggaatctgtggtccagggacatgttacaacaccgttggcaactacacctgtatctgtcctccagactacatgcaagtgaatgggggaaataattgcatggatatgagaagaagtttgtgctacagaaactactatgctgacaaccagacctgtgatggagaattgttattcaacatgaccaagaagatgtgctgctgttcctacaacattggccgggcgtggaacaagccctgtgaacagtgtcccatcccaagtacagatgagtttgctacactctgtggaagtcaaaggccaggctttgtcatcgacatttataccggtttacccgttgatattgatgagtgccgggagatcccaggggtctgtgaaaatggagtgtgtatcaacatggttggcagcttccgatgtgaatgtccagtgggattcttctataatgacaagttgttggtttgtgaagatattgacgagtgtcagaacggcccagtgtgccagcgcaacgccgaatgcatcaacactgcaggcagctaccgctgtgactgtaagcccggctaccgcttcacctccacaggacagtgcaatgatcgtaatgaatgtcaagaaatccccaatatatgcagtcatgggcagtgcattgacacagttggaagcttttattgcctttgccacactggttttaaaacaaatgatgaccaaaccatgtgcttggacataaatgaatgtgaaagagatgcctgtgggaatggaacttgccggaacacaattggttccttcaactgccgctgcaatcatggtttcatcctttctcacaacaatgactgtatagatgttgatgaatgtgcaagtggaaatgggaatctttgcagaaatggccaatgcattaatacagtggggtctttccagtgccagtgcaatgaaggctatgaggtggctccagatgggaggacctgtgtggatatcaatgaatgtcttctagaacccagaaaatgtgcaccaggtacctgtcaaaacttggatgggtcctacagatgcatttgcccacctggatacagtcttcaaaatgagaagtgtgaagatattgatgagtgtgtcgaagagccagaaatttgtgccctgggcacatgcagtaacactgaaggcagcttcaaatgtctgtgtccagaagggttttccttgtcctccagtggaagaaggtgccaagatttgcgaatgagctactgttatgcgaagtttgaaggaggaaagtgttcatcacccaaatccagaaatcactccaagcaggaatgctgctgtgccttgaagggagaaggctggggagacccctgcgagctctgccccacggaacctgatgaggccttccgccagatatgtccttatggaagtgggatcatcgtgggacctgatgattcagcagttgatatggacgaatgcaaagaacccgatgtctgtaaacatggacagtgcatcaatacagatggttcctatcgctgcgagtgtccctttggttatattctagcagggaatgaatgtgtagatactgatgaatgttctgttggcaatccttgtggaaatggaacctgcaagaatgtgattggaggttttgaatgcacctgcgaggagggatttgagcccggtccaatgatgacatgtgaagatataaatgaatgtgcccagaatcctctgctctgtgccttccgatgtgtgaacacttatgggtcatatgaatgcaaatgtcccgtgggatatgtgctcagagaagaccgtaggatgtgcaaagatgaggatgagtgtgaagagggaaaacatgactgtactgaaaaacaaatggaatgcaagaacctcattggcacatatatgtgcatctgtggacccgggtatcagcggagacctgatggagaaggctgtgtagatgagaatgaatgtcagacgaagccagggatctgtgagaatgggcgctgcctcaacacccgtgggagctacacctgtgagtgtaatgatgggtttaccgccagccccaaccaggacgagtgccttgacaatcgggaagggtactgcttcacagaggtgctacaaaacatgtgtcagatcggctccagcaacaggaaccccgtcaccaaatcggaatgctgctgtgacggagggagaggctggggtccccactgtgagatctgccctttccaggggactgtggctttcaagaaactctgtccccatggccgaggattcatgaccaatggagcagatatcgatgaatgcaaggttattcacgatgtttgccgaaatggggaatgtgtcaatgacagaggatcatatcattgcatttgtaaaactgggtacactccagatataactgggacttcctgtgtagatctgaacgagtgcaaccaggctcccaaaccctgcaattttatctgcaaaaacacagaagggagttaccagtgttcatgcccgaaaggctacattctgcaagaggatggaaggagctgcaaagatcttgatgagtgtgcaaccaagcaacacaactgccagttcctatgtgttaacaccattggcggcttcacatgcaaatgtcctcccggatttacccaacaccatacgtcctgcattgataacaatgaatgcacctctgacatcaatctgtgcgggtctaagggcatttgccagaacactcctggaagcttcacctgtgaatgccagcggggattctcacttgatcagaccggctccagctgtgaagacgtggacgagtgtgagggtaaccaccgctgccagcatggctgccagaacatcattgggggctacaggtgcagctgcccccagggctacctccagcactaccagtggaaccagtgtgttgatgaaaacgaatgcctcagcgctcacatctgcggaggagcctcctgtcacaacaccctggggagctacaagtgcatgtgtcccgccggcttccagtatgaacagttcagtggaggatgccaagacatcaatgaatgtggctctgcgcaggccccctgcagctatggctgttccaataccgagggcggttacctgtgtggctgtccacctggttacttccgcataggccaagggcactgtgtttctggaatgggcatgggccgaggaaacccagagccacctgtcagtggtgaaatggatgacaattcactctccccagaggcttgttacgagtgtaagatcaatggctaccccaaacggggcaggaaacggagaagcacaaacgaaactgatgcctccaatatcgaggatcagtctgagacagaagccaatgtgagtcttgcaagttgggatgttgagaagacagccatctttgctttcaatatttcccacgtcagtaacaaggttcgaatcctagaactccttccagctcttacaactctgacgaatcacaacagatacttgatcgaatctggaaatgaagatggcttctttaaaatcaaccaaaaggaagggatcagctacctccacttcacaaagaagaagccagtggctggaacctattcattacaaatcagtagtactccactttataaaaagaaagaacttaaccaactagaagacaaatatgacaaagactacctcagtggtgaactgggtgataatctgaagatgaaaatccaggttttgcttcattaattcaccatccagagaccaaataattaaaagaaaaacaaatatagataggtagaactatattttcccccaatcagaatcatcatatcataggtacaatctttcaccaagtaaatttgtataaataagcactattctttgtattaccaaagcaaggtacaggtgactaccctagttcaaaacaaccactttctcaggcttctcatgtgtgtagctaagctaccttgtcatatgtgttgattcttgaaaactgggacgtgtatttccattgggggttggccatttatgctgacatgccatccttccagcaaacgtacgggaatgtgctttcaattgatggactactctattttttgcaaatttgtaaactttgcttctccaaatacaagtactaggttgtccatttatggtacctatttggtgctagtaaattttcaaactagatttataaatgcactgtaatatgtacacaacttagaaaccaaattacaagtattcagttccaatacttcattaatttcaatcaaccaaagttagttcagtagcttatctcagttatgagtataatacattacatgtaaattaagtgtgtgtatactgtaatcgtgctattttttatcattgaaacatttataaactagaataataatgcccttaatgtgagggtttgtaatggtgcttattaagaccaaagacttgttaaatgtatacaccaagtggtaatgaaatttcggtgactggcccacacgtgcatagaggtctgggaggaccaggaaacagcctcagtggccagaggatcaccagtgcatccttcatcacagcatgtgcaatatgccaagattaccctcggtcattcctgtcaacaaggggtcaatgtcataaatgtcacaataaaacaatctcttcttttttttagtttaccccttggctttgtgttcttgcatggatttggggttggaggggccattccggaggctaaataaagtctcctggatttaaattatcctgggtctcttacttatggcttatgaaagtaccaaatgtataaccactagaagaaaatttaacatatgagtcgatcccttgttttatccattgaaagtagcagagtctggtgtcattaacctgacttgcttgtgagaaatttagattgtagagtcatttctgaaacatgacctaattcatcttgtgacttttaaatagtcttaaataccaagttcagtcattgtcttagagcacatgaatttcattataatagatttatcatgcccccctctcaaatatacacagttttggcaagccttaggtgttctgttccatttttttttcccctaaacatctttcgttagtcaatgctcatctaattacaaagggataatcccagactgtatccaattgctgtaacttttggtttcttaatgtcataatttttaaagtctgttttattttaagtgcaatattgagtatttagctgttaggctcaatccgtcgatatgaaataattttttaaatccctaagggcaggaaagcatttcgtggtagtgaaaataagaggaaataagatggcatgaaggtggtgggcggagaaactaggtaggacacaggaaagtgctctcaaaaatctttgaagagctcagctgaaaaaaatggagtagatttggctcatactattccggaaggcaaaaccagggtcagctgatgtcagccccagtttaatacacacggtcccaattatagagctactcactgaaagaatgggtttccttgcattgtggtgagctccctgtcacaagatagaagagtttcagtctaggcttaatggcaaccattggacaaagatgctttcttccacctaacaggccattaacatcttaaaggtatttttgtatctctaattttgtttataataggtgctcaacagaatgagctgaatggctgttacaaagggggtttgtaccttgggtaagagattaaaatataactcaaaatttccttctaacgctgcacctatggaaccatgtgatagaggtgtattaaaattgttatcgaagaatatatagcatatggtaaacaacagtttgcatatggaaaatgtctttgataatttaaccagaactgcattatattcaataacggattttctttataacaaacaacaggggaaaatggagttggcacacagtggatcactttgatatttttaatagtccaagtctggattttatttattcctgagccaacaattttgaacagcatattttccatgtttctgactgtaacaaaacattttcctcattgttccattgtaaatattcctcttgttggaactctttttaatcctgagatttaaacctgtacctttcaattgtctgtgacctttcaatttcactttcaatagttgaagaacttggctttgtaaatctctcagaagcttgaaaatatcttgtctctaccccctcagcccatttcatttgccaataattattttgtaagtagggttgaaatgaactcagctggccttgtgaaatgtttaaacttgcacaaacaactacatttttgttcaacaaatagcagtttactcagccaaaatcactttggatattgccattacaaatactgttaaacttcagaaatcatgtctgtaaattagatgagccaaaataaaggacaattgggttgatgctgca

SEQ ID NO: 7270 - DNA, 4901 bp, Homo sapiens
  source 1..4901: mol_type = unassigned DNA; mol_type = unassigned DNA
ctctgggtaaagcctggggtactccttgtgagatgtgtcctgctgtgaacacatccgagtacaaaattctttgtcctggaggggaaggtttccgaccaaatcctatcaccgttatattggaagatattgatgagtgccaggagctaccagggctgtgccaaggaggaaaatgtatcaacacctttgggagtttccagtgccgctgtccaaccggctactacctgaatgaagatacacgagtgtgtgatgatgtgaatgaatgtgagactcctggaatctgtggtccagggacatgttacaacaccgttggcaactacacctgtatctgtcctccagactacatgcaagtgaatgggggaaataattgcatggatatgagaagaagtttgtgctacagaaactactatgctgacaaccagacctgtgatggagaattgttattcaacatgaccaagaagatgtgctgctgttcctacaacattggccgggcgtggaacaagccctgtgaacagtgtcccatcccaagtacagatgagtttgctacactctgtggaagtcaaaggccaggctttgtcatcgacatttataccggtttacccgttgatattgatgagtgccgggagatcccaggggtctgtgaaaatggagtgtgtatcaacatggttggcagcttccgatgtgaatgtccagtgggattcttctataatgacaagttgttggtttgtgaagatattgacgagtgtcagaacggcccagtgtgccagcgcaacgccgaatgcatcaacactgcaggcagctaccgctgtgactgtaagcccggctaccgcttcacctccacaggacagtgcaatgatcgtaatgaatgtcaagaaatccccaatatatgcagtcatgggcagtgcattgacacagttggaagcttttattgcctttgccacactggttttaaaacaaatgatgaccaaaccatgtgcttggacataaatgaatgtgaaagagatgcctgtgggaatggaacttgccggaacacaattggttccttcaactgccgctgcaatcatggtttcatcctttctcacaacaatgactgtatagatgttgatgaatgtgcaagtggaaatgggaatctttgcagaaatggccaatgcattaatacagtggggtctttccagtgccagtgcaatgaaggctatgaggtggctccagatgggaggacctgtgtggatatcaatgaatgtcttctagaacccagaaaatgtgcaccaggtacctgtcaaaacttggatgggtcctacagatgcatttgcccacctggatacagtcttcaaaatgagaagtgtgaagatattgatgagtgtgtcgaagagccagaaatttgtgccctgggcacatgcagtaacactgaaggcagcttcaaatgtctgtgtccagaagggttttccttgtcctccagtggaagaaggtgccaagatttgcgaatgagctactgttatgcgaagtttgaaggaggaaagtgttcatcacccaaatccagaaatcactccaagcaggaatgctgctgtgccttgaagggagaaggctggggagacccctgcgagctctgccccacggaacctgatgaggccttccgccagatatgtccttatggaagtgggatcatcgtgggacctgatgattcagcagttgatatggacgaatgcaaagaacccgatgtctgtaaacatggacagtgcatcaatacagatggttcctatcgctgcgagtgtccctttggttatattctagcagggaatgaatgtgtagatactgatgaatgttctgttggcaatccttgtggaaatggaacctgcaagaatgtgattggaggttttgaatgcacctgcgaggagggatttgagcccggtccaatgatgacatgtgaagatataaatgaatgtgcccagaatcctctgctctgtgccttccgatgtgtgaacacttatgggtcatatgaatgcaaatgtcccgtgggatatgtgctcagagaagaccgtaggatgtgcaaagatgaggatgagtgtgaagagggaaaacatgactgtactgaaaaacaaatggaatgcaagaacctcattggcacatatatgtgcatctgtggacccgggtatcagcggagacctgatggagaaggctgtgtagatgagaatgaatgtcagacgaagccagggatctgtgagaatgggcgctgcctcaacacccgtgggagctacacctgtgagtgtaatgatgggtttaccgccagccccaaccaggacgagtgccttgacgtcatcctttctcttttactgctgtctccagctttcccctcttgcttcttctcacccaggacaatcgggaagggtactgcttcacagaggtgctacaaaacatgtgtcagatcggctccagcaacaggaaccccgtcaccaaatcggaatgctgctgtgacggagggagaggctggggtccccactgtgagatctgccctttccaggggactgtggctttcaagaaactctgtccccatggccgaggattcatgaccaatggagcagatatcgatgaatgcaaggttattcacgatgtttgccgaaatggggaatgtgtcaatgacagaggatcatatcattgcatttgtaaaactgggtacactccagatataactgggacttcctgtgtagatctgaacgagtgcaaccaggctcccaaaccctgcaattttatctgcaaaaacacagaagggagttaccagtgttcatgcccgaaaggctacattctgcaagaggatggaaggagctgcaaagatcttgatgagtgtgcaaccaagcaacacaactgccagttcctatgtgttaacaccattggcggcttcacatgcaaatgtcctcccggatttacccaacaccatacgtcctgcattgataacaatgaatgcacctctgacatcaatctgtgcgggtctaagggcatttgccagaacactcctggaagcttcacctgtgaatgccagcggggattctcacttgatcagaccggctccagctgtgaagacgtggacgagtgtgagggtaaccaccgctgccagcatggctgccagaacatcattgggggctacaggtgcagctgcccccagggctacctccagcactaccagtggaaccagtgtgttgatgaaaacgaatgcctcagcgctcacatctgcggaggagcctcctgtcacaacaccctggggagctacaagtgcatgtgtcccgccggcttccagtatgaacagttcagtggaggatgccaagacatcaatgaatgtggctctgcgcaggccccctgcagctatggctgttccaataccgagggcggttacctgtgtggctgtccacctggttacttccgcataggccaagggcactgtgtttctggaatgggcatgggccgaggaaacccagagccacctgtcagtggtgaaatggatgacaattcactctccccagaggcttgttacgagtgtaagatcaatggctaccccaaacggggcaggaaacggagaagcacaaacgaaactgatgcctccaatatcgaggatcagtctgagacagaagccaatgtgagtcttgcaagttgggatgttgagaagacagccatctttgctttcaatatttcccacgtcagtaacaaggttcgaatcctagaactccttccagctcttacaactctgacgaatcacaacagatacttgatcgaatctggaaatgaagatggcttctttaaaatcaaccaaaaggaagggatcagctacctccacttcacaaagaagaagccagtggctggaacctattcattacaaatcagtagtactccactttataaaaagaaagaacttaaccaactagaagacaaatatgacaaagactacctcagtggtgaactgggtgataatctgaagatgaaaatccaggttttgcttcattaattcaccatccagagaccaaataattaaaagaaaaacaaatatagataggtagaactatattttcccccaatcagaatcatcatatcataggtacaatctttcaccaagtaaatttgtataaataagcactattctttgtattaccaaagcaaggtacaggtgactaccctagttcaaaacaaccactttctcaggcttctcatgtgtgtagctaagctaccttgtcatatgtgttgattcttgaaaactgggacgtgtatttccattgggggttggccatttatgctgacatgccatccttccagcaaacgtacgggaatgtgctttcaattgatggactactctattttttgcaaatttgtaaactttgcttctccaaatacaagtactaggttgtccatttatggtacctatttggtgctagtaaattttcaaactagatttataaatgcactgtaatatgtacacaacttagaaaccaaattacaagtattcagttccaatacttcattaatttcaatcaaccaaagttagttcagtagcttatctcagttatgagtataatacattacatgtaaattaagtgtgtgtatactgtaatcgtgctattttttatcattgaaacatttataaactagaataataatgcccttaatgtgagggtttgtaatggtgcttattaagaccaaagacttgttaaatgtatacaccaagtggtaatgaaatttcggtgactggcccacacgtgcatagaggtctgggaggaccaggaaacagcctcagtggccagaggatcaccagtgcatccttcatcacagcatgtgcaatatgccaagattaccctcggtcattcctgtcaacaaggggtcaatgtcataaatgtcacaataaaacaatctcttcttttttttagttt

SEQ ID NO: 7271 - DNA, 660 bp, Homo sapiens
  source 1..660: mol_type = unassigned DNA; mol_type = unassigned DNA
gagacttccaaaaattataaatcagaaataatgagaaactcatggttttcccccttctagctgatttttttaaaatgaaaacgaatgcctcagcgctcacatctgcggaggagcctcctgtcacaacaccctggggagctacaagtgcatgtgtcccgccggcttccagtatgaacagttcagtggaggatgccaagacatcaatgaatgtggctctgcgcaggccccctgcagctatggctgttccaataccgagggcggttacctgtgtggctgtccacctggttacttccgcataggccaagggcactgtgtttctggaatgggcatgggccgaggaaacccagagccacctgtcagtggtgaaatggatgacaattcactctccccagaggcttgttacgagtgtaagatcaatggctaccccaaacggggcaggaaacggagaagcacaaacgaaactgatgcctccaatatcgaggatcagtctgagacagaagccaatgtgagtcttgcaagttgggatgttgagaagacagccatctttgctttcaatatttcccacgtcagtaacaaggttcgaatcctagaactccttccagctcttacaactctgacgaatcacaacagatacttgatcgaatctggaaatgaagatgg

SEQ ID NO: 7272 - DNA, 686 bp, Homo sapiens
  source 1..686: mol_type = unassigned DNA; mol_type = unassigned DNA
cagagaagaccgtaggatgtgcaaagatgaggatgagtgtgaagagggaaaacatgactgtactgaaaaacaaatggaatgcaagaacctcattggcacatatatgtgcatctgtggacccgggtatcagcggagacctgatggagaaggctgtgtagatgagaatgaatgtcagacgaagccagggatctgtgagaatgggcgctgcctcaacacccgtgggagctacacctgtgagtgtaatgatgggtttaccgccagccccaaccaggacgagtgccttggtgagtacagttggcaccgcactttcctaacctcagcctccacactgggatgctggaaacccagacttcttatttaaaatacaagaaaatgtcaaaatctgaggaaggataaaaaatgttcatattttggagatgccgtaatgactgtgattgtccattgggctcagcaccaccctgcagctaaattcttcctttgctaattggatcctgaatcacttgtttggaatttcttggctgcctttgaagcccttggtgatcaggatccacttccgtatgtttctctgcccctctgtctgtaagcatggctattcccctgtatttctgggagcagagagagttataagcttgtctaggccaatgtctttctgcctacttactgaatgtcttatttgtttccctcag

SEQ ID NO: 7273 - DNA, 3766 bp, Homo sapiens
  source 1..3766: mol_type = unassigned DNA; mol_type = unassigned DNA
agagactgtgggtgccacaagcggacaggagccacagctgggacagctgcgagcggagccgagcagtggctgtagcggccacgactgggagcagccgccgccgcctcctcgggagtcggagccgccgcttctccactggcaggggccgcctgaagtgggagcagcgcctggagaaggcgggaggagcccggcccgggggacgggcggcgggatagcgggaccccggcggcgcggtgcgcttcagggcgcagcggcggccgcagaccgagccccgggcgcggcaagaggcggcgggagccggtggcggctcggcatcatgcgtcgagggcgtctgctggagatcgccctgggatttaccgtgcttttagcgtcctacacgagccatggggcggacgccaatttggaggctgggaacgtgaaggaaaccagagccagtcgggccaagagaagaggcggtggaggacacgacgcgcttaaaggacccaatgtctgtggatcacgttataatgcttactgttgccctggatggaaaaccttacctggcggaaatcagtgtattgtccccatttgccggcattcctgtggggatggattttgttcgaggccaaatatgtgcacttgcccatctggtcagatagctccttcctgtggctccagatccatacaacactgcaatattcgctgtatgaatggaggtagctgcagtgacgatcactgtctatgccagaaaggatacatagggactcactgtggacaacctgtttgtgaaagtggctgtctcaatggaggaaggtgtgtggccccaaatcgatgtgcatgcacttacggatttactggaccccagtgtgaaagagattacaggacaggcccatgttttactgtgatcagcaaccagatgtgccagggacaactcagcgggattgtctgcacaaaaacgctctgctgtgccacaacatcaatgaatgtgaaattggagcacacaactgtggcaaacatgctgtatgtaccaatacagcaggaagcttcaaatgtagctgcagtcccgggtggattggagatggcattaagtgcactgatctggacgaatgttccaatggaacccatatgtgcagccagcatgcagactgcaagaataccatgggatcttaccgctgtctgtgcaaggaaggatacacaggtgatggcttcacttgtacagaccttgatgagtgctctgagaacctgaatctctgtggcaatggccagtgcctcaatgcaccaggaggataccgctgtgaatgcgacatgggcttcgtgcccagtgctgacgggaaagcctgtgaagatattgatgagtgctcccttccgaacatctgtgtctttggaacttgccacaacctccctggcctgttccgctgtgagtgtgagataggctacgaactggacagaagcggcgggaactgcacagatgtgaatgaatgcctggatccaaccacgtgcatcagtgggaactgtgtcaacactccaggcagctatatctgtgactgcccacctgattttgaactgaacccaactcgagttggctgtgttgatacccgctctggaaattgctatttggatattcgacctcgaggagacaatggagatacagcctgcagcaatgaaattggagttggtgtttccaaagcttcctgctgctgttctctgggtaaagcctggggtactccttgtgagatgtgtcctgctgtgaacacatccgagtacaaaattctttgtcctggaggggaaggtttccgaccaaatcctatcaccgttatattggaagatattgatgagtgccaggagctaccagggctgtgccaaggaggaaaatgtatcaacacctttgggagtttccagtgccgctgtccaaccggctactacctgaatgaagatacacgagtgtgtgatgatgtgaatgaatgtgagactcctggaatctgtggtccagggacatgttacaacaccgttggcaactacacctgtatctgtcctccagactacatgcaagtgaatgggggaaataattgcatggatatgagaagaagtttgtgctacagaaactactatgctgacaaccagacctgtgatggagaattgttattcaacatgaccaagaagatgtgctgctgttcctacaacattggccgggcgtggaacaagccctgtgaacagtgtcccatcccaagtacagatgagtttgctacactctgtggaagtcaaaggccaggctttgtcatcgacatttataccggtttacccgttgatattgatgagtgccgggagatcccaggggtctgtgaaaatggagtgtgtatcaacatggttggcagcttccgatgtgaatgtccagtgggattcttctataatgacaagttgttggtttgtgaagatattgacgagtgtcagaacggcccagtgtgccagcgcaacgccgaatgcatcaacactgcaggcagctaccgctgtgactgtaagcccggctaccgcttcacctccacaggacagtgcaatgatcgtaatgaatgtcaagaaatccccaatatatgcagtcatgggcagtgcattgacacagttggaagcttttattgcctttgccacactggttttaaaacaaatgatgaccaaaccatgtgcttggacataaatgaatgtgaaagagatgcctgtgggaatggaacttgccggaacacaattggttccttcaactgccgctgcaatcatggtttcatcctttctcacaacaatgactgtatagatgttgatgaatgtgcaagtggaaatgggaatctttgcagaaatggccaatgcattaatacagtggggtctttccagtgccagtgcaatgaaggctatgaggtggctccagatgggaggacctgtgtggatatcaatgaatgtcttctagaacccagaaaatgtgcaccaggtacctgtcaaaacttggatgggtcctacagatgcatttgcccacctggatacagtcttcaaaatgagaagtgtgaagatattgatgagtgtgtcgaagagccagaaatttgtgccctgggcacatgcagtaacactgaaggcagcttcaaatgtctgtgtccagaagggttttccttgtcctccagtggaagaaggtgccaagatttgcgaatgagctactgttatgcgaagtttgaaggaggaaagtgttcatcacccaaatccagaaatcactccaagcaggaatgctgctgtgccttgaagggagaaggctggggagacccctgcgagctctgccccacggaacctgatgaggccttccgccagatatgtccttatggaagtgggatcatcgtgggacctgatgattcagcagttgatatggacgaatgcaaagaacccgatgtctgtaaacatggacagtgcatcaatacagatggttcctatcgctgcgagtgtccctttggttatattctagcagggaatgaatgtgtagatactgatgaatgttctgttggcaatccttgtggaaatggaacctgcaagaatgtgattggaggttttgaatgcacctgcgaggagggatttgagcccggtccaatgatgacatgtgaagatataaatgaatgtgcccagaatcctctgctctgtgccttccgatgtgtgaacacttatgggtcatatgaatgcaaatgtcccgtgggatatgtgctcagagaagaccgtaggatgtgcaaagatgaggatgagtgtgaagagggaaaacatgactgtactg

SEQ ID NO: 7274 - DNA, 579 bp, Homo sapiens
  source 1..579: mol_type = unassigned DNA; mol_type = unassigned DNA
ggctatgaggtggctccagatgggaggacctgtgtggatatcaatgaatgtcttctagaacccagaaaatgtgcaccaggtacctgtcaaaacttggatgggtcctacagatgcatttgcccacctggatacagtcttcaaaatgagaagtgtgaagatattgatgagtgtgtcgaagagccagaaatttgtgccctgggcacatgcagtaacactgaaggcagcttcaaatgtctgtgtccagaagggttttccttgtcctccagtggaagaaggtgccaagatttgcgaatgagctactgttatgcgaagtttgaaggaggaaagtgttcatcacccaaatccagaaatcactccaagcaggaatgctgctgtgccttgaagggagaaggctggggagacccctgcgagctctgccccacggaacctgatggtatgtctgtcatctgcatttctctctgggccatgcagggtgcagactggccatgatgtaagtaagactgtaggccttaaagacagtaacacaatttaatttaattgtaagtctaattagaatgttcattaaaaattattttatct

SEQ ID NO: 7275 - DNA, 4109 bp, Homo sapiens
  source 1..4109: mol_type = unassigned DNA; mol_type = unassigned DNA
gggagccgcggcagagactgtgggtgccacaagcggacaggagccacagctgggacagctgcgagcggagccgagcagtggctgtagcggccacgactgggagcagccgccgccgcctcctcgggagtcggagccgccgcttctccactggcaggggccgcctgaagtgggagcagcgcctggagaaggcgggaggagcccggcccgggggacgggcggcgggatagcgggaccccggcggcgcggtgcgcttcagggcgcagcggcggccgcagaccgagccccgggcgcggcaagaggcggcgggagccggtggcggctcggcatcatgcgtcgagggcgtctgctggagatcgccctgggatttaccgtgcttttagcgtcctacacgagccatggggcggacgccaatttggaggctgggaacgtgaaggaaaccagagccagtcgggccaagagaagaggcggtggaggacacgacgcgcttaaagggtaaaggaaccggttccctcctttggtgtgggtctcccaagtttcaagatccagaacaacgggcaggatgactctccctgtggaagactccttggcaagacctcctgggggcaccttagaggtgctagggttgtttagtccccaccccgttcgtggttaaactaccttgcccctactcccagagatttctgccccaaaggagaggacgtggttaaatggaatcttgggccattgttgaggcagattttgggaggcgagaagagttccttggggaagaaggggaggagttgcgagtgggataagaggagaagcccgttcctttccctgcaatatcaattctggttgtttctagaggaaagtactttccttggggtcatcttggtagatgctgtatttgaaagggggcaaggaaaggaagggattcccatgacagtcagaggagaaatcacacagtagttgactcttccgtaaattatgcttattaaaattacggattgggttttctgggcaatgcttcctttagatgtctacattggaagcagaacagggcaagtggttctgagaactggttttttgagttgtgtggggctctccgtttcactgcagcagtaaggctgctgtggccggccttaagggagtatttttaactagtggtgtttgtgttgtgtacatgcaactgaccatttcactggcttcccatgccgctgttacagatgtttcagccggaaaaattttaattagacttgactaagggttgtcattttcctgtattgaaggacagtgggaatacatttcctttaagagaaatttgtctgcagttgtttaagttaaagcctccatggaaacaacaggatggactgtcagtgaccccttttatcttcttggaggagcctgttaaataaattcagacagtatatatagggagattttgtattaaattcttaccattctcgctgatgctcttttcctgagtggttctgtagctttattatatagctctgggtcaccaagtgatggtatccacttggatatgtggctgttcatttcacttactctttttttgttatgaggtgttatagtcatgtatatgtagtaaaatttgtgtttgtatggcccagatatgagaagaaaaagtaaactcaccagaccagtttttgactcctagtctggagtaaggacaagatgattgtatgagccaagcacttaggctgtgataaaatagcacagaaaatagttatgattaattcggttccatcttggccttcgtggaaaataaacccagaattccgataatgttggaaggaagtttgcttatcatggtaaacctgaccttgatcagacagcagatgtttattgccctgtgtgcaaggcacatggcaagttcaataagtagactgaggctctgattttcatatgttctcaagaggacctcatttagtccagtatttttccttcaaaaatacatttctcctacataataatatcttaatatctattctgataggattgctcctgtatataaaggacgtggggatttaattctgtggctgaagatctgcagagaggtgtgaggcctggtcagacatttgtctcatttctctgggctgtcaccaactagtgtgttcccttgggaatgtgaaaaaagaaactaagctttactttgttgcttaacaggatgccacacttttactcacacttgtgctttttctctctggttttaaatttgtttgtgattatagagagatacctctctgtgctcctcacagtatttgatcattaacacagaccttatcctattgtaaactatttataaagccttcctaaaaacagggtattaatagaattgtaattatgtgtgttcctaattctcatgttaattataagattttataataagtgatatatatatatacacacacacacacacacacacatacacgggggtgaaaataataatttaaaaatatatacaattaaaagtatttccctgccacctttcagagaccattttcttgtgtatttttctataaatcttttaggcatatgtatacatgtacaaataaacacaaatatatatgtatacatacacatgtgtgtgtgtatcctttttaatacatggaatgtattgtacatgcaatattctgaactttacttactttttatgtatctttaatgcatccatctattaactcatatggatctacctcattcattttctttctttttttttgagacacagtcttgctctgttgcccaggctggagtgtagtggtgcaatcttggcttactgcctccaccttcccggctcaagcgattctcctgcctcagcctccagagtagctgggattacaggtgggtgccaccaagcccggctaattttttgtatttttagtagagatggggtttcgccatgttggccaggatggtctcaaactcttggcctcaagcgatccacccacctctgcctctccaaattacaggcttgagccactgcgccctaccccattttcttgttgtatagaacctcattatgtcactggaacagttccctagtgatggctctttagattacattgagtcttttgctattaccaactttcttctgcatacctgtgtttacatacacgtgtttatatgtggtataaattagtaaaaatagaattgctggatcaaagtctttcccatagattttaagcaaaccccaattcttatgttaaatttgaataacattttaaatttattccctctgcttattgccgttacagtctcatatgaataaatcctttaacggtgccctgctgtataaatcatcagaaaaagcagttatgtactacatttttccagttattgcttaaaatttctgtttttgtctgttaaaatattaccggcttcaaaactcacctctttgactacagtgaaacctgtttaccattctgattggagatgcacagtttatgaagtgaaagtgatttgtaacccccgagtctgcctgatgcccagttggtggcagcaactttcagcacctcactaatctttcctctagttaaaaggtaccttaaactcatcagtatctgctgtgcactggttccttctccccagcaaatactgccttcttgtttttctctgatgtggcaggtgactacaaaatccgccttggtattcttcaaatgcatatatattcctttcttgtcagctccctctcttcctagattagaaaactgcctcattttctgctcactggatgtgcagtcccagcttgtcttcctctcctccccccctgttgcaggtgttcttttttttttttattctctccccactgggcagcaaaagttgttccacagtggaaatttaggcatcctcaagtttcttcccagcttctgctgtgttttcttagagtaaattgccaatttctgtttttacaggaaatccttttttaaaaatggaatcagtgtggtccccatctactctgcaaaaattgcatttttctctattttcaaatgagatttgttcaagtttcaaaaccacgtgaaataataaatgtatagtagttttcttttccttgggcattgcttgatatgtgaaatgggtttatgaaaaataataaaatcataacgcta

SEQ ID NO: 7276 - DNA, 482 bp, Homo sapiens
  source 1..482: mol_type = unassigned DNA; mol_type = unassigned DNA
gcggccgcagaccgagccccgggcgcggcaagaggcggcgggagccggtggcggctcggcatcatgcgtcgagggcgtctgctggagatcgccctgggatttaccgtgcttttagcgtcctacacgagccatggggcggacgccaatttggaggctgggaacgtgaaggaaaccagagccagtcgggccaagagaagaggcggtggaggacacgacgcgcttaaagggattgctcctgtatataaaggacgtggggatttaattctgtggctgaagatctgcagagaggtgtgaggcctggtcagacatttgtctcatttctctgggctgtcaccaactagtgtgttcccttgggaatgtgaaaaaagaaactaagctttactttgttgcttaacaggatgccacacttttactcacacttgtgctttttctctctggttttaaatttgtttgtgattatagagagatacctctctgtgctc

SEQ ID NO: 7277 - DNA, 11132 bp, Homo sapiens
  source 1..11132: mol_type = unassigned DNA; mol_type = unassigned DNA
ggcagttagggcaactggaaggctgggagctgaaatcacctgaagtctcattcactcacatgtctgatggttgatattgtctatcagattcttttttgtctccttctctgcaagaggctggcaccagatcacctcctgagtagagcagacattccaaaggatgtcctgccaacaataatggaaagctggatacaactgaatatgtaaaatgatgttaatgaagaattgaagagcactgtatctagttttctgctctccccttattttgaatcaaacccaggcatcctatcatttcatctataaagactttagttcctaaaagtggaattgctggatcaaagggtaaaggcataggcaattctagagcatttagatttaatgtgatggacaggaatgaaccatgaagccacgagtgtttgatttttaaattgtgatattccactaaatgagaaatgaccaggacttcacagagatttcatgaaaggagggccacaaaggaagaacccagagcaggccggtgagaggcactctaagagctttccaatatccgtcttcggagcgcacgggaatccgccgagctctgcgtgcaggcccttttttcttttgaggttcacattttttgaaattttacgccagggcttttgtaatttcctcccccgcccgctgacggtcctggagtcgctcggggctttaggccggttatgcaacgtgtaccgctcggggctgccggctgcacctccgccgcgcctcgccgctcactgcgctagacccggcgccccgcgtctcgcttcgcgggcagtcagggggccggcgctctgtcgaggtctccagctagagcagggagcccgagcccgagggagtccccggagccgacgaagggcttattagaccctgactcttttctgaggcgcgcagattttgtctttgatcactccctctccgcgggtctacggccgcgcgctttcggcgccggcgatggggagaagacggaggctgtgtctccagctctacttcctgtggctgggctgtgtggtgctctgggcgcagggcacggccggccagcctcagcctcctccgcccaagccgccccggccccagccgccgccgcaacaggttcggtccgctacagcaggctctgaaggcgggtttctagcgcccgagtatcgcgaggagggtgccgcagtggccagccgcgtccgccggcgaggacagcaggacgtgctccgagggcccaacgtgtgcggctccagattccactcctactgctgccctggatggaagacgctccctggaggaaaccagtgcattgtcccgatttgtagaaatagttgtggagatggattttgttcccgtcctaacatgtgtacttgttccagtgggcaaatatcatcaacctgtggatcaaaatcaattcagcagtgcagtgtgagatgcatgaatggtgggacctgtgcagatgaccactgccagtgccagaaaggatatattggaacttattgtggacaacctgtctgtgaaaatggatgtcagaatggtggacgttgcatcggacccaaccgctgtgcttgtgtttatgggttcactggtccacagtgtgaaagagattacaggacaggcccgtgtttcactcaggtcaacaaccagatgtgccaagggcagctgacaggcattgtctgcacgaagactctgtgctgtgccaccattggacgggcgtggggccatccctgtgagatgtgtccagcccagcctcagccctgccgacggggtttcatccccaacatccgcactggagcttgccaagatgttgatgaatgccaggctatcccagggatatgccaaggaggaaactgtatcaatacagtgggctcttttgaatgcagatgccctgctggtcacaaacagagtgaaactactcagaaatgtgaagacattgatgagtgcagcatcattcctgggatatgtgaaactggtgaatgttccaacaccgtgggaagctatttttgtgtttgtccacgtggatatgtaacctcaacagatggctctcgatgcatcgatcagagaacaggcatgtgtttctcgggcctggtgaatggccgctgtgcacaagagctcccggggagaatgacgaaaatgcagtgctgctgtgagcctggccgctgctggggcatcggaaccattcctgaagcctgtcctgtcagaggttctgaggaatatcgcagactttgcatggatggacttccaatgggaggaattccagggagtgctggttccagacctggaggcactgggggaaatggctttgccccaagtggcaatggcaatggctatggcccaggagggacaggcttcatccccatccctggaggcaatggcttttctcctggcgttgggggagccggtgtgggggccgggggacagggacctatcatcactggactaacaattctgaaccagacaatagatatctgtaagcatcatgctaacctttgtttaaatggacgctgtataccaactgtctcaagctaccgatgtgaatgcaacatgggttataagcaggatgcaaatggagattgtatagatgttgatgaatgcacatcaaatccctgcactaatggagattgtgttaacacacctggttcctattattgtaaatgtcatgctggattccagaggactcctaccaagcaagcatgcattgatattgatgagtgcatccagaatggggttctttgtaaaaacggtcgatgcgtgaacacagatggaagtttccagtgcatttgcaatgccggctttgaattaactacagatggaaaaaactgtgttgatcatgatgaatgtacaactaccaacatgtgtttgaatggaatgtgcatcaatgaagatggcagcttcaagtgcatctgcaaaccaggatttgtcttggctccaaatgggcgttactgtactgatgttgatgaatgccagaccccaggaatctgcatgaatgggcactgcatcaacagtgaagggtccttccgctgtgactgtcccccaggcctggctgtgggcatggatggacgtgtgtgtgttgatactcacatgcgcagtacctgctatggaggaatcaagaaaggagtgtgtgtgcgtcctttccccggtgcagtgaccaagtccgaatgctgctgtgccaatccagactatggttttggagaaccctgccagccatgccctgcaaaaaattcagctgaattccacggcctttgtagtagtggagtaggtatcactgtggatggaagagatatcaatgaatgtgctttggatcctgatatatgtgccaatgggatttgtgaaaacttacgtggtagttaccgttgtaattgcaacagtggctatgaaccagatgcctctggaagaaactgtattgacattgatgaatgtttagtaaacagactgctttgtgataacggattgtgccgaaacacgccaggaagttacagctgtacgtgcccaccagggtatgtgttcaggactgagacagagacctgtgaagatataaatgaatgtgaaagcaacccatgtgtcaatggggcctgcagaaacaaccttggatctttcaattgtgaatgttcgcccggcagcaaactcagctccacaggattgatctgtattgacagcctgaaggggacctgttggctcaacatccaggacagccgctgtgaggtgaatattaatggagccactctgaaatctgaatgctgtgccaccctcggagccgcctgggggagcccctgtgagcggtgtgaactagatacagcttgcccaagagggcttgccaggattaaaggtgttacgtgtgaagatgttaatgagtgtgaggtgttccctggcgtttgtccaaatggacgctgtgtcaacagtaagggatcttttcattgcgagtgccctgaaggccttacgttggatgggactggccgtgtatgtttggatattcgcatggagcagtgttacttgaagtgggatgaagatgaatgcatccaccccgttcctggaaagttccgcatggatgcctgctgctgtgctgtcggggcggcttggggcaccgagtgtgaggagtgccccaaacctggcaccaaggaatacgagacgctgtgcccccgcggggctggctttgctaaccgaggggatgttcttactgggcggccattttacaaagacatcaatgaatgcaaagcatttcctgggatgtgcacttatgggaagtgcagaaatacaatcggaagcttcaaatgccgttgcaatagtggctttgctctagacatggaggaaagaaactgcacggacatcgacgagtgcaggatttctcctgacctctgtggcagtggaatctgcgtcaatacaccgggcagctttgagtgcgagtgcttcgaaggctatgaaagtggcttcatgatgatgaagaactgcatggacattgacgaatgtgaacgtaaccctctcctttgtaggggtggcacctgtgtgaacactgagggcagctttcagtgtgactgcccactgggacacgagctgtcaccatcccgtgaggactgtgtggatattaatgaatgctccctgagtgacaatctctgcagaaatggaaaatgtgtgaacatgattggaacctatcagtgctcttgcaatcctggatatcaggctacgccagaccgccagggctgtacagatattgatgaatgtatgataatgaacggaggctgtgacacccagtgcacaaattcagagggaagctacgaatgcagctgcagtgagggttatgccctgatgccagatgggagatcgtgtgcagacattgatgaatgtgaaaacaatcctgatatctgtgatggcggccagtgtaccaacattcctggagagtatcgctgcctctgctatgatggcttcatggcttccatggacatgaaaacatgcattgatgtcaatgaatgtgacctaaattcaaatatctgcatgtttggggaatgtgagaacacaaagggatccttcatttgccactgtcagctgggttactcagtgaagaaggggaccacaggatgtacagatgtggatgagtgtgaaattggtgctcataactgcgacatgcatgcctcatgtctgaatatcccaggaagcttcaagtgtagctgcagagaaggctggattggaaacggcatcaagtgtattgatctggacgaatgttctaatggaacccaccagtgtagcatcaatgctcagtgtgtaaataccccgggctcataccgctgtgcctgctccgaaggtttcactggtgatggctttacctgctcagatgttgatgagtgtgcagaaaacataaacctctgtgagaacggacagtgccttaatgtcccgggtgcatatcgctgcgagtgtgagatgggcttcactccagcctcagacagcagatcctgccaagatattgatgaatgctccttccaaaacatttgtgtctttggaacatgtaataacctgcctggaatgtttcattgcatctgcgatgatggttatgaattggacagaacaggagggaactgtacagatattgatgagtgtgcagatcctataaactgtgtcaatggcctatgtgtcaacacgcctggtcgctatgagtgtaactgcccacccgattttcagttgaacccaactggtgtgggttgtgttgacaaccgtgtgggcaactgctacctgaagtttggacctcgaggagatgggagtctgtcttgcaacaccgagatcggggtgggcgtcagtcgctcttcatgctgctgctctctgggaaaggcctggggaaacccctgtgagacatgcccccctgtcaatagcactgaatattacaccctgtgtcccggaggtgaaggcttcagacctaaccccatcacaatcattttagaagacattgacgaatgccaggagttaccaggtctctgccagggtggaaactgcatcaacacttttgggagcttccagtgtgagtgcccacaaggctactacctcagcgaggatacccgcatctgtgaagatattgatgagtgttttgcacatcctggtgtgtgtgggcctgggacctgctataacaccctgggaaattacacctgcatttgcccacctgagtacatgcaggtcaatggaggccacaactgcatggacatgagaaaaagcttttgctaccgaagctataatggaaccacttgtgagaatgagttgcctttcaatgtgacaaaaaggatgtgctgctgcacatataatgtgggcaaagcctggaacaaaccttgtgaaccatgcccaactccaggaacagctgactttaaaaccatatgtggaaatattcctggattcacctttgacattcacacaggaaaagctgttgacattgatgaatgtaaagagattccaggcatttgtgcaaatggtgtgtgcattaaccagattggcagtttccgctgtgaatgccctacaggattcagttacaatgacctgctgttggtttgtgaagatatagatgagtgcagcaatggtgataatctctgccagcggaatgcagactgcatcaatagtcctggtagttaccgctgtgaatgtgccgcgggtttcaaactttcacccaatggggcctgtgtagatcgcaatgaatgtttagaaattcctaacgtttgcagtcatggcttgtgtgttgatctgcaaggaagttaccagtgcatctgccacaatggctttaaggcttctcaggaccagaccatgtgcatggatgttgatgagtgcgagcggcatccatgtggaaatggaacttgtaaaaacaccgttggatcctataactgtctgtgctacccagggtttgaactcactcataataatgattgcctggacatagatgagtgcagttccttttttggtcaggtgtgcagaaatggacgttgttttaatgaaattggttctttcaagtgtctatgtaacgaaggttatgaacttaccccagatggcaaaaactgtatagacactaatgagtgtgtcgcccttcccggctcttgctctcctggtacctgtcagaatttggagggatccttcagatgcatctgtcccccagggtatgaagtaaaaagcgagaactgcattgatataaatgaatgtgatgaagatcccaacatttgtctttttggttcctgtactaatactccagggggcttccagtgcctctgcccccctggctttgtactatctgataatggacggagatgctttgatactcgccagagcttctgcttcacaaattttgaaaatggaaagtgttctgtacccaaagctttcaacaccacaaaagcaaaatgctgctgtagtaagatgccaggagagggctggggggacccctgtgagctgtgccccaaagacgatgaagttgcatttcaggatttgtgtccatatggccatggaactgtccctagtcttcatgatacacgtgaagatgtcaatgagtgtcttgagagcccaggcatttgttcaaatggtcaatgtatcaacaccgacggatcttttcgctgtgaatgtccaatgggctacaaccttgactacactggagtacgctgtgtggatactgatgagtgttcaatcggcaatccgtgtggaaatggtacatgcaccaatgttattgggagttttgaatgcaattgcaatgaaggctttgagccagggcccatgatgaattgtgaagatatcaacgaatgtgcccagaacccactgctgtgtgctttccgctgcatgaacacttttgggtcctatgaatgcacgtgcccgattggctatgccctcagggaagatcaaaagatgtgcaaagatctggatgaatgtgctgaagggttacacgactgtgaatctaggggcatgatgtgtaagaatctaatcggcaccttcatgtgcatctgccctcctggaatggcccgaaggcccgatggagaaggctgtgtagatgaaaatgaatgcaggaccaagccaggaatctgtgaaaatggacgttgtgttaacattattggaagctatagatgtgagtgtaatgaaggattccagtcaagttcttcaggcactgaatgccttgacaatcgacagggtctctgctttgcagaggtactgcagacaatatgtcaaatggcatccagtagtcgcaatctcgtcactaagtcagaatgctgctgtgatggtgggcgaggctggggccaccagtgcgagctttgcccacttcctggaactgcccagtacaaaaagatatgtcctcatggcccaggatatacaactgatggaagagatattgatgaatgtaaggtaatgccaaacctctgcaccaatggtcagtgcatcaataccatgggctcattccgatgcttctgcaaggttggctacaccacagacatcagtggaacctcttgtatagaccttgatgaatgctcccagtccccgaaaccatgcaactacatctgcaagaacactgaggggagttatcagtgttcatgtccgagggggtatgtcctgcaagaggatggaaagacatgcaaagaccttgatgaatgtcaaacaaagcagcataactgccagttcctctgtgtcaacaccctgggggggtttacctgtaaatgtccacctggtttcacacagcatcacactgcttgtatcgacaacaacgaatgtgggtctcaaccttcgctttgtggagcaaagggaatctgtcaaaacactccaggcagtttcagctgtgaatgccaaagagggttctctcttgatgccaccggactgaactgtgaagatgttgatgaatgtgatgggaaccacaggtgccaacacggctgccagaacatcctgggtggctacagatgtggctgcccccaaggctacatccagcactaccagtggaatcagtgtgtcgatgagaatgaatgctccaatcccaatgcctgtggctctgcttcctgctacaacaccctggggagttacaagtgcgcctgcccctcggggttctccttcgaccagttctccagtgcctgccacgacgtgaatgagtgctcgtcctccaagaacccctgcaattacggctgctctaacacggaggggggctacctctgtggctgcccccctgggtattacagagtgggacaaggccactgtgtctcaggaatgggatttaacaaggggcagtacctgtcactggatacagaggtcgatgaggaaaatgctctgtccccagaagcatgctacgagtgcaaaatcaacggctattctaagaaagacagcaggcagaagagaagtattcatgaacctgatcccactgctgttgaacagatcagcctagagagtgtcgacatggacagccccgtcaacatgaagttcaacctctcccacctcggctctaaggagcacatcctggaactaaggcccgccatccagcccctcaacaaccacatccgttatgtcatctctcaagggaacgatgacagcgtcttccgcatccaccaaaggaatgggctcagctacttgcacacggccaagaagaagctcatgcccggcacatacacactggaaatcactagcatccctctctacaagaagaaggagcttaagaaactggaagagagcaatgaggatgactacctcctaggggagcttggggaggctctcagaatgaggctgcagattcagctctattaacccttcacagacttgggcccaggctcaaatcctagcacagccagtctgcagaagcatttgaaaagtcaaggactaattttaaagaggaaaaataataataactcttgtttctttcctccctgtcttagactttgaatgttgaccctcacagggagggataatttagactctggtatggccaaagatttgagcacaaaggcaaccgtggttactgtattttttatataacttcattttaaaatatattaaaagaaacctaaatgttcaagatatcagcatatggcactaaatgcacaaaaataatgtgagctttttttttttttcctgttagcagtctgtaacactttgggtattttgctatagttgctaattaaaaaaatatagatgtttatttatttttaatgcagtaatatatggagaaatgaacaaactatgtaaacaaaaagggaaactcacttgtttttctttagatttataaatttgagctattttttttagaggtgctttttaaaaatccaatagatacaagagatgtttcctttggttttctgccagtcatccagctgatacacacctgatgattttaaagaaagccacacagagctgaatgggcagtgtaatcaataatttaaaaaacatgaatgtcattagatcctttataacgtagatcgaagccaaagcagctcatttgtgacaacatttcatatcaccagacacaccaggcaacagaagttgaagcacaaccactgtagcaaaataccttgactgcttgtgagaccattagcattgcaggccaaaccgtactgtatttccttctcataacctcaaggaaccatatgtgctacccacaacacctcattcttacccagggtgcgctgcgtcctcatggtactgtaggcagctgaagaaccgccgttcccttgaaagggaacacctggcattctgtggtgtttcgtgctgtcttaaataatggtgcatttattatgttcaagttatttcaggattgccatatgtgcaaacaaatcatgcaatgcagccaaggaatatatgttgttgttgttgttttaaacccattttttttttagaattttcattaatactgtagttatacaccatatgcctcattttatcatagcctattgtgtatgaaagatgtttgtacaatgaattgatgtttagtttgctttagtcatttaaaaagatattgtaccaggatgtgctattaagagcacgtatccattattcttctcaacccaagaacctgtttcctggaccagtgaccaaacctcatatgtgaaatggccaaagcacatgcaggctcctggttgttcctctcaaacctgtgctgaccaaagattagtaaccagttatacccagtattttgaggttttattgtttttttaataactaaaaagaaa

SEQ ID NO: 7278 - DNA, 1884 bp, Homo sapiens
  source 1..1884: mol_type = unassigned DNA; mol_type = unassigned DNA
tctactgaaaacatacccttgtactgttagccagcaatttccccaacttttcaagcatgcagcaccttcgcttggaaggccaagtctatctcattcaatttttaaatttcttttaaaccctgtgaattagacatcgacgagtgcaggatttctcctgacctctgtggcagtggaatctgcgtcaatacaccgggcagctttgagtgcgagtgcttcgaaggctatgaaagtggcttcatgatgatgaagaactgcatggacattgacgaatgtgaacgtaaccctctcctttgtaggggtggcacctgtgtgaacactgagggcagctttcagtgtgactgcccactgggacacgagctgtcaccatcccgtgaggactgtgtggatattaatgaatgctccctgagtgacaatctctgcagaaatggaaaatgtgtgaacatgattggaacctatcagtgctcttgcaatcctggatatcaggctacgccagaccgccagggctgtacagatattgatgaatgtatgataatgaacggaggctgtgacacccagtgcacaaattcagagggaagctacgaatgcagctgcagtgagggttatgccctgatgccagatgggagatcgtgtgcagacattgatgaatgtgaaaacaatcctgatatctgtgatggcggccagtgtaccaacattcctggagagtatcgctgcctctgctatgatggcttcatggcttccatggacatgaaaacatgcattgatgtcaatgaatgtgacctaaattcaaatatctgcatgtttggggaatgtgagaacacaaagggatccttcatttgccactgtcagctgggttactcagtgaagaaggggaccacaggatgtacagatgtggatgagtgtgaaattggtgctcataactgcgacatgcatgcctcatgtctgaatatcccaggaagcttcaagtgtagctgcagagaaggctggattggaaacggcatcaagtgtattgatctggacgaatgttctaatggaacccaccagtgtagcatcaatgctcagtgtgtaaataccccgggctcataccgctgtgcctgctccgaaggtttcactggtgatggctttacctgctcagatgttgatgagtgtgcagaaaacataaacctctgtgagaacggacagtgccttaatgtcccgggtgcatatcgctgcgagtgtgagatgggcttcactccagcctcagacagcagatcctgccaaggtgggtcaccaggattccaactcattttcaagttggatcaaccacagtaaatgaaaccacaacaagggctggaacaagctccacctggaagcagaatacatagcacatgctgcactataaaagtcattcgtttaagcgtggattattttgccgaatgaataatgatgatggcggctttcatctcttatgaagttttcctggccaagagccagtagttggaagtttggatcattcttttttcttttttaaccatttcttctcttctttctcttttttatcactaaatgaatgacatgtggagaaactattcagcttttaaagtatgctccattacttgtctcaactaccactatttattgtgtttatcaaaatcataaaaagctcatttttggcatttaccttcgtggttgagactgctgtctgtatgtctgggaatggaagtcctcttcagggattcagcaagggctgtacttttgcttaatactagtggttccttattctaagtgatgacatcatccacctttcctagaaatgggtctttgtgcctagtatgatatctttccaagaaaaagaatttggattttctattaaattagaaactcaattcacattatatatagtttgag

SEQ ID NO: 7279 - DNA, 4987 bp, Homo sapiens
  source 1..4987: mol_type = unassigned DNA; mol_type = unassigned DNA
actgcgctagacccggcgccccgcgtctcgcttcgcgggcagtcagggggccggcgctctgtcgaggtctccagctagagcagggagcccgagcccgagggagtccccggagccgacgaagggcttattagaccctgactcttttctgaggcgcgcagattttgtctttgatcactccctctccgcgggtctacggccgcgcgctttcggcgccggcgatggggagaagacggaggctgtgtctccagctctacttcctgtggctgggctgtgtggtgctctgggcgcagggcacggccggccagcctcagcctcctccgcccaagccgccccggccccagccgccgccgcaacaggttcggtccgctacagcaggctctgaaggcgggtttctagcgcccgagtatcgcgaggagggtgccgcagtggccagccgcgtccgccggcgaggacagcaggacgtgctccgagggcccaacgtgtgcggctccagattccactcctactgctgccctggatggaagacgctccctggaggaaaccagtgcattgtccttcagcagtgcagtgtgagatgcatgaatggtgggacctgtgcagatgaccactgccagtgccagaaaggatatattggaacttattgtggacaacctgtctgtgaaaatggatgtcagaatggtggacgttgcatcggacccaaccgctgtgcttgtgtttatgggttcactggtccacagtgtgaaagagattacaggacaggcccgtgtttcactcaggtcaacaaccagatgtgccaagggcagctgacaggcattgtctgcacgaagactctgtgctgtgccaccattggacgggcgtggggccatccctgtgagatgtgtccagcccagcctcagccctgccgacggggtttcatccccaacatccgcactggagcttgccaagatgttgatgaatgccaggctatcccagggatatgccaaggaggaaactgtatcaatacagtgggctcttttgaatgcagatgccctgctggtcacaaacagagtgaaactactcagaaatgtgaagacattgatgagtgcagcatcattcctgggatatgtgaaactggtgaatgttccaacaccgtgggaagctatttttgtgtttgtccacgtggatatgtaacctcaacagatggctctcgatgcatcgatcagagaacaggcatgtgtttctcgggcctggtgaatggccgctgtgcacaagagctcccggggagaatgacgaaaatgcagtgctgctgtgagcctggccgctgctggggcatcggaaccattcctgaagcctgtcctgtcagaggttctgaggaatatcgcagactttgcatggatggacttccaatgggaggaattccagggagtgctggttccagacctggaggcactgggggaaatggctttgccccaagtggcaatggcaatggctatggcccaggagggacaggcttcatccccatccctggaggcaatggcttttctcctggcgttgggggagccggtgtgggggccgggggacagggacctatcatcactggactaacaattctgaaccagacaatagatatctgtaagcatcatgctaacctttgtttaaatggacgctgtataccaactgtctcaagctaccgatgtgaatgcaacatgggttataagcaggatgcaaatggagattgtatagatgttgatgaatgcacatcaaatccctgcactaatggagattgtgttaacacacctggttcctattattgtaaatgtcatgctggattccagaggactcctaccaagcaagcatgcattgatattgatgagtgcatccagaatggggttctttgtaaaaacggtcgatgcgtgaacacagatggaagtttccagtgcatttgcaatgccggctttgaattaactacagatggaaaaaactgtgttgatcatgatgaatgtacaactaccaacatgtgtttgaatggaatgtgcatcaatgaagatggcagcttcaagtgcatctgcaaaccaggatttgtcttggctccaaatgggcgttactgtactgatgttgatgaatgccagaccccaggaatctgcatgaatgggcactgcatcaacagtgaagggtccttccgctgtgactgtcccccaggcctggctgtgggcatggatggacgtgtgtgtgttgatactcacatgcgcagtacctgctatggaggaatcaagaaaggagtgtgtgtgcgtcctttccccggtgcagtgaccaagtccgaatgctgctgtgccaatccagactatggttttggagaaccctgccagccatgccctgcaaaaaattcagctgaattccacggcctttgtagtagtggagtaggtatcactgtggatggaagagatatcaatgaatgtgctttggatcctgatatatgtgccaatgggatttgtgaaaacttacgtggtagttaccgttgtaattgcaacagtggctatgaaccagatgcctctggaagaaactgtattgacattgatgaatgtttagtaaacagactgctttgtgataacggattgtgccgaaacacgccaggaagttacagctgtacgtgcccaccagggtatgtgttcaggactgagacagagacctgtgaagatataaatgaatgtgaaagcaacccatgtgtcaatggggcctgcagaaacaaccttggatctttcaattgtgaatgttcgcccggcagcaaactcagctccacaggattgatctgtattgacagcctgaaggggacctgttggctcaacatccaggacagccgctgtgaggtgaatattaatggagccactctgaaatctgaatgctgtgccaccctcggagccgcctgggggagcccctgtgagcggtgtgaactagatacagcttgcccaagagggcttgccaggattaaaggtgttacgtgtgaagatgttaatgagtgtgaggtgttccctggcgtttgtccaaatggacgctgtgtcaacagtaagggatcttttcattgcgagtgccctgaaggccttacgttggatgggactggccgtgtatgtttggatattcgcatggagcagtgttacttgaagtgggatgaagatgaatgcatccaccccgttcctggaaagttccgcatggatgcctgctgctgtgctgtcggggcggcttggggcaccgagtgtgaggagtgccccaaacctggcaccaaggaatacgagacgctgtgcccccgcggggctggctttgctaaccgaggggatgttcttactgggcggccattttacaaagacatcaatgaatgcaaagcatttcctgggatgtgcacttatgggaagtgcagaaatacaatcggaagcttcaaatgccgttgcaatagtggctttgctctagacatggaggaaagaaactgcacggacatcgacgagtgcaggatttctcctgacctctgtggcagtggaatctgcgtcaatacaccgggcagctttgagtgcgagtgcttcgaaggctatgaaagtggcttcatgatgatgaagaactgcatggacattgacgaatgtgaacgtaaccctctcctttgtaggggtggcacctgtgtgaacactgagggcagctttcagtgtgactgcccactgggacacgagctgtcaccatcccgtgaggactgtgtggatattaatgaatgctccctgagtgacaatctctgcagaaatggaaaatgtgtgaacatgattggaacctatcagtgctcttgcaatcctggatatcaggctacgccagaccgccagggctgtacagatattgatgaatgtatgataatgaacggaggctgtgacacccagtgcacaaattcagagggaagctacgaatgcagctgcagtgagggttatgccctgatgccagatgggagatcgtgtgcagacattgatgaatgtgaaaacaatcctgatatctgtgatggcggccagtgtaccaacattcctggagagtatcgctgcctctgctatgatggcttcatggcttccatggacatgaaaacatgcattgatgtcaatgaatgtgacctaaattcaaatatctgcatgtttggggaatgtgagaacacaaagggatccttcatttgccactgtcagctgggttactcagtgaagaaggggaccacaggatgtacagatgtggatgagtgtgaaattggtgctcataactgcgacatgcatgcctcatgtctgaatatcccaggaagcttcaagtgtagctgcagagaaggctggattggaaacggcatcaagtgtattgatctggacgaatgttctaatggaacccaccagtgtagcatcaatgctcagtgtgtaaataccccgggctcataccgctgtgcctgctccgaaggtttcactggtgatggctttacctgctcagatgttgatgagtgtgcagaaaacataaacctctgtgagaacggacagtgccttaatgtcccgggtgcatatcgctgcgagtgtgagatgggcttcactccagcctcagacagcagatcctgccaaggtgggtcaccaggattccaactcattttcaagttggatcaaccacagtaaatgaaaccacaacaagggctggaacaagctccacctggaagcagaatacatagcacatgctgcactataaaagtcattcgtttaagcgtggattattttgccgaatgaataatgatgatggcggctttcatctcttatgaagttttcctggccaagagccagtagttggaagtttggatcattcttttttcttttttaaccatttcttctcttctttctcttttttatcactaaatgaatgacatgtggagaaactattcagcttttaaagtatgctccattacttgtctcaactaccactatttattgtgtttatcaaaatcataaaaagctcatttttggcattt

SEQ ID NO: 7280 - DNA, 742 bp, Homo sapiens
  source 1..742: mol_type = unassigned DNA; mol_type = unassigned DNA
acagatggaagtttccagtgcatttgcaatgccggctttgaattaactacagatggaaaaaactgtgttgatcatgatgaatgtacaactaccaacatgtgtttgaatggaatgtgcatcaatgaagatggcagcttcaagtgcatctgcaaaccaggatttgtcttggctccaaatgggcgttactgtactgatgttgatgaatgccagaccccaggaatctgcatgaatgggcactgcatcaacagtgaagggtccttccgctgtgactgtcccccaggcctggctgtgggcatggatggacgtgtgtgtgttgatactcacatgcgcagtacctgctatggaggaatcaagaaaggagtgtgtgtgcgtcctttccccggtgcagtgaccaagtccgaatgctgctgtgccaatccagactatggttttggagaaccctgccagccatgccctgcaaaaaattcagctgaattccacggcctttgtagtagtggagtaggtatcactgtggatggaagagtacagcctttccagcagagccagcctctattggaaactacttgatcattcatacaagcacatcagtgcacaagttccactgcccctcggtgatatagtagtagtagtcatgttcacggctcgttataaaacgtcatgttctgaagcatccatgtttaaagtgtcctctccagtaatttcaagtatcagcaatgagaaacacttattaaatattagtaac

SEQ ID NO: 7281 - DNA, 1947 bp, Homo sapiens
  source 1..1947: mol_type = unassigned DNA; mol_type = unassigned DNA
gcctcccgccctctctcttgctggccgcacgccccggccccgcgcacctccgcccggctccgcagccgctacccgcgcttcgttgccctgtgggactccgagcgagcccggagggaaccctcctcttcttctgggggcgacttttgtttgcttgcctgtttctttctggtgacttttgcagctttccaatatccgtcttcggagcgcacgggaatccgccgagctctgcgtgcaggcccttttttcttttgaggttcacattttttgaaattttacgccagggcttttgtaatttcctcccccgcccgctgacggtcctggagtcgctcggggctttaggccggttatgcaacgtgtaccgctcggggctgccggctgcacctccgccgcgcctcgccgctcactgcgctagacccggcgccccgcgtctcgcttcgcgggcagtcagggggccggcgctctgtcgaggtctccagctagagcagggagcccgagcccgagggagtccccggagccgacgaagggcttattagaccctgactcttttctgaggcgcgcagattttgtctttgatcactccctctccgcgggtctacggccgcgcgctttcggcgccggcgatggggagaagacggaggctgtgtctccagctctacttcctgtggctgggctgtgtggtgctctgggcgcagggcacggccggccagcctcagcctcctccgcccaagccgccccggccccagccgccgccgcaacaggttcggtccgctacagcaggctctgaaggcgggtttctagcgcccgagtatcgcgaggagggtgccgcagtggccagccgcgtccgccggcgaggacagcaggacgtgctccgagggcccaacgtgtgcggctccagattccactcctactgctgccctggatggaagacgctccctggaggaaaccagtgcattgtcccgatttgtagaaatagttgtggagatggattttgttcccgtcctaacatgtgtacttgttccagtgggcaaatatcatcaacctgtggatcaaaatcaattcagcagtgcagtgtgagatgcatgaatggtgggacctgtgcagatgaccactgccagtgccagaaaggatatattggaacttattgtggacaacctgtctgtgaaaatggatgtcagaatggtggacgttgcatcggacccaaccgctgtgcttgtgtttatgggttcactggtccacagtgtgaaagagattacaggacaggcccgtgtttcactcaggtcaacaaccagatgtgccaagggcagctgacaggcattgtctgcacgaagactctgtgctgtgccaccattggacgggcgtggggccatccctgtgagatgtgtccagcccagcctcagccctgccgacggggtttcatccccaacatccgcactggagcttgccaagatgttgatgaatgccaggctatcccagggatatgccaaggaggaaactgtatcaatacagtgggctcttttgaatgcagatgccctgctggtcacaaacagagtgaaactactcagaaatgtgaagtccatgtggataaagcacaagcaggagccagatgtccttgcgtgatcctcccttccagactataccttcgttaacattccttgagctagttattctttcctggcttacatgggaggcagaaaaagaacatcattgtattggaaagtttcccttaaatggctctttatgtggcagatagttgtttgcaatttagtttgaagagttttcagctttgttccattaacacagcattttgttgtttgagacttgtgacaacaaatatatttatttaggctcatgaaactcataaaagttgttggcacagtctcctctgctgctgttccaactctgcttagataaaccatggaaaataaactttctgtactaaactgaaaa

SEQ ID NO: 7282 - DNA, 1977 bp, Homo sapiens
  source 1..1977: mol_type = unassigned DNA; mol_type = unassigned DNA
gcctcccgccctctctcttgctggccgcacgccccggccccgcgcacctccgcccggctccgcagccgctacccgcgcttcgttgccctgtgggactccgagcgagcccggagggaaccctcctcttcttctgggggcgacttttgtttgcttgcctgtttctttctggtgacttttgcagctttccaatatccgtcttcggagcgcacgggaatccgccgagctctgcgtgcaggcccttttttcttttgaggttcacattttttgaaattttacgccagggcttttgtaatttcctcccccgcccgctgacggtcctggagtcgctcggggctttaggccggttatgcaacgtgtaccgctcggggctgccggctgcacctccgccgcgcctcgccgctcactgcgctagacccggcgccccgcgtctcgcttcgcgggcagtcagggggccggcgctctgtcgaggtctccagctagagcagggagcccgagcccgagggagtccccggagccgacgaagggcttattagaccctgactcttttctgaggcgcgcagattttgtctttgatcactccctctccgcgggtctacggccgcgcgctttcggcgccggcgatggggagaagacggaggctgtgtctccagctctacttcctgtggctgggctgtgtggtgctctgggcgcagggcacggccggccagcctcagcctcctccgcccaagccgccccggccccagccgccgccgcaacaggttcggtccgctacagcaggctctgaaggcgggtttctagcgcccgagtatcgcgaggagggtgccgcagtggccagccgcgtccgccggcgaggacagcaggacgtgctccgagggcccaacgtgtgcggctccagattccactcctactgctgccctggatggaagacgctccctggaggaaaccagtgcattgtcccgatttgtagaaatagttgtggagatggattttgttcccgtcctaacatgtgtacttgttccagtgggcaaatatcatcaacctgtggatcaaaatcaattcagcagtgcagtgtgagatgcatgaatggtgggacctgtgcagatgaccactgccagtgccagaaaggatatattggaacttattgtggacaacctgtctgtgaaaatggatgtcagaatggtggacgttgcatcggacccaaccgctgtgcttgtgtttatgggttcactggtccacagtgtgaaagagattacaggacaggcccgtgtttcactcaggtcaacaaccagatgtgccaagggcagctgacaggcattgtctgcacgaagactctgtgctgtgccaccattggacgggcgtggggccatccctgtgagatgtgtccagcccagcctcagccctgccgacggggtttcatccccaacatccgcactggagcttgccaagatgttgatgaatgccaggctatcccagggatatgccaaggaggaaactgtatcaatacagtgggctcttttgaatgcagatgccctgctggtcacaaacagagtgaaactactcagaaatgtgaaggtgagtctctctactttgggaagcatgcctaattgtgactttaatgcaagaaaaacaggacttcatttgaaattttgaagactactggtcacaattaaaactctttatctactatgaaagcataggtttaagcctagagtagttctgtgtttgtgtattgtagccttagtgggtttgatttgaaaagagtcaatgagcatttgcatctagtttgttatctcagttgtgttgcattgagaatgggagtaatccagccatttatgtttcttcttaataaagtaggtttccatttcacttataaagttatatcaaaaacgaaaattgagatagaaataagaagtccaagtgaaatacagtatcatgtgtaaatgatgtgttagtagttggcaccgtgtcatatattat

SEQ ID NO: 7283 - DNA, 10724 bp, Homo sapiens
  source 1..10724: mol_type = unassigned DNA; mol_type = unassigned DNA
ctttccaatatccgtcttcggagcgcacgggaatccgccgagctctgcgtgcaggcccttttttcttttgaggttcacattttttgaaattttacgccagggcttttgtaatttcctcccccgcccgctgacggtcctggagtcgctcggggctttaggccggttatgcaacgtgtaccgctcggggctgccggctgcacctccgccgcgcctcgccgctcactgcgctagacccggcgccccgcgtctcgcttcgcgggcagtcagggggccggcgctctgtcgaggtctccagctagagcagggagcccgagcccgagggagtccccggagccgacgaagggcttattagaccctgactcttttctgaggcgcgcagattttgtctttgatcactccctctccgcgggtctacggccgcgcgctttcggcgccggcgatggggagaagacggaggctgtgtctccagctctacttcctgtggctgggctgtgtggtgctctgggcgcagggcacggccggccagcctcagcctcctccgcccaagccgccccggccccagccgccgccgcaacaggttcggtccgctacagcaggctctgaaggcgggtttctagcgcccgagtatcgcgaggagggtgccgcagtggccagccgcgtccgccggcgaggacagcaggacgtgctccgagggcccaacgtgtgcggctccagattccactcctactgctgccctggatggaagacgctccctggaggaaaccagtgcattgtcccgatttgtagaaatagttgtggagatggattttgttcccgtcctaacatgtgtacttgttccagtgggcaaatatcatcaacctgtggatcaaaatcaattcagcagtgcagtgtgagatgcatgaatggtgggacctgtgcagatgaccactgccagtgccagaaaggatatattggaacttattgtggacaacctgtctgtgaaaatggatgtcagaatggtggacgttgcatcggacccaaccgctgtgcttgtgtttatgggttcactggtccacagtgtgaaagagattacaggacaggcccgtgtttcactcaggtcaacaaccagatgtgccaagggcagctgacaggcattgtctgcacgaagactctgtgctgtgccaccattggacgggcgtggggccatccctgtgagatgtgtccagcccagcctcagccctgccgacggggtttcatccccaacatccgcactggagcttgccaagatgttgatgaatgccaggctatcccagggatatgccaaggaggaaactgtatcaatacagtgggctcttttgaatgcagatgccctgctggtcacaaacagagtgaaactactcagaaatgtgaagacattgatgagtgcagcatcattcctgggatatgtgaaactggtgaatgttccaacaccgtgggaagctatttttgtgtttgtccacgtggatatgtaacctcaacagatggctctcgatgcatcgatcagagaacaggcatgtgtttctcgggcctggtgaatggccgctgtgcacaagagctcccggggagaatgacgaaaatgcagtgctgctgtgagcctggccgctgctggggcatcggaaccattcctgaagcctgtcctgtcagaggttctgaggaatatcgcagactttgcatggatggacttccaatgggaggaattccagggagtgctggttccagacctggaggcactgggggaaatggctttgccccaagtggcaatggcaatggctatggcccaggagggacaggcttcatccccatccctggaggcaatggcttttctcctggcgttgggggagccggtgtgggggccgggggacagggacctatcatcactggactaacaattctgaaccagacaatagatatctgtaagcatcatgctaacctttgtttaaatggacgctgtataccaactgtctcaagctaccgatgtgaatgcaacatgggttataagcaggatgcaaatggagattgtatagatgttgatgaatgcacatcaaatccctgcactaatggagattgtgttaacacacctggttcctattattgtaaatgtcatgctggattccagaggactcctaccaagcaagcatgcattgatattgatgagtgcatccagaatggggttctttgtaaaaacggtcgatgcgtgaacacagatggaagtttccagtgcatttgcaatgccggctttgaattaactacagatggaaaaaactgtgttgatcatgatgaatgtacaactaccaacatgtgtttgaatggaatgtgcatcaatgaagatggcagcttcaagtgcatctgcaaaccaggatttgtcttggctccaaatgggcgttactgtactgatgttgatgaatgccagaccccaggaatctgcatgaatgggcactgcatcaacagtgaagggtccttccgctgtgactgtcccccaggcctggctgtgggcatggatggacgtgtgtgtgttgatactcacatgcgcagtacctgctatggaggaatcaagaaaggagtgtgtgtgcgtcctttccccggtgcagtgaccaagtccgaatgctgctgtgccaatccagactatggttttggagaaccctgccagccatgccctgcaaaaaattcagctgaattccacggcctttgtagtagtggagtaggtatcactgtggatggaagagatatcaatgaatgtgctttggatcctgatatatgtgccaatgggatttgtgaaaacttacgtggtagttaccgttgtaattgcaacagtggctatgaaccagatgcctctggaagaaactgtattgacattgatgaatgtttagtaaacagactgctttgtgataacggattgtgccgaaacacgccaggaagttacagctgtacgtgcccaccagggtatgtgttcaggactgagacagagacctgtgaagatataaatgaatgtgaaagcaacccatgtgtcaatggggcctgcagaaacaaccttggatctttcaattgtgaatgttcgcccggcagcaaactcagctccacaggattgatctgtattgacagcctgaaggggacctgttggctcaacatccaggacagccgctgtgaggtgaatattaatggagccactctgaaatctgaatgctgtgccaccctcggagccgcctgggggagcccctgtgagcggtgtgaactagatacagcttgcccaagagggcttgccaggattaaaggtgttacgtgtgaagatgttaatgagtgtgaggtgttccctggcgtttgtccaaatggacgctgtgtcaacagtaagggatcttttcattgcgagtgccctgaaggccttacgttggatgggactggccgtgtatgtttggatattcgcatggagcagtgttacttgaagtgggatgaagatgaatgcatccaccccgttcctggaaagttccgcatggatgcctgctgctgtgctgtcggggcggcttggggcaccgagtgtgaggagtgccccaaacctggcaccaaggaatacgagacgctgtgcccccgcggggctggctttgctaaccgaggggatgttcttactgggcggccattttacaaagacatcaatgaatgcaaagcatttcctgggatgtgcacttatgggaagtgcagaaatacaatcggaagcttcaaatgccgttgcaatagtggctttgctctagacatggaggaaagaaactgcacggacatcgacgagtgcaggatttctcctgacctctgtggcagtggaatctgcgtcaatacaccgggcagctttgagtgcgagtgcttcgaaggctatgaaagtggcttcatgatgatgaagaactgcatggacattgacgaatgtgaacgtaaccctctcctttgtaggggtggcacctgtgtgaacactgagggcagctttcagtgtgactgcccactgggacacgagctgtcaccatcccgtgaggactgtgtggatattaatgaatgctccctgagtgacaatctctgcagaaatggaaaatgtgtgaacatgattggaacctatcagtgctcttgcaatcctggatatcaggctacgccagaccgccagggctgtacagatattgatgaatgtatgataatgaacggaggctgtgacacccagtgcacaaattcagagggaagctacgaatgcagctgcagtgagggttatgccctgatgccagatgggagatcgtgtgcagacattgatgaatgtgaaaacaatcctgatatctgtgatggcggccagtgtaccaacattcctggagagtatcgctgcctctgctatgatggcttcatggcttccatggacatgaaaacatgcattgatgtcaatgaatgtgacctaaattcaaatatctgcatgtttggggaatgtgagaacacaaagggatccttcatttgccactgtcagctgggttactcagtgaagaaggggaccacaggatgtacagatgtggatgagtgtgaaattggtgctcataactgcgacatgcatgcctcatgtctgaatatcccaggaagcttcaagtgtagctgcagagaaggctggattggaaacggcatcaagtgtattgatctggacgaatgttctaatggaacccaccagtgtagcatcaatgctcagtgtgtaaataccccgggctcataccgctgtgcctgctccgaaggtttcactggtgatggctttacctgctcagatgttgatgagtgtgcagaaaacataaacctctgtgagaacggacagtgccttaatgtcccgggtgcatatcgctgcgagtgtgagatgggcttcactccagcctcagacagcagatcctgccaagatattgatgaatgctccttccaaaacatttgtgtctttggaacatgtaataacctgcctggaatgtttcattgcatctgcgatgatggttatgaattggacagaacaggagggaactgtacagatattgatgagtgtgcagatcctataaactgtgtcaatggcctatgtgtcaacacgcctggtcgctatgagtgtaactgcccacccgattttcagttgaacccaactggtgtgggttgtgttgacaaccgtgtgggcaactgctacctgaagtttggacctcgaggagatgggagtctgtcttgcaacaccgagatcggggtgggcgtcagtcgctcttcatgctgctgctctctgggaaaggcctggggaaacccctgtgagacatgcccccctgtcaatagcactgaatattacaccctgtgtcccggaggtgaaggcttcagacctaaccccatcacaatcattttagaagacattgacgaatgccaggagttaccaggtctctgccagggtggaaactgcatcaacacttttgggagcttccagtgtgagtgcccacaaggctactacctcagcgaggatacccgcatctgtgaagatattgatgagtgttttgcacatcctggtgtgtgtgggcctgggacctgctataacaccctgggaaattacacctgcatttgcccacctgagtacatgcaggtcaatggaggccacaactgcatggacatgagaaaaagcttttgctaccgaagctataatggaaccacttgtgagaatgagttgcctttcaatgtgacaaaaaggatgtgctgctgcacatataatgtgggcaaagcctggaacaaaccttgtgaaccatgcccaactccaggaacagctgactttaaaaccatatgtggaaatattcctggattcacctttgacattcacacaggaaaagctgttgacattgatgaatgtaaagagattccaggcatttgtgcaaatggtgtgtgcattaaccagattggcagtttccgctgtgaatgccctacaggattcagttacaatgacctgctgttggtttgtgaagatatagatgagtgcagcaatggtgataatctctgccagcggaatgcagactgcatcaatagtcctggtagttaccgctgtgaatgtgccgcgggtttcaaactttcacccaatggggcctgtgtagatcgcaatgaatgtttagaaattcctaacgtttgcagtcatggcttgtgtgttgatctgcaaggaagttaccagtgcatctgccacaatggctttaaggcttctcaggaccagaccatgtgcatggatgttgatgagtgcgagcggcatccatgtggaaatggaacttgtaaaaacaccgttggatcctataactgtctgtgctacccagggtttgaactcactcataataatgattgcctggacatagatgagtgcagttccttttttggtcaggtgtgcagaaatggacgttgttttaatgaaattggttctttcaagtgtctatgtaacgaaggttatgaacttaccccagatggcaaaaactgtatagacactaatgagtgtgtcgcccttcccggctcttgctctcctggtacctgtcagaatttggagggatccttcagatgcatctgtcccccagggtatgaagtaaaaagcgagaactgcattgatataaatgaatgtgatgaagatcccaacatttgtctttttggttcctgtactaatactccagggggcttccagtgcctctgcccccctggctttgtactatctgataatggacggagatgctttgatactcgccagagcttctgcttcacaaattttgaaaatggaaagtgttctgtacccaaagctttcaacaccacaaaagcaaaatgctgctgtagtaagatgccaggagagggctggggggacccctgtgagctgtgccccaaagacgatgaagttgcatttcaggatttgtgtccatatggccatggaactgtccctagtcttcatgatacacgtgaagatgtcaatgagtgtcttgagagcccaggcatttgttcaaatggtcaatgtatcaacaccgacggatcttttcgctgtgaatgtccaatgggctacaaccttgactacactggagtacgctgtgtggatactgatgagtgttcaatcggcaatccgtgtggaaatggtacatgcaccaatgttattgggagttttgaatgcaattgcaatgaaggctttgagccagggcccatgatgaattgtgaagatatcaacgaatgtgcccagaacccactgctgtgtgctttccgctgcatgaacacttttgggtcctatgaatgcacgtgcccgattggctatgccctcagggaagatcaaaagatgtgcaaagatctggatgaatgtgctgaagggttacacgactgtgaatctaggggcatgatgtgtaagaatctaatcggcaccttcatgtgcatctgccctcctggaatggcccgaaggcccgatggagaaggctgtgtagatgaaaatgaatgcaggaccaagccaggaatctgtgaaaatggacgttgtgttaacattattggaagctatagatgtgagtgtaatgaaggattccagtcaagttcttcaggcactgaatgccttgacaatcgacagggtctctgctttgcagaggtactgcagacaatatgtcaaatggcatccagtagtcgcaatctcgtcactaagtcagaatgctgctgtgatggtgggcgaggctggggccaccagtgcgagctttgcccacttcctggaactgcccagtacaaaaagatatgtcctcatggcccaggatatacaactgatggaagagatattgatgaatgtaaggtaatgccaaacctctgcaccaatggtcagtgcatcaataccatgggctcattccgatgcttctgcaaggttggctacaccacagacatcagtggaacctcttgtatagaccttgatgaatgctcccagtccccgaaaccatgcaactacatctgcaagaacactgaggggagttatcagtgttcatgtccgagggggtatgtcctgcaagaggatggaaagacatgcaaagaccttgatgaatgtcaaacaaagcagcataactgccagttcctctgtgtcaacaccctgggggggtttacctgtaaatgtccacctggtttcacacagcatcacactgcttgtatcgacaacaacgaatgtgggtctcaaccttcgctttgtggagcaaagggaatctgtcaaaacactccaggcagtttcagctgtgaatgccaaagagggttctctcttgatgccaccggactgaactgtgaagatgttgatgaatgtgatgggaaccacaggtgccaacacggctgccagaacatcctgggtggctacagatgtggctgcccccaaggctacatccagcactaccagtggaatcagtgtgtcgatgagaatgaatgctccaatcccaatgcctgtggctctgcttcctgctacaacaccctggggagttacaagtgcgcctgcccctcggggttctccttcgaccagttctccagtgcctgccacgacgtgaatgagtgctcgtcctccaagaacccctgcaattacggctgctctaacacggaggggggctacctctgtggctgcccccctgggtattacagagtgggacaaggccactgtgtctcaggaatgggatttaacaaggggcagtacctgtcactggatacagaggtcgatgaggaaaatgctctgtccccagaagcatgctacgagtgcaaaatcaacggctattctaagaaagacagcaggcagaagagaagtattcatgaacctgatcccactgctgttgaacagatcagcctagagagtgtcgacatggacagccccgtcaacatgaagttcaacctctcccacctcggctctaaggagcacatcctggaactaaggcccgccatccagcccctcaacaaccacatccgttatgtcatctctcaagggaacgatgacagcgtcttccgcatccaccaaaggaatgggctcagctacttgcacacggccaagaagaagctcatgcccggcacatacacactggaaatcactagcatccctctctacaagaagaaggagcttaagaaactggaagagagcaatgaggatgactacctcctaggggagcttggggaggctctcagaatgaggctgcagattcagctctattaacccttcacagacttgggcccaggctcaaatcctagcacagccagtctgcagaagcatttgaaaagtcaaggactaattttaaagaggaaaaataataataactcttgtttctttcctccctgtcttagactttgaatgttgaccctcacagggagggataatttagactctggtatggccaaagatttgagcacaaaggcaaccgtggttactgtattttttatataacttcattttaaaatatattaaaagaaacctaaatgttcaagatatcagcatatggcactaaatgcacaaaaataatgtgagctttttttttttttcctgttagcagtctgtaacactttgggtattttgctatagttgctaattaaaaaaatatagatgtttatttatttttaatgcagtaatatatggagaaatgaacaaactatgtaaacaaaaagggaaactcacttgtttttctttagatttataaatttgagctattttttttagaggtgctttttaaaaatccaatagatacaagagatgtttcctttggttttctgccagtcatccagctgatacacacctgatgattttaaagaaagccacacagagctgaatgggcagtgtaatcaataatttaaaaaacatgaatgtcattagatcctttataacgtagatcgaagccaaagcagctcatttgtgacaacatttcatatcaccagacacaccaggcaacagaagttgaagcacaaccactgtagcaaaataccttgactgcttgtgagaccattagcattgcaggccaaaccgtactgtatttccttctcataacctcaaggaaccatatgtgctacccacaacacctcattcttacccagggtgcgctgcgtcctcatggtactgtaggcagctgaagaaccgccgttcccttgaaagggaacacctggcattctgtggtgtttcgtgctgtcttaaataatggtgcatttattatgttcaagttatttcaggattgccatatgtgcaaacaaatcatgcaatgcagccaaggaatatatgttgttgttgttgttttaaacccattttttttttagaattttcattaatactgtagttatacaccatatgcctcattttatcatagcctattgtgtatgaaagatgtttgtacaatgaattgatgtttagtttgctttagtcatttaaaaagatattgtaccaggatgtgctattaagagcacgtatccattattcttctcaacccaagaacctgtttcctggaccagtgaccaaacctcatatgtgaaatggccaaagcacatgcaggctcctggttgttcctctcaaacctgtgctgaccaaagattagtaaccagttatacccagtattttgaggttttattgtttttttaataactaaaaagaaaaaaggaacagtgtaaatttgtaatcaagagtttgtgaggaaaaacttatggtttttggttttgtttgtttttgtaggtctgtgtatcaaatatgacacttttcttgcaataaagcttattttggggta

SEQ ID NO: 7284 - DNA, 10154 bp, Homo sapiens
  source 1..10154: mol_type = unassigned DNA; mol_type = unassigned DNA
atggggagaagacggaggctgtgtctccagctctacttcctgtggctgggctgtgtggtgctctgggcgcagggcacggccggccagcctcagcctcctccgcccaagccgccccggccccagccgccgccgcaacaggttcggtccgctacagcaggctctgaaggcgggtttctagcgcccgagtatcgcgaggagggtgccgcagtggccagccgcgtccgccggcgaggacagcaggacgtgctccgagggcccaacgtgtgcggctccagattccactcctactgctgccctggatggaagacgctccctggaggaaaccagtgcattgtcccgatttgtagaaatagttgtggagatggattttgttcccgtcctaacatgtgtacttgttccagtgggcaaatatcatcaacctgtggatcaaaatcaattcagcagtgcagtgtgagatgcatgaatggtgggacctgtgcagatgaccactgccagtgccagaaaggatatattggaacttattgtggacaacctgtctgtgaaaatggatgtcagaatggtggacgttgcatcacccaaccgtgtgcttgtgtttatgggttcactggtccacagtgtgaaagagattacaggacaggcccgtgtttcactcaggtcaacaaccagatgtgccaagggcagctgacaggcattgtctgcacgaagactctgtgctgtgccaccattggacgggcgtggggccatccctgtgagatgtgtccagcccagcctcagccctgccgacggggtttcatccccaacatccgcactggagcttgccaagatgttgatgaatgccaggctatcccagggatatgccaaggaggaaactgtatcaatacagtgggctcttttgaatgcagatgccctgctggtcacaaacagagtgaaactactcagaaatgtgaagacattgatgagtgcagcatcattcctgggatatgtgaaactggtgaatgttccaacaccgtgggaagctatttttgtgtttgtccacgtggatatgtaacctcaacagatggctctcgatgcatcgatcagagaacaggcatgtgtttctcgggcctggtgaatggccgctgtgcacaagagctcccggggagaatgacgaaaatgcagtgctgctgtgagcctggccgctgctggggcatcggaaccattcctgaagcctgtcctgtcagaggttctgaggaatatcgcagactttgcatggatggacttccaatgggaggaattccagggagtgctggttccagacctggaggcactgggggaaatggctttgccccaagtggcaatggcaatggctatggcccaggagggacaggcttcatccccatccctggaggcaatggcttttctcctggcgttgggggagccggtgtgggggccgggggacagggacctatcatcactggactaacaattctgaaccagacaatagatatctgtaagcatcatgctaacctttgtttaaatggacgctgtataccaactgtctcaagctaccgatgtgaatgcaacatgggttataagcaggatgcaaatggagattgtatagatgttgatgaatgcacatcaaatccctgcactaatggagattgtgttaacacacctggttcctattattgtaaatgtcatgctggattccagaggactcctaccaagcaagcatgcattgatattgatgagtgcatccagaatggggttctttgtaaaaacggtcgatgcgtgaacacagatggaagtttccagtgcatttgcaatgccggctttgaattaactacagatggaaaaaactgtgttgatcatgatgaatgtacaactaccaacatgtgtttgaatggaatgtgcatcaatgaagatggcagcttcaagtgcatctgcaaaccaggatttgtcttggctccaaatgggcgttactgtactgatgttgatgaatgccagaccccaggaatctgcatgaatgggcactgcatcaacagtgaagggtccttccgctgtgactgtcccccaggcctggctgtgggcatggatggacgtgtgtgtgttgatactcacatgcgcagtacctgctatggaggaatcaagaaaggagtgtgtgtgcgtcctttccccggtgcagtgaccaagtccgaatgctgctgtgccaatccagactatggttttggagaaccctgccagccatgccctgcaaaaaattcagctgaattccacggcctttgtagtagtggagtaggtatcactgtggatggaagagatatcaatgaatgtgctttggatcctgatatatgtgccaatgggatttgtgaaaacttacgtggtagttaccgttgtaattgcaacagtggctatgaaccagatgcctctggaagaaactgtattgacattgatgaatgtttagtaaacagactgctttgtgataacggattgtgccgaaacacgccaggaagttacagctgtacgtgcccaccagggtatgtgttcaggactgagacagagacctgtgaagatataaatgaatgtgaaagcaacccatgtgtcaatggggcctgcagaaacaaccttggatctttcaattgtgaatgttcgcccggcagcaaactcagctccacaggattgatctgtattgacagcctgaaggggacctgttggctcaacatccaggacagccgctgtgaggtgaatattaatggagccactctgaaatctgaatgctgtgccaccctcggagccgcctgggggagcccctgtgagcggtgtgaactagatacagcttgcccaagagggcttgccaggattaaaggtgttacgtgtgaagatgttaatgagtgtgaggtgttccctggcgtttgtccaaatggacgctgtgtcaacagtaagggatcttttcattgcgagtgccctgaaggccttacgttggatgggactggccgtgtatgtttggatattcgcatggagcagtgttacttgaagtgggatgaagatgaatgcatccaccccgttcctggaaagttccgcatggatgcctgctgctgtgctgtcggggcggcttggggcaccgagtgtgaggagtgccccaaacctggcaccaaggaatacgagacgctgtgcccccgcggggctggctttgctaaccgaggggatgttcttactgggcggccattttacaaagacatcaatgaatgcaaagcatttcctgggatgtgcacttatgggaagtgcagaaatacaatcggaagcttcaaatgccgttgcaatagtggctttgctctagacatggaggaaagaaactgcacggacatcgacgagtgcaggatttctcctgacctctgtggcagtggaatctgcgtcaatacaccgggcagctttgagtgcgagtgcttcgaaggctatgaaagtggcttcatgatgatgaagaactgcatggacattgacgaatgtgaacgtaaccctctcctttgtaggggtggcacctgtgtgaacactgagggcagctttcagtgtgactgcccactgggacacgagctgtcaccatcccgtgaggactgtgtggatattaatgaatgctccctgagtgacaatctctgcagaaatggaaaatgtgtgaacatgattggaacctatcagtgctcttgcaatcctggatatcaggctacgccagaccgccagggctgtacagatattgatgaatgtatgataatgaacggaggctgtgacacccagtgcacaaattcagagggaagctacgaatgcagctgcagtgagggttatgccctgatgccagatgggagatcgtgtgcagacattgatgaatgtgaaaacaatcctgatatctgtgatggcggccagtgtaccaacattcctggagagtatcgctgcctctgctatgatggcttcatggcttccatggacatgaaaacatgcattgatgtcaatgaatgtgacctaaattcaaatatctgcatgtttggggaatgtgagaacacaaagggatccttcatttgccactgtcagctgggttactcagtgaagaaggggaccacaggatgtacagatgtggatgagtgtgaaattggtgctcataactgcgacatgcatgcctcatgtctgaatatcccaggaagcttcaagtgtagctgcagagaaggctggattggaaacggcatcaagtgtattgatctggacgaatgttctaatggaacccaccagtgtagcatcaatgctcagtgtgtaaataccccgggctcataccgctgtgcctgctccgaaggtttcactggtgatggctttacctgctcagatgttgatgagtgtgcagaaaacataaacctctgtgagaacggacagtgccttaatgtcccgggtgcatatcgctgcgagtgtgagatgggcttcactccagcctcagacagcagatcctgccaagatattgatgaatgctccttccaaaacatttgtgtctttggaacatgtaataacctgcctggaatgtttcattgcatctgcgatgatggttatgaattggacagaacaggagggaactgtacagatattgatgagtgtgcagatcctataaactgtgtcaatggcctatgtgtcaacacgcctggtcgctatgagtgtaactgcccacccgattttcagttgaacccaactggtgtgggttgtgttgacaaccgtgtgggcaactgctacctgaagtttggacctcgaggagatgggagtctgtcttgcaacaccgagatcggggtgggcgtcagtcgctcttcatgctgctgctctctgggaaaggcctggggaaacccctgtgagacatgcccccctgtcaatagcactgaatattacaccctgtgtcccggaggtgaaggcttcagacctaaccccatcacaatcattttagaagacattgacgaatgccaggagttaccaggtctctgccagggtggaaactgcatcaacacttttgggagcttccagtgtgagtgcccacaaggctactacctcagcgaggatacccgcatctgtgaagatattgatgagtgttttgcacatcctggtgtgtgtgggcctgggacctgctataacaccctgggaaattacacctgcatttgcccacctgagtacatgcaggtcaatggaggccacaactgcatggacatgagaaaaagcttttgctaccgaagctataatggaaccacttgtgagaatgagttgcctttcaatgtgacaaaaaggatgtgctgctgcacatataatgtgggcaaagcctggaacaaaccttgtgaaccatgcccaactccaggaacagctgactttaaaaccatatgtggaaatattcctggattcacctttgacattcacacaggaaaagctgttgacattgatgaatgtaaagagattccaggcatttgtgcaaatggtgtgtgcattaaccagattggcagtttccgctgtgaatgccctacaggattcagttacaatgacctgctgttggtttgtgaagatatagatgagtgcagcaatggtgataatctctgccagcggaatgcagactgcatcaatagtcctggtagttaccgctgtgaatgtgccgcgggtttcaaactttcacccaatggggcctgtgtagatcgcaatgaatgtttagaaattcctaacgtttgcagtcatggcttgtgtgttgatctgcaaggaagttaccagtgcatctgccacaatggctttaaggcttctcaggaccagaccatgtgcatggatgttgatgagtgcgagcggcatccatgtggaaatggaacttgtaaaaacaccgttggatcctataactgtctgtgctacccagggtttgaactcactcataataatgattgcctggacatagatgagtgcagttccttttttggtcaggtgtgcagaaatggacgttgttttaatgaaattggttctttcaagtgtctatgtaacgaaggttatgaacttaccccagatggcaaaaactgtatagacactaatgagtgtgtcgcccttcccggctcttgctctcctggtacctgtcagaatttggagggatccttcagatgcatctgtcccccagggtatgaagtaaaaagcgagaactgcattgatataaatgaatgtgatgaagatcccaacatttgtctttttggttcctgtactaatactccagggggcttccagtgcctctgcccccctggctttgtactatctgataatggacggagatgctttgatactcgccagagcttctgcttcacaaattttgaaaatggaaagtgttctgtacccaaagctttcaacaccacaaaagcaaaatgctgctgtagtaagatgccaggagagggctggggggacccctgtgagctgtgccccaaagacgatgaagttgcatttcaggatttgtgtccatatggccatggaactgtccctagtcttcatgatacacgtgaagatgtcaatgagtgtcttgagagcccaggcatttgttcaaatggtcaatgtatcaacaccgacggatcttttcgctgtgaatgtccaatgggctacaaccttgactacactggagtacgctgtgtggatactgatgagtgttcaatcggcaatccgtgtggaaatggtacatgcaccaatgttattgggagttttgaatgcaattgcaatgaaggctttgagccagggcccatgatgaattgtgaagatatcaacgaatgtgcccagaacccactgctgtgtgctttccgctgcatgaacacttttgggtcctatgaatgcacgtgcccgattggctatgccctcagggaagatcaaaagatgtgcaaagatctggatgaatgtgctgaagggttacacgactgtgaatctaggggcatgatgtgtaagaatctaatcggcaccttcatgtgcatctgccctcctggaatggcccgaaggcccgatggagaaggctgtgtagatgaaaatgaatgcaggaccaagccaggaatctgtgaaaatggacgttgtgttaacattattggaagctatagatgtgagtgtaatgaaggattccagtcaagttcttcaggcactgaatgccttgacaatcgacagggtctctgctttgcagaggtactgcagacaatatgtcaaatggcatccagtagtcgcaatctcgtcactaagtcagaatgctgctgtgatggtgggcgaggctggggccaccagtgcgagctttgcccacttcctggaactgcccagtacaaaaagatatgtcctcatggcccaggatatacaactgatggaagagatattgatgaatgtaaggtaatgccaaacctctgcaccaatggtcagtgcatcaataccatgggctcattccgatgcttctgcaaggttggctacaccacagacatcagtggaacctcttgtatagaccttgatgaatgctcccagtccccgaaaccatgcaactacatctgcaagaacactgaggggagttatcagtgttcatgtccgagggggtatgtcctgcaagaggatggaaagacatgcaaagaccttgatgaatgtcaaacaaagcagcataactgccagttcctctgtgtcaacaccctgggggggtttacctgtaaatgtccacctggtttcacacagcatcacactgcttgtatcgacaacaacgaatgtgggtctcaaccttcgctttgtggagcaaagggaatctgtcaaaacactccaggcagtttcagctgtgaatgccaaagagggttctctcttgatgccaccggactgaactgtgaagatgttgatgaatgtgatgggaaccacaggtgccaacacggctgccagaacatcctgggtggctacagatgtggctgcccccaaggctacatccagcactaccagtggaatcagtgtgtcgatgagaatgaatgctccaatcccaatgcctgtggctctgcttcctgctacaacaccctggggagttacaagtgcgcctgcccctcggggttctccttcgaccagttctccagtgcctgccacgacgtgaatgagtgctcgtcctccaagaacccctgcaattacggctgctctaacacggaggggggctacctctgtggctgcccccctgggtattacagagtgggacaaggccactgtgtctcaggaatgggatttaacaaggggcagtacctgtcactggatacagaggtcgatgaggaaaatgctctgtccccagaagcatgctacgagtgcaaaatcaacggctattctaagaaagacagcaggcagaagagaagtattcatgaacctgatcccactgctgttgaacagatcagcctagagagtgtcgacatggacagccccgtcaacatgaagttcaacctctcccacctcggctctaaggagcacatcctggaactaaggcccgccatccagcccctcaacaaccacatccgttatgtcatctctcaagggaacgatgacagcgtcttccgcatccaccaaaggaatgggctcagctacttgcacacggccaagaagaagctcatgcccggcacatacacactggaaatcactagcatccctctctacaagaagaaggagcttaagaaactggaagagagcaatgaggatgactacctcctaggggagcttggggaggctctcagaatgaggctgcagattcagctctattaacccttcacagacttgggcccaggctcaaatcctagcacagccagtctgcagaagcatttgaaaagtcaaggactaattttaaagaggaaaaataataataactcttgtttctttcctccctgtcttagactttgaatgttgaccctcacagggagggataatttagactctggtatggccaaagatttgagcacaaaggcaaccgtggttactgtattttttatataacttcattttaaaatatattaaaagaaacctaaatgttcaagatatcagcatatggcactaaatgcacaaaaataatgtgagctttttttttttttcctgttagcagtctgtaacactttgggtattttgctatagttgctaattaaaaaaatatagatgtttatttatttttaatgcagtaatatatggagaaatgaacaaactatgtaaacaaaaagggaaactcacttgtttttctttagatttataaatttgagctattttttttagaggtgctttttaaaaatccaatagatacaagagatgtttcctttggttttctgccagtcatccagctgatacacacctgatgattttaaagaaagccacacagagctgaatgggcagtgtaatcaataatttaaaaaacatgaatgtcattagatcctttataacgtagatcgaagccaaagcagctcatttgtgacaacatttcatatcaccagacacaccaggcaacagaagttgaagcacaaccactgtagcaaaataccttgactgcttgtgagaccattagcattgcaggccaaaccgtactgtatttccttctcataacctcaaggaaccatatgtgctacccacaacacctcattcttacccagggtgcgctgcgtcctcatggtactgtaggcagctgaagaaccgccgttcccttgaaagggaacacctggcattctgtggtgtttcgtgctgtcttaaataatggtgcatttattatgttcaagttatttcaggattgccatatgtgcaaacaaatcatgcaatgcagccaaggaatatatgttgttgttgttgttttaaacccattttttttttagaattttcattaatactgtagttatacaccatatgcctcattttatcatagcctattgtgtatgaaagatgtttgtacaatgaattgatgtttagtttgctttagtcatttaaaaagatattgtaccaggatgtgctattaagagcacgtatccattattcttctcaacccaagaacctgtttcctggaccagtgaccaaacctcatatgtgaaatggccaaagcacatgcaggctcctggttgttcctctcaaacctgtgctgaccaaagattagtaaccagttatacccagtattttgaggttttattgtttttttaataactaaaaagaaa

SEQ ID NO: 7285 - DNA, 589 bp, Homo sapiens
  source 1..589: mol_type = unassigned DNA; mol_type = unassigned DNA
ttgggcggctgcggtctgcgcggacccccgtgcctaggcgctcctgtgcctccagtgcgcggagccggcctcgctcgggcgtgttcctgcgccgaccggacggccggactccagcaccttggcccggcccgcgaacgctgagcacgcgcggaaaccctttaaaggaagtgaaatcaaatggaggttggtgagtaccccacggcaaccattgcttcgtttcatggttcagagtgaactctaatctggaagccttccttaggtcattcctgcttctgggatccaactctatgttgtgcttaagaaatgtgtcacatcagacagagtgaatcacaagacagagatatttacctatcacataaatattttattagatttcaagatgaccatatatacttggacgtatctggacttcaaatttgctggaacttaattgcgtcccaagctggctaatacctagagattcatcatttctgtttggaggaatgaagaggaacagtttatctgttgagaataaaattgtccagttgtcaggagcagcgaaacagccaaaagttgggttctactcttctctcaaccagactcatacaca

SEQ ID NO: 7286 - DNA, 2693 bp, Homo sapiens
  source 1..2693: mol_type = unassigned DNA; mol_type = unassigned DNA
tgggcggctgcggtctgcgcggacccccgtgcctaggcgctcctgtgcctccagtgcgcggagccggcctcgctcgggcgtgttcctgcgccgaccggacggccggactccagcaccttggcccggcccgcgaacgctgagcacgcgcggaaaccctttaaagataggaagtgaaatcaaatggaggttggtgagtaccccacggcaaccattgcttcgtttcatggttcagagtgaactctaatctggaagccttccttaggtcattcctgcttctgggatccaactctatgttgtgcttaagaaatgtgtcacatcagacagagtgaatcacaagacagagatatttacctatcacataaatattttattagatttcaagatgaccatatatacttggacgtatctggacttcaaatttgctggaacttaattgcgtcccaagctggctaatacctagagattcatcatttctgtttggaggaatgaagaggaacagtttatctgttgagaataaaattgtccagttgtcaggagcagcgaaacagccaaaagttgggttctactcttctctcaaccagactcatacacacacggttcttctagactgggggagtttgcctcaccatgtagtattacaaatttttcagtaacttcctttactagatcgggcctgtgcatcttctgtatgtaggaggtggaatgaagtttttcatatttctgacctttggagaaagtttgaatttgaactgaaccagtcagctacttcatcttttaagtccactcatcctgatctcattcagcagatcattaaaaagcattttgctcatcttcagtatgtcagctttaaggttgacagtagcgctgagtcagcagaagctgcctgtgatatactctctcagctggtaaattgttccatccagaccttgggcttgatttcaacagccaagccaagtttcatgaatgtgtcggaggaattctttgtgtagctgaccgttgtcaaggccttagagaactggcgttgaattattacatcctaactgatgaacttttccttgcactctcaagcgagactcatgttaaccttgaacatcttcgaattgatgttgtgagtgaaaatcctggacagattaaatttcatgctgttaaaaaacacagttgggatgcacttattaaacattcccctagagttaatgttgttatgcacttctttctatatgaagaggaattcgagacgttcttcaaagaagaaacccctgttactcacctttattttggtcgttcagtcagcaaagtggttttaggacgggtaggtctcaactgtcctcgactgattgagttagtggtgtgtgctaatgatcttcagcctcttgataatgaacttatttgtattgctgaacactgtacaaacctaacagccttgggcctcagcaaatgtgaagttagctgcagtgccttcatcaggtttgtaagactgtgtgagagaaggttaacacagctctctgtaatggaggaagttttgatccctgatgaggattatagcctagatgaaattcacactgaagtctccaaatacctgggaagagtatggttccctgatgtgatgcctctctggtaatgggctgccaaagattctgaaattgttgttgttgtttttttaatcagtatgattagctgctttctatctaagcaaatgtaaattttaaaatgtgttgctgctgtattttaggtcaaatatttgattgtttgcaaactgtcgtgatggattgctgcagaaacatttggaaaaaaataagaaatttgaaaagcaagaaattgctgtaaatagggcacaagccctgtatatggattagatggtcgatatgccaaaaactacagatggtttctaagtagatttctcacctttccttggaggcatattgtagcttgctaagtaagtgtgtaatattgaacttggattctgtaaagttatgtcatttgctttattacattgttttatttgattctattttatcttggtattaatatattttataaaatataaaatattttaaagcttatttaactataacatttttagcaccctatgagatcatcttgtgattcagtaaaaaacttctaatttccaaagtacttcagattctactttattatattgagagataatggacattcgattaaaatttaaaaatactaattcatttcataatgatactgaggtgaaaagacaagagatagtcattctgattgttagttggtagactatttgaataaagcagtaaatgttgcaggatgtgtttgggagggaatcagcatttgctgcctcctgctatggatctggaactgtgccagatcctttgtataagtgatcttagaatttaattagcaacacagttagaactccttagtggctgcttattgtcttgagggtgaagatctagccttaaaataacccacaaggtcctgcaaggtctggtccctccctgcttcttttgcctcatttcccatcaagctgccccttgcccttcagttcccatttcctctcagttccttagaactgtcctgcaccctctagtcacaaggaattcactcgtatctctctttgcctggcttactctctgtgctcctcagatctttcctctagctgtatgtccttgatcatggaagccttcctggacacccagcccattccc

SEQ ID NO: 7287 - DNA, 611 bp, Homo sapiens
  source 1..611: mol_type = unassigned DNA; mol_type = unassigned DNA
gcggacccccgtgcctaggcgctcctgtgcctccagtgcgcggagccggcctcgctcgggcgtgttcctgcgccgaccggacggccggactccagcaccttggcccggcccgcgaacgctgagcacgcgcggaaaccctttaaagataggaagtgaaatcaaatggaggttggtgagtaccccacggcaaccattgcttcgtttcatggttcagagtgaactctaatctggaagccttccttaggtcattcctgcttctgggatccaactctatgttgtgcttaagaaatgtgtcacatcagacagagtgaatcacaagacagagatatttacctatcacataaatattttattagatttcaagaatgaagaggaacagtttatctgttgagaataaaattgtccagttgtcaggagcagcgaaacagccaaaagttgggttctactcttctctcaaccagactcatacacacacggttcttctagactgggggagtttgcctcaccatgtagtattacaaatttttcagtaacttcctttactagatcgggcctgtgcatcttctgtatgtaggaggtggaatgaagtttttcatatttctgacctttgg

SEQ ID NO: 7288 - DNA, 768 bp, Homo sapiens
  source 1..768: mol_type = unassigned DNA; mol_type = unassigned DNA
ctgcgccgaccggacggccggactccagcaccttggcccggcccgcgaacgctgagcacgcgcggaaaccctttaaagataggaagtgaaatcaaatggaggttggaggtggaatgaagtttttcatatttctgacctttggagaaagtttgaatttgaactgaaccagtcagctacttcatcttttaagtccactcatcctgatctcattcagcagatcattaaaaagcattttgctcatcttcagtatgtcagctttaaggttgacagtagcgctgagtcagcagaagctgcctgtgatatactctctcagctggtaaattgttccatccagaccttgggcttgatttcaacagccaagccaagtttcatgaatgtgtcggagtctcattttgtgtcagcacttacagttgtttttatcaactcaaaatcattatcatcaatcaaaattgaagatacaccagtggatgatccttcattgaagattcttgtggccaataatagtgacactctaagactcccaaagatgagtagctgtcctcatgtttcatctgatgatgggttacattttttaaagctagaatgatatgatatttttattacaataactataaagatgcaatttccttttgaaaattatatacctatgaagcataaattatttaagttttttcaaaagatttcttaatctgcaaggtaggtatagttatagtaagtttctcctgagatattttaattttacatatatacatatgcttttcattatat

SEQ ID NO: 7289 - DNA, 1742 bp, Homo sapiens
  source 1..1742: mol_type = unassigned DNA; mol_type = unassigned DNA
ctgcgccgaccggacggccggactccagcaccttggcccggcccgcgaacgctgagcacgcgcggaaaccctttaaagataggaagtgaaatcaaatggaggttggaggtggaatgaagtttttcatatttctgacctttggagaaagtttgaatttgaactgaaccagtcagctacttcatcttttaagtccactcatcctgatctcattcagcagatcattaaaaagcattttgctcatcttcagtatgtcagctttaaggttgacagtagcgctgagtcagcagaagctgcctgtgatatactctctcagctggtaaattgttccatccagaccttgggcttgatttcaacagccaagccaagtttcatgaatgtgtcggagtctcattttgtgtcagcacttacagttgtttttatcaactcaaaatcattatcatcaatcaaaattgaagatacaccagtggatgatccttcattgaagattcttgtggccaataatagtgacactctaagactcccaaagatgagtagctgtcctcatgtttcatctgatgatgggttacattttttaaagctagaatgatatgatatttttattacaataactataaagatgcaatttccttttgaaaattatatacctatgaagcataaattatttaagttttttcaaaagatttcttaatctgcaaggtaggtatagttatagtaagtttctcctgagatattttaattttacatatatacatatgcttttcattatatacataatacctcctggcagccatgctctcagaagttgttattagatagctattttcacaaataatgaataattaatattaaatttaaatttacaaaatattatattaggatcagtatgattctttgttcttgagaatttttcccaacttcccacaggaattctttgtgtagctgaccgttgtcaaggccttagagaactggcgttgaattattacatcctaactgatgaacttttccttgcactctcaagcgagactcatgttaaccttgaacatcttcgaattgatgttgtcaaatatttgattgtttgcaaactgtcgtgatggattgctgcagaaacatttggaaaaaaataagaaatttgaaaagcaagaaattgctgtaaatagggcacaagccctgtatatggattagatggtcgatatgccaaaaactacagatggtttctaagtagatttctcacctttccttggaggcatattgtagcttgctaagttttatcattttgaaagaagtacaaaatctctacgtatggaacctgcattaaataaatgagcatcaacatctccaggaggcaccccaggtgtagactccacctctcttacctcttccagatattcgaacaccattattgatagcattcttgttttgataaggtttctcctggcccacaatcattccagtgaatggtgcgtacacagtagatccagcagagcacaagatgtccacaccctggtgaggcctctgacttctaggatgtaaataagaacgaacagactgaggaactgccttaggggagctttactgcctgggaacatggtgttagcccactgtttgcagacgaggtaccaaagcttgaagctgccagaacatgttgggatgtcccaggatgcctcactctgtttagcccaattttaacctccctccccgcaggtgctaataaccatatcataaagatgaaagcatttaaaatg

SEQ ID NO: 7290 - DNA, 1305 bp, Homo sapiens
  source 1..1305: mol_type = unassigned DNA; mol_type = unassigned DNA
atgaagaggaacagtttatctgttgagaataaaattgtccagttgtcaggagcagcgaaacagccaaaagttgggttctactcttctctcaaccagactcatacacacacggttcttctagactgggggagtttgcctcaccatgtagtattacaaatttttcagtaacttcctttactagatcgggcctgtgcatcttctgtatgtaggaggtggaatgaagtttttcatatttctgacctttggagaaagtttgaatttgaactgaaccagtcagctacttcatcttttaagtccactcatcctgatctcattcagcagatcattaaaaagcattttgctcatcttcagtatgtcagctttaaggttgacagtagcgctgagtcagcagaagctgcctgtgatatactctctcagctggtaaattgttccatccagaccttgggcttgatttcaacagccaagccaagtttcatgaatgtgtcggagtctcattttgtgtcagcacttacagttgtttttatcaactcaaaatcattatcatcaatcaaaattgaagatacaccagtggatgatccttcattgaagattcttgtggccaataatagtgacactctaagactcccaaagatgagtagctgtcctcatgtttcatctgatggaattctttgtgtagctgaccgttgtcaaggccttagagaactggcgttgaattattacatcctaactgatgaacttttccttgcactctcaagcgagactcatgttaaccttgaacatcttcgaattgatgttgtgagtgaaaatcctggacagattaaatttcatgctgttaaaaaacacagttgggatgcacttattaaacattcccctagagttaatgttgttatgcacttctttctatatgaagaggaattcgagacgttcttcaaagaagaaacccctgttactcacctttattttggtcgttcagtcagcaaagtggttttaggacgggtaggtctcaactgtcctcgactgattgagttagtggtgtgtgctaatgatcttcagcctcttgataatgaacttatttgtattgctgaacactgtacaaacctaacagccttgggcctcagcaaatgtgaagttagctgcagtgccttcatcaggtttgtaagactgtgtgagagaaggttaacacagctctctgtaatggaggaagttttgatccctgatgaggattatagcctagatgaaattcacactgaagtctccaaatacctgggaagagtatggttccctgatgtgatgcctctctggtaa

SEQ ID NO: 7291 - DNA, 1479 bp, Homo sapiens
  source 1..1479: mol_type = unassigned DNA; mol_type = unassigned DNA
tgtatgtaggaggtggaatgaagtttttcatatttctgacctttggagaaagtttgaatttgaactgaaccagtcagctacttcatcttttaagtccactcatcctgatctcattcagcagatcattaaaaagcattttgctcatcttcagtatgtcagctttaaggttgacagtagcgctgagtcagcagaagctgcctgtgatatactctctcagctggtaaattgttccatccagaccttgggcttgatttcaacagccaagccaagtttcatgaatgtgtcggagtctcattttgtgtcagcacttacagttgtttttatcaactcaaaatcattatcatcaatcaaaattgaagatacaccagtggatgatccttcattgaagattcttgtggccaataatagtgacactctaagactcccaaagatgagtagctgtcctcatgtttcatctgatgatgggttacattttttaaagctagaatgatatgatatttttattacaataactataaagatgcaatttccttttgaaaattatatacctatgaagcataaattatttaagttttttcaaaagatttcttaatctgcaaggtaggtatagttatagtaagtttctcctgagatattttaattttacatatatacatatgcttttcattatatacataatacctcctggcagccatgctctcagaagttgttattagatagctattttcacaaataatgaataattaatattaaatttaaatttacaaaatattatattaggatcagtatgattctttgttcttgagaatttttcccaacttcccacaggaattctttgtgtagctgaccgttgtcaaggccttagagaactggcgttgaattattacatcctaactgatgaacttttccttgcactctcaagcgagactcatgttaaccttgaacatcttcgaattgatgttgtgagtgaaaatcctggacagattaaatttcatgctgttaaaaaacacagttgggatgcacttattaaacattcccctagagttaatgttgttatgcacttctttctatatgaagaggaattcgagacgttcttcaaagaagaaacccctgttactcacctttattttggtcgttcagtcagcaaagtggttttaggacgggtaggtctcaactgtcctcgactgattgagttagtggtgtgtgctaatgatcttcagcctcttgataatgaacttatttgtattgctgaacactgtacaaacctaacagccttgggcctcagcaaatgtgaagttagctgcagtgccttcatcaggtttgtaagactgtgtgagagaaggttaacacagctctctgtaatggaggaagttttgatccctgatgaggattatagcctagatgaaattcacactgaagtctccaaatacctgggaagagtatggttccctgatgtgatgcctctctggtaatgggctg

SEQ ID NO: 7292 - DNA, 724 bp, Homo sapiens
  source 1..724: mol_type = unassigned DNA; mol_type = unassigned DNA
ttattttggtcgttcagtcagcaaagtggttttaggacgggtcaaatatttgattgtttgcaaactgtcgtgatggattgctgcagaaacatttggaaaaaaataagaaatttgaaaagcaagaaattgctgtaaatagggcacaagccctgtatatggattagatggtcgatatgccaaaaactacagatggtttctaagtagatttctcacctttccttggaggcatattgtagcttgctaaattgttaagcaaaaccacatgggccacaggaaggaatgcctccaatcagctgtggggtttcgtgaagtgtgtgcatgaagcagaagttttcagagaaaatggtgaaacgtccttgaaagtgcctcagctgggagaggatcagaaaaaaatatctatcgggttttatcattttgaaagaagtacaaaatctctacgtatggaacctgcattaaataaatgagcatcaacatctccaggaggcaccccaggtgtagactccacctctcttacctcttccagatattcgaacaccattattgatagcattcttgttttgataaggtttctcctggcccacaatcattccagtgaatggtgcgtacacagtagatccagcagagcacaagatgtccacaccctggtgaggcctctgacttctaggatgtaaataagaacgaacagactgaggaactgccttaggggagctttactgcctgggaa

SEQ ID NO: 7293 - DNA, 598 bp, Homo sapiens
  source 1..598: mol_type = unassigned DNA; mol_type = unassigned DNA
tcctttgcaagatggcccctccccgccacctcaggattcttcctactatcaccccagggagcctagtccaagggagatcagggacccaagactaggcgacacgcagcgaagacactcagaaagagatgggagacgggaggggaaggctcaaggcagtccgggcagcaaggcactgatgcttttcgtctgcttggagggcgaggagagatggagggcaggtgttgcagagcaggcgagatcagtggggaggtttcgactggttctccccagaagagggaagaggatgtgtgccagtgccggcctgagtgttcccaggtgaagagaagctgcccttcttgtggctcggagcttggggttgaagagaagagggggaaaggaaatccgatttccatccagttgttccccccagagctggtggagcatatcatctcattcctcccagtcagagaccttgttgccctcggccagacctgccgctacttccacgaagtgtgcgatggggaaggcgtgtggagacgcatctgtcgcagactcagtccgcgcctccaagatcagggttctggagtccggccctggaagagagctgccattctgaact

SEQ ID NO: 7294 - DNA, 543 bp, Homo sapiens
  source 1..543: mol_type = unassigned DNA; mol_type = unassigned DNA
aggaaggaggaggaggaatctcagataagccggttggggataataggcggaagagctcagggagaaaagagtgaggggaggtgaagagaagctgcccttcttgtggctcggagcttggggttgaagagaagagggggaaaggaaatccgatttccatccagttgttccccccagagctggtggagcatatcatctcattcctcccagtcagagaccttgttgccctcggccagacctgccgctacttccacgaagtgtgcgatggggaaggcgtgtggagacgcatctgtcgcagactcagtccgcgcctccaagatcagggttctggagtccggccctggaagagagctgccattctgaactacacgaagggcctgtatttccaggcatttggaggccgccgccgatgtctcagcaagagcgtggcccccttgctagcccacggctaccgccgcttcttgcccaccaaggatcacgtcttcattcttgactacgtggggaccctcttcttcctcaaaaatgccctggtctccaccctcggcc

SEQ ID NO: 7295 - DNA, 2276 bp, Homo sapiens
  source 1..2276: mol_type = unassigned DNA; mol_type = unassigned DNA
gagagaagggaggggaacaaggatagagcgctcgccaacggccgacgctccaggccgtcccgcccagcgcagctgcacccaatcacaatgctcagatcgggaggtggagccaatcaggtccaaccaagaggaggggacaccggcactccactagcaggaaaacgggccgagggaccgcaagcagggggtgcctagtcctcgtcccccaaagaccaatcgtaagccagatacaggcgagtgactgtcaagaaggccaattagagcctccgaagggaatctggacctgcctcttctctgagggacggctctacctaccaatagcatgggcgagaaggcggtccctttgctaaggaggaggcgggtgaagagaagctgcccttcttgtggctcggagcttggggttgaagagaagagggggaaaggaaatccgatttccatccagttgttccccccagagctggtggagcatatcatctcattcctcccagtcagagaccttgttgccctcggccagacctgccgctacttccacgaagtgtgcgatggggaaggcgtgtggagacgcatctgtcgcagactcagtccgcgcctccaagatcagggttctggagtccggccctggaagagagctgccattctgaactacacgaagggcctgtatttccaggcatttggaggccgccgccgatgtctcagcaagagcgtggcccccttgctagcccacggctaccgccgcttcttgcccaccaaggatcacgtcttcattcttgactacgtggggaccctcttcttcctcaaaaatgccctggtctccaccctcggccagatgcagtggaagcgggcctgtcgctatgttgtgttgtgtcgtggagccaaggattttgcctcggacccaaggtgtgacacagtttaccgtaaatacctctacgtcttggccactcgggagccgcaggaagtggtgggtaccaccagcagccgggcctgtgactgtgttgaggtctatctgcagtctagtgggcagcgggtcttcaagatgacattccaccactcaatgaccttcaagcagatcgtgctggttggtcaggagacccagcgggctctactgctcctcacagaggaaggaaagatctactctttggtagtgaatgagacccagcttgaccagccacgctcctacacggttcagctggccctgaggaaggtgtcccactacctgcctcacctgcgcgtggcctgcatgacttccaaccagagcagcaccctctacgtcacagaccaggggggagtgtattttgaggtgcataccccaggggtgtatcgcgatctctttgggacccttcaagcctttgaccccctggaccagcagatgccgcttgctctctcactgcctgccaagatcctattctgtgctcttggctacaaccaccttggcctggtggatgaatttggccgaatcttcatgcaaggaaataacagatacgggcagctaggaacaggggacaaaatggaccgaggggaacccacacaggtttgttacctgcagcggcccatcaccctgtggtgcggcctcaaccactccctggtgctgagccagagctcagagttcagcaaggagctgctgggctgcggctgtggggctgggggccgcctcccaggctggcccaaggggagtgcctccttcgtcaagctccaagtcaaggtccctctgtgtgcctgtgccctctgtgccaccagggagtgcctatacatcctgtccagccacgacattgagcagcacgccccctatcgccacctgccagccagcagggtggtggggactcctgagcccagcctgggggccagagcaccccaggaccccggggggatggcccaggcctgcgaggagtacctcagccagatccacagttgccaaacgttgcaggaccgcacggagaagatgaaggagatcgtagggtggatgcccctgatggccgcacagaaggacttcttctgggaggccctggacatgctgcagagggctgaaggaggcgggggtggtgtagggcccccagcccctgagacctaatccccctcatgctagcctagtccctggaggagggagtccggccccaggccagggactaaggagcaatgaccattgtgcacatgcgtgtgggaaggggttgctagggggtggggacggctaaccagggtaagaatgttcagggggctgcccaggaggggcccccaacctgactatcatggacaagagatttgatggatagaataaaaggctg

SEQ ID NO: 7296 - DNA, 1630 bp, Homo sapiens
  source 1..1630: mol_type = unassigned DNA; mol_type = unassigned DNA
cgacgctccaggccgtcccgcccagcgcagctgcacccaatcacaatgctcagatcgggaggtggagccaatcaggtccaaccaagaggaggggacaccggcactccactagcaggaaaacgggccgagggaccgcaagcagggggtgcctagtcctcgtcccccaaagaccaatcgtaagccagatacaggcgagtgactgtcaagaaggccaattagagcctccgaagggaatctggacctgcctcttctctgagggacggctctacctaccaatagcatgggcgagaaggcggtccctttgctaaggaggaggcggacacgaagggcctgtatttccaggcatttggaggccgccgccgatgtctcagcaagagcgtggcccccttgctagcccacggctaccgccgcttcttgcccaccaaggatcacgtcttcattcttgactacgtggggaccctcttcttcctcaaaaatgccctggtctccaccctcggccagatgcagtggaagcgggcctgtcgctatgttgtgttgtgtcgtggagccaaggattttgcctcggacccaaggtgtgacacagtttaccgtaaatacctctacgtcttggccactcgggagccgcaggaagtgaggaaggaaagatctactctttggtagtgaatgagacccagcttgaccagccacgctcctacacggttcagctggccctgaggaaggtgtcccactacctgcctcacctgcgcgtggcctgcatgacttccaaccagagcagcaccctctacgtcacagaccaggggggagtgtattttgaggtgcataccccaggggtgtatcgcgatctctttgggacccttcaagcctttgaccccctggaccagcagatgccgcttgctctctcactgcctgccaagatcctattctgtgctcttggctacaaccaccttggcctggtggatgaatttggccgaatcttcatgcaaggaaataacagatacgggcagctaggaacaggggacaaaatggaccgaggggaacccacacaggtccctctgtgtgcctgtgccctctgtgccaccagggagtgcctatacatcctgtccagccacgacattgagcagcacgccccctatcgccacctgccagccagcagggtggtggggactcctgagcccagcctgggggccagagcaccccaggaccccggggggatggcccaggcctgcgaggagtacctcagccagatccacagttgccaaacgttgcaggaccgcacggagaagatgaaggagatcgtagggtggatgcccctgatggccgcacagaaggacttcttctgggaggccctggacatgctgcagagggctgaaggaggcgggggtggtgtagggcccccagcccctgagacctaatccccctcatgctagcctagtccctggaggagggagtccggccccaggccagggactaaggagcaatgaccattgtgcacatgcgtgtgggaaggggttgctagggggtggggacggctaaccagggtaagaatgttcagggggctgcccaggaggggcccccaacctgactatcatggacaagagatttgatggatagaataaaaggctgcagcgag

SEQ ID NO: 7297 - DNA, 1330 bp, Homo sapiens
  source 1..1330: mol_type = unassigned DNA; mol_type = unassigned DNA
acaatgctcagatcgggaggtggagccaatcaggtccaaccaagaggaggggacaccggcactccactagcaggaaaacgggccgagggaccgcaagcagggggtgcctagtcctcgtcccccaaagaccaatcgtaagccagatacaggcgagtgactgtcaagaaggccaattagagcctccgaagggaatctggacctgcctcttctctgagggacggctctacctaccaatagcatgggcgagaaggcggtccctttgctaaggaggaggcgggtgaagagaagctgcccttcttgtggctcggagcttggggttgaagagaagagggggaaaggaaatccgatttccatccagttgttccccccagagctggtggagcatatcatctcattcctcccagtcagagaccttgttgccctcggccagacctgccgctacttccacgaagtgtgcgatggggaaggcgtgtggagacgcatctgtcgcagactcagtccgcgcctccaagatcagggttctggagtccggccctggaagagagctgccattctgaactacacgaagggcctgtatttccaggcatttggaggccgccgccgatgtctcagcaagagcgtggcccccttgctagcccacggctaccgccgcttcttgcccaccaaggatcacgtcttcattcttgactacgtggggaccctcttcttcctcaaaaatgccctggtctccaccctcggccagatgcagtggaagcgggcctgtcgctatgttgtgttgtgtcgtggagccaaggatgtgagtagcagaaccctggcagctgagagcccacctgtattagtccattttcacactgctataaagacgtaccagaggccgggtgcagtggcttacacctgtaatcctagcactttgggaggctgaggcaggcggatcagctgagaccaggagttcgagaccagcctggccaaatggcgaaacccgtctctactaaaaatacaaaaattagctgggtgtggtggtgggtgcctataattccagctacttgggaggctgaggcaggagaattgcttgaacttgggaggcagaggctgcagtgagctgagatcgcacccttgcactccagcctgggcaacaagagggagactccgtctcgaaaaaaaaagacatacctgagaccggtttgcctcggacccaaggtgtgacacagtttaccgtaaatacctctacgtcttggccactcgggagccgcaggaagtggtgggtaccaccagcagccgggcctgtgactgtgttgaggtctatctgcagtctagtgggcagcgggtcttc

SEQ ID NO: 7298 - DNA, 957 bp, Homo sapiens
  source 1..957: mol_type = unassigned DNA; mol_type = unassigned DNA
atgggcgagaaggcggtccctttgctaaggaggaggcgggtgaagagaagctgcccttcttgtggctcggagcttggggttgaagagaagagggggaaaggaaatccgatttccatccagttgttccccccagagctggtggagcatatcatctcattcctcccagtcagagaccttgttgccctcggccagacctgccgctacttccacgaagtgtgcgatggggaaggcgtgtggagacgcatctgtcgcagactcagtccgcgcctccaagatcaggacacgaagggcctgtatttccaggcatttggaggccgccgccgatgtctcagcaagagcgtggcccccttgctagcccacggctaccgccgcttcttgcccaccaaggatcacgtcttcattcttgactacgtggggaccctcttcttcctcaaaaatgccctggtctccaccctcggccagatgcagtggaagcgggcctgtcgctatgttgtgttgtgtcgtggagccaaggattttgcctcggacccaaggtgtgacacagtttaccgtaaatacctctacgtcttggccactcgggagccgcaggaagtggtgggtaccaccagcagccgggcctgtgactgtgttgaggtctatctgcagtctagtgggcagcgggtcttcaagatgacattccaccactcaatgaccttcaagcagatcgtgctggttggtcaggagacccagcgggctctactgctcctcacagaggaaggaaagatctactctttggtagtgaatgagacccagcttgaccagccacgctcctacacggttcagctggccctgaggaaggtgtcccactacctgcctcacctgcgcgtggcctgcatgacttccaaccagagcagcaccctctacgtcacagatcctattctgtgctcttggctacaaccaccttggcctggtggatga

SEQ ID NO: 7299 - DNA, 579 bp, Homo sapiens
  source 1..579: mol_type = unassigned DNA; mol_type = unassigned DNA
aagactgaggttaagaatgaacgcggagcccctggccggccgggaacgcagttcgccgctgcagtggcgagtgaagagaagctgcccttcttgtggctcggagcttggggttgaagagaagagggggaaaggaaatccgatttccatccagttgttccccccagagctggtggagcatatcatctcattcctcccagtcagagaccttgttgccctcggccagacctgccgctacttccacgaagtgtgcgatggggaaggcgtgtggagacgcatctgtcgcagactcagtccgcgcctccaagatcagggttctggagtccggccctggaagagagctgccattctgaactacacgaagggcctgtatttccaggcatttggaggccgccgccgatgtctcagcaagagcgtggcccccttgctagcccacggctaccgccgcttcttgcccaccaaggatcacgtcttcattcttgactacgtggggaccctcttcttcctcaaaaatgccctggtctccaccctcggccagatgcagtggaagcgggcctgtcgctatgttgtgttgtgtcgtgg

SEQ ID NO: 7300 - DNA, 1901 bp, Homo sapiens
  source 1..1901: mol_type = unassigned DNA; mol_type = unassigned DNA
agactccatgggggaggggcctaggaggcagaggggcctcagaggtcccccaagcctaggctggggacatggtgaagagaagctgcccttcttgtggctcggagcttggggttgaagagaagagggggaaaggaaatccgatttccatccagttgttccccccagagctggtggagcatatcatctcattcctcccagtcagagaccttgttgccctcggccagacctgccgctacttccacgaagtgtgcgatggggaaggcgtgtggagacgcatctgtcgcagactcagtccgcgcctccaagatcagggttctggagtccggccctggaagagagctgccattctgaactacacgaagggcctgtatttccaggcatttggaggccgccgccgatgtctcagcaagagcgtggcccccttgctagcccacggctaccgccgcttcttgcccaccaaggatcacgtcttcattcttgactacgtggggaccctcttcttcctcaaaaatgccctggtctccaccctcggccagatgcagtggaagcgggcctgtcgctatgttgtgttgtgtcgtggagccaaggattttgcctcggacccaaggtgtgacacagtttaccgtaaatacctctacgtcttggccactcgggagccgcaggaagtggtgggtaccaccagcagccgggcctgtgactgtgttgaggtctatctgcagtctagtgggcagcgggtcttcaagatgacattccaccactcaatgaccttcaagcagatcgtgctggttggtcaggagacccagcgggctctactgctcctcacagaggaaggaaagatctactctttggtagtgaatgagacccagcttgaccagccacgctcctacacggttcagctggccctgaggaaggtgtcccactacctgcctcacctgcgcgtggcctgcatgacttccaaccagagcagcaccctctacgtcacagaccaggggggagtgtattttgaggtgcataccccaggggtgtatcgcgatctctttgggacccttcaagcctttgaccccctggaccagcagatgccgcttgctctctcactgcctgccaagatcctattctgtgctcttggctacaaccaccttggcctggtggatgaatttggccgaatcttcatgcaaggaaataacagatacgggcagctaggaacaggggacaaaatggaccgaggggaacccacacaggtttgttacctgcagcggcccatcaccctgtggtgcggcctcaaccactccctggtgctgagccagagctcagagttcagcaaggagctgctgggctgcggctgtggggctgggggccgcctcccaggctggcccaaggggagtgcctccttcgtcaagctccaagtcaaggtccctctgtgtgcctgtgccctctgtgccaccagggagtgcctatacatcctgtccagccacgacattgagcagcacgccccctatcgccacctgccagccagcagggtggtggggactcctgagcccagcctgggggccagagcaccccaggaccccggggggatggcccaggcctgcgaggagtacctcagccagatccacagttgccaaacgttgcaggaccgcacggagaagatgaaggagatcgtagggtggatgcccctgatggccgcacagaaggacttcttctgggaggccctggacatgctgcagagggctgaaggaggcgggggtggtgtagggcccccagcccctgagacctaatccccctcatgctagcctagtccctggaggagggagtccggccccaggccagggactaaggagcaatgaccattgtgcacatgcgtgtgggaaggggttgctagggggtggggacggctaaccagg

SEQ ID NO: 7301 - DNA, 2087 bp, Homo sapiens
  source 1..2087: mol_type = unassigned DNA; mol_type = unassigned DNA
taggctggggacatggtgtgggaaagccagcaggaacgggggggccaagggcctaggagacaggagggcaggagcagggagggggcaatcaggatggtcaggggaagccagagacggaagctgcaaaaattcaccaggctgtgtggacgggaggaggggctccgggtgaagagaagctgcccttcttgtggctcggagcttggggttgaagagaagagggggaaaggaaatccgatttccatccagttgttccccccagagctggtggagcatatcatctcattcctcccagtcagagaccttgttgccctcggccagacctgccgctacttccacgaagtgtgcgatggggaaggcgtgtggagacgcatctgtcgcagactcagtccgcgcctccaagatcagggttctggagtccggccctggaagagagctgccattctgaactacacgaagggcctgtatttccaggcatttggaggccgccgccgatgtctcagcaagagcgtggcccccttgctagcccacggctaccgccgcttcttgcccaccaaggatcacgtcttcattcttgactacgtggggaccctcttcttcctcaaaaatgccctggtctccaccctcggccagatgcagtggaagcgggcctgtcgctatgttgtgttgtgtcgtggagccaaggattttgcctcggacccaaggtgtgacacagtttaccgtaaatacctctacgtcttggccactcgggagccgcaggaagtggtgggtaccaccagcagccgggcctgtgactgtgttgaggtctatctgcagtctagtgggcagcgggtcttcaagatgacattccaccactcaatgaccttcaagcagatcgtgctggttggtcaggagacccagcgggctctactgctcctcacagaggaaggaaagatctactctttggtagtgaatgagacccagcttgaccagccacgctcctacacggttcagctggccctgaggaaggtgtcccactacctgcctcacctgcgcgtggcctgcatgacttccaaccagagcagcaccctctacgtcacagaccaggggggagtgtattttgaggtgcataccccaggggtgtatcgcgatctctttgggacccttcaagcctttgaccccctggaccagcagatgccgcttgctctctcactgcctgccaagatcctattctgtgctcttggctacaaccaccttggcctggtggatgaatttggccgaatcttcatgcaaggaaataacagatacgggcagctaggaacaggggacaaaatggaccgaggggaacccacacaggtttgttacctgcagcggcccatcaccctgtggtgcggcctcaaccactccctggtgctgagccagagctcagagttcagcaaggagctgctgggctgcggctgtggggctgggggccgcctcccaggctggcccaaggggagtgcctccttcgtcaagctccaagtcaaggtccctctgtgtgcctgtgccctctgtgccaccagggagtgcctatacatcctgtccagccacgacattgagcagcacgccccctatcgccacctgccagccagcagggtggtggggactcctgagcccagcctgggggccagagcaccccaggaccccggggggatggcccaggcctgcgaggagtacctcagccagatccacagttgccaaacgttgcaggaccgcacggagaagatgaaggagatcgtagggtggatgcccctgatggccgcacagaaggacttcttctgggaggccctggacatgctgcagagggctgaaggaggcgggggtggtgtagggcccccagcccctgagacctaatccccctcatgctagcctagtccctggaggagggagtccggccccaggccagggactaaggagcaatgaccattgtgcacatgcgtgtgggaaggggttgctagggggtggggacggctaaccagggtaagaatgttcagggggctgcccaggaggggcccccaacctgactatcatggacaagagatttgatggatagaataaaaggctgcagcgag

SEQ ID NO: 7302 - DNA, 6744 bp, Homo sapiens
  source 1..6744: mol_type = unassigned DNA; mol_type = unassigned DNA
agcactcccggagcctgcaacgcttgagatcctctccgcgcccgccaccccgcagggtgccccgcgccgttcccgccgccccgccgcccccgtcgcgggcccctgcaccccgagcatccgccccgggtggcacgtccccgagcccaccaggccggccccgtctccccatccgtctagtccgctcgcggtgccatgccattcctcgggcaggactggcggtcccccgggcagaactgggtgaagacggccgacggctggaagcgcttcctggatgagaagagcggcagtttcgtgagcgacctcagcagttactgcaacaaggaggtatacaataaggagaatcttttcaacagcctgaactatgatgttgcagccaagaagagaaagaaggacatgctgaatagcaaaaccaaaactcagtatttccaccaagaaaaatggatctatgttcacaaaggaagtactaaagagcgccatggatattgcaccctgggggaagctttcaacagactggacttctcaactgccattctggattccagaagatttaactacgtggtccggctgttggagctgatagcaaagtcacagctcacatccctgagtggcatcgcccaaaagaacttcatgaatattttggaaaaagtggtactgaaagtccttgaagaccagcaaaacattagactaataagggaactactccagaccctctacacatccttatgtacactggtccaaagagtcggcaagtctgtgctggtcgggaacattaacatgtgggtgtatcggatggagacgattctccactggcagcagcagctgaacaacattcagatcaccaggcctgccttcaaaggcctcaccttcactgacctgcctttgtgcctacaactgaacatcatgcagaggctgagcgacgggcgggacctggtcagcctgggccaggctgcccccgacctgcacgtgctcagcgaagaccggctgctgtggaagaaactctgccagtaccacttctccgagcggcagatccgcaaacgattaattctgtcagacaaagggcagctggattggaagaagatgtatttcaaacttgtccgatgttacccaaggaaagagcagtatggagatacccttcagctctgcaaacactgtcacatcctttcctggaagggcactgaccatccgtgcactgccaataacccagagagctgctccgtttcactttcaccccaggactttatcaacttgttcaagttctgaatcccagcacatgacaacacttcagaagggtccccctgctgactggagagctgggaatatggcatttggacacttcatttgtaaatagtgtacattttaaacattggctcgaaacttcagagataagtcatggagaggacattggaggggagaaatgcagttgctgactgggaatttaagaatgtgaacttctcactagaattggtatggaaaagcaaaatactgtaaataaactttttttctaacaatttgccagcaagactataagggcaataattctatttcagcggtgaaaatggagtcctcttaatggtcacagaaactctcttatagttccctaggaagaaaaaggcaaaactcaaatacaaaataggacgctttgtttacaatgtgaaaatttgtttagaaaagaaaaaatgaagaaggaaaactatataggagaaattcctgggctttggggtttgatctggtgtttgttttgagaaggcgaaggaagcgccacccatcctaaacctgcatgggcacagagccttaccctacagagataccacacaatggtctacctctaaaagcgtagagtgccctctctgacaacgcatgtgatccagtaggcagtgtctgtttttctcgtaagtgttttcatcactataaaaagtgatttaaaatggaaagggatattggaggcaatcctctggtttcacacttccttttcaggcaaacagggccctccttagagttatctgttcaccagaacaacccaaaagcacatgttccttttttcctgtcatgttgtagctcatttgggggaaaagaaggccaacttaaaacagtcccaggggaggattgcttgagcccaggagtctgaggtttgcagtgagctatgattgtgccactgcactccagcctgtctccaaaacaaaacaaaacaaaacaaaagccgtcccagaggaagtcctgctgcagaaaagatgatagaattggtcacccaatcaatagctgtgaagacttccttattcctgctgaacttccttccttggatatcttcatggataagcctgtgtctgtggacagagtggggcccaagtgctgaggctcgaaagacaggttttacaatcagccaattaaacatcttaccagttgctgtaccccttgccaaggggatgagctgaggagcttcttttctttaggtccaacatcaaaatgagtccatctgagctagggctttttgcaaaggtgattaaaaatcaaggctggagttccagccaaatagggaggagaggtaccacaagttcatcttaaacttgcttccgggctgggtagttaaaacaggaagatcccaaggggatcttacgaggcaaatatcagcaggtaactgtggaagaaaggaaatctcaggacctaatgagttcgttgtaaaatattcctgggaatagatgggggatctactcccagttttttactttttacagaatattgttgctttcctacaacaatgtacatatatttgcagttgtatatgctttttttttttccaaataaacttgtcaccctgcatgcccttggcaaataagtgaagcagaaataggaacacagtccacattcaagttgaggaacagtgtatctttaagagctgagctttgggtgacctggaaagggggaaagatggctaagcatggagagaaacgaggcaagagacaagctatgatacaacaccgcttcagcccctgccctcaatagcacacaacccacatatcagctttctgaagagaaggaacctactgtttagtgctcctcactttgcaatgtttgtgctacgccagaatttctccagtttttttcattatcatccccctgagaaaaaaattacattgaatttaaattttccctaataagagaaattaaatatgaaagaataggattttgttgggtaagattgagctttggaaggtcacgaaccattattctatctaaggtgtgtgttttgttttgtttttttttgttttttttttgcaatccctctccccctgaaccaatttcacattgggaatgcaggacctagactgctgaataaaaagctacttcttctataattgtcaggttctctccaatttctcagcttcctcaaagacatggggtggagttgggtgtgccatcactgagagagctctggaacttttgactcttagtgacatttttagatttaggggttcatggccttccacatgttgccaccaactggtgatctctgccccttcatgctgatcaagaaagtagaaactcctcgtcgccttcaggtttgcagtcgcagaaacattgcctgctgtggactgtcagcacaaaactgggacactggtgtcatttagactgtcagcagtgcacatgattgtacgatagactccaggcaaccatgtgcatctgtgcaagatgacctctgccccaagagaagggttacggtctaattaaatgtttaccaagatggtaccagtgggctctccccgtgtcctttggtgttattggagctggtgtatgacagactcaaggaaattttttaaggaaaatgaagaagaaatcaacctttatggttctctttcattggaagaggagaataaggaaagaaatggcaggtagagagggagggggaaaggaatagaaatggcatgtctttgatgctgtggcttgtgtggggacaatgggaagagcacagcaggcacaacatatctgtgttagtgccacgtggtatctgttaagtatggccagagcctcacatataagtgaagagagttaagacaattcttgctctttgaacaataatagtctatagaatttctattggcaaaccatcccagacaacctgacctatcaaacaaaagcaaataatccctgtctcagaactgctggtctaaaagctagaaggggcatgataatggaaattgctagaaaagagagaatgctctactctctttcctgtgcctacctacccccatcctaaaccctgtaaaacagaatttcaaaatagatgtcaaatatgaagtaattcagacttccaaagaaggaaagagttctgcccagggcagtatgagcaaatccacagggatgttaagatttggtccaactcaaaggtttatgggcagtgagcctagagtctcttgagagtaaacccttgcatttgggacaaggagaatatgtgaagttcaggagtgctcacactagagcaagatccagaaaaaaaaaaatccaatggcattttaaactagattgcattatcactcaatgctgttactttgagcagacaaatcagttgaatgggagggcaaatggcagaaatgaacaaaagctattaggtgaaagcatccccaatgtatcagttgtgagatgatttttgtttaatgatgatcaggtttacattgaagtggcttggaagacgtatttcagagggactgggtttgtactgcaaaactctgaacactagagcaggttctactagcacttgggcagtaaggtagcgggtgtgtattatgctattgccatagttctcgtctttgtggattcacataccctttcccatgaggagcttgctactaacagcctcctgtttctgttgtttttatatgggagaagagaaagagcttggaatttcaattgtctaaacaattggtatgatttacaagaaggcaaaccattcaggagatgttcaacagtgtatcattcttagcattcaatacaatgtttattataaaatatacacctgagtttatgtttttctgccaggctgaagggcaataatgtcttgctatgcaaacactctattttatgtgtgaatttttttaactgtaattttatgtgtgaatttttttaactaaactctatcatcattttctatgttgacatcttttttttttttttaatctgtttccaactctgagtctgtgaactatctcttctgactggatgctggcctaaaatcctattagtgcttaaacagacctcaaaacactctgaacctgtaggccaatacagagatgttgttctttgatatatcttgggtccttgatggcttcaacaaacaaggtcataatttgtttaaattcagtgttttctgtagataccttcttctcagtttcattaagaagagtaaccatctttggttttccaaagaatggaaactcctaccctagactttagacttagagcgtctgcctttcacgatgagtaagagatccagaatgtttaggggatgtgcgtcagcccacctggtacagtggcaaagctgaatgcgaacttgaggcctcctgaggcctgaccttctatgcccccagccctccaccccaagcaccttttggtgtggctggaaacacatgacattggatgtgatttttctcaagcccttcactgtggaaggcatgggagactgcccagcattgggcatgtggctgttaacgtttccatttcaagtccctgattcttactggagaagttaaggagccacttaatgttttcacagacctctgattctgttgtgaatgtggcattccagtgagtacaacctgcttgctataaagaaagcagcatattttgacaattttatttcttccttgggtacttacatttttattacaaaaatggccgttataaaaaaagacagaagggctgggcagtggcttgctccctagaaactgagattccgaagcaggtgtttcctctcccctagactcagaggtacatttaatccatcttctccatttcctccttcaggaccagctatgagattcagtgcatttctagcccagcggatgttcattctccactaaacttcatcttttactaagcaaagggggattattccatgaggcagccaggagcaaggggccatgatattcatgactttgtctgctgggcatttttcaaagtgtccttgaattcactcagcaaacaaagctttctggagaatctctcaaaacttaggccctgctccatttggccaaaaatgatggctgctccaaaactctgaacttcttaaaactccatctgctacattatttctggagtttaaacatgactttttctgtctttgagtatagatgtgtttgtttaattaacgaagcacaagtctgttaagcagaaggctccaagctgtattctatacttgggaatccttggtgccatctttattctaccaagtgccaatcaccatggctaaagtgggcgtatattacagcctgtgtcctaagcttagaagctttaatgtacttttttaaatgaaaagtattagagggggttgaacattgtaactaaagcataaagttagaccaattacatgcagagatgtttatttaatattgtgtgagctgagtccttctgtataaattatttgcacacttttcttgcatgatgaactgattttttatagttgtttgtaccagacggtggcatatttttgtaaaaaacttttgacactgaattgcaataaatgtttttccaacaaca

SEQ ID NO: 7303 - DNA, 735 bp, Homo sapiens
  source 1..735: mol_type = unassigned DNA; mol_type = unassigned DNA
tgaatcgctgctctctggcccccccacctattgtcacccttctctctgcagcctgccttcaaaggcctcaccttcactgacctgcctttgtgcctacaactgaacatcatgcagaggctgagcgacgggcgggacctggtcagcctgggccaggctgcccccgacctgcacgtgctcagcgaagaccggctgctgtggaagaaactctgccagtaccacttctccgagcggcagatccgcaaacgattaattctgtcagacaaagggcagctggattggaagaagatgtatttcaaacttgtccgatgttacccaaggaaagagcagtatggagatacccttcagctctgcaaacactgtcacatcctttcctggaagggcactgaccatccgtgcactgccaataacccagagagctgctccgtttcactttcaccccaggactttatcaacttgttcaagttctgaatcccagcacatgacaacacttcagaagggtccccctgctgactggagagctgggaatatggcatttggacacttcatttgtaaatagtgtacattttaaacattggctcgaaacttcagagataagtcatggagaggacattggaggggagaaatgcagttgctgactgggaatttaagaatgtgaacttctcactagaattggtatggaaaagcaaaatactgtaaataaactttttttctaacaatttgccagcaagactataa

SEQ ID NO: 7304 - DNA, 1197 bp, Homo sapiens
  source 1..1197: mol_type = unassigned DNA; mol_type = unassigned DNA
gggtacaggaaagaagccagtgccccaggtcacctaagacaggcatcaagctcattcggcaaaatccagttgggttgttctaactggctcattcttacttgggtgacctctgcatggcaggagtaacttctgtgcctttgttttcatgttcagcgccatggatattgcaccctgggggaagctttcaacagactggacttctcaactgccattctggattccagaagatttaactacgtggtccggctgttggagctgatagcaaagtcacagctcacatccctgagtggcatcgcccaaaagaacttcatgaatattttggaaaaagtggtactgaaagtccttgaagaccagcaaaacattagactaataagggaactactccagaccctctacacatccttatgtacactggtccaaagagtcggcaagtctgtgctggtcgggaacattaacatgtgggtgtatcggatggagacgattctccactggcagcagcagctgaacaacattcagatcaccaggcctgccttcaaaggcctcaccttcactgacctgcctttgtgcctacaactgaacatcatgcagaggctgagcgacgggcgggacctggtcagcctgggccaggctgcccccgacctgcacgtgctcagcgaagaccggctgctgtggaagaaactctgccagtaccacttctccgagcggcagatccgcaaacgattaattctgtcagacaaagggcagctggattggaagaagatgtatttcaaacttgtccgatgttacccaaggaaagagcagtatggagatacccttcagctctgcaaacactgtcacatcctttcctggaagggcactgaccatccgtgcactgccaataacccagagagctgctccgtttcactttcaccccaggactttatcaacttgttcaagttctgaatcccagcacatgacaacacttcagaagggtccccctgctgactggagagctgggaatatggcatttggacacttcatttgtaaatagtgtacattttaaacattggctcgaaacttcagagataagtcatggagaggacattggaggggagaaatgcagttgctgactgggaatttaagaatgtgaacttctcactagaattggtatggaaaagcaaaatactgtaaataaactttttttctaacaatttgcca

SEQ ID NO: 7305 - DNA, 1227 bp, Homo sapiens
  source 1..1227: mol_type = unassigned DNA; mol_type = unassigned DNA
agcactcccggagcctgcaacgcttgagatcctctccgcgcccgccaccccgcagggtgccccgcgccgttcccgccgccccgccgcccccgtcgcgggcccctgcaccccgagcatccgccccgggtggcacgtccccgagcccaccaggccggccccgtctccccatccgtctagtccgctcgcggtgccatgccattcctcgggcaggactggcggtcccccgggcagaactgggtgaagacggccgacggctggaagcgcttcctggatgagaagagcggcagtttcgtgagcgacctcagcagttactgcaacaaggaggtatacaataaggagaatcttttcaacagcctgaactatgatgttgcagccaagaagagaaagaaggacatgctgaatagcaaaaccaaaactcagtatttccaccaagaaaaatggatctatgttcacaaaggaagtactaaagagcgccatggatattgcaccctgggggaagctttcaacagactggacttctcaactgccattctggattccagaagatttaactacgtggtccggcctgccttcaaaggcctcaccttcactgacctgcctttgtgcctacaactgaacatcatgcagaggctgagcgacgggcgggacctggtcagcctgggccaggctgcccccgacctgcacgtgctcagcgaagaccggctgctgtggaagaaactctgccagtaccacttctccgagcggcagatccgcaaacgattaattctgtcagacaaagggcagctggattggaagaagatgtatttcaaacttgtccgatgttacccaaggaaagagcagtatggagatacccttcagctctgcaaacactgtcacatcctttcctggaagggcactgaccatccgtgcactgccaataacccagagagctgctccgtttcactttcaccccaggactttatcaacttgttcaagttctgaatcccagcacatgacaacacttcagaagggtccccctgctgactggagagctgggaatatggcatttggacacttcatttgtaaatagtgtacattttaaacattggctcgaaacttcagagataagtcatggagaggacattggaggggagaaatgcagttgctgactgggaatttaagaatgtgaacttctcactagaattggtatggaaaagcaaaatactgtaaataaactttttttctaac

SEQ ID NO: 7306 - DNA, 938 bp, Homo sapiens
  source 1..938: mol_type = unassigned DNA; mol_type = unassigned DNA
caacgcttgagatcctctccgcgcccgccaccccgcagggtgccccgcgccgttcccgccgccccgccgcccccgtcgcgggcccctgcaccccgagcatccgccccgggtggcacgtccccgagcccaccaggccggccccgtctccccatccgtctagtccgctcgcggtgccatgccattcctcgggcaggactggcggtcccccgggcagaactgggtgaagacggccgacggctggaagcgcttcctggatgagaagagcggcagtttcgtgagcgacctcagcagttactgcaacaaggaggtatacaataaggagaatcttttcaacagcctgaactatgatgttgcagccaagaagagaaagaaggacatgctgaatagcaaaaccaaaactcagtatttccaccaagaaaaatggatctatgttcacaaaggaagtactaaagagcgccatggatattgcaccctgggggaagctttcaacagactggacttctcaactgccattctggattccagaagatttaactacgtggtccggctgttggagctgatagcaaagtcacagctcacatccctgagtggcatcgcccaaaagaacttcatgaatattttggaaaaagtggtactgaaaggtgagccttctctcactctctcgcccctttttataggcatggaggtgggcagatggattttccaatgaagtggacgtgtcattagacttaaagacatgtgaatggatggaaatgaataactccagctacattttagagacactaaattccagttcggaaaggggtacaactcatcctcatggcaaaggtccttgaagaccagcaaaacattagactaataagggaactactccagaccctctacacatccttatgtacactggtccaaagagtcggcaagtctgtgctggtcgggaa

SEQ ID NO: 7307 - DNA, 807 bp, Homo sapiens
  source 1..807: mol_type = unassigned DNA; mol_type = unassigned DNA
gcaacgcttgagatcctctccgcgcccgccaccccgcagggtgccccgcgccgttcccgccgccccgccgcccccgtcgcgggcccctgcaccccgagcatccgccccgggtggcacgtccccgagcccaccaggccggccccgtctccccatccgtctagtccgctcgcggtgccatgccattcctcgggcaggactggcggtcccccgggcagaactgggtgaagacggccgacggctggaagcgcttcctggatgagaagagcggcagtttcgtgagcgacctcagcagttactgcaacaaggaggtatacaataaggagaatcttttcaacagcctgaactatgatgttgcagccaagaagagaaagaaggacatgctgaatagcaaaaccaaaactcagtatttccaccaagaaaaatggatctatgttcacaaaggaagtactaaagagcgccatggatattgcaccctgggggaagctttcaacagactggacttctcaactgccattctggattccagaagatttaactacgtggtccgggccctgccactagccagtgagggaaatagatgaaatagatctgactctaccttgaaggtctgcagcaggggtcagcaaacttctagccctcaggtcaatagcctgccgcctgtttttgtatggcccatgagctaagaatgatttgtacgtttttcaatgttttaaaaaattgaaaggagtataatgtttcataacacatggaaattatgtgcagctcaaatttcagtatccataaataaagttttattggaacacagct

SEQ ID NO: 7308 - DNA, 1932 bp, Homo sapiens
  source 1..1932: mol_type = unassigned DNA; mol_type = unassigned DNA
ggaacaagccctatgacgtgtttggctgttggctcaccgagaccagcctcatctcggggaacctgcaccgcatcggagatatcacctcctgctcggtgctgtggctcaacaatgccttccaggatgtggagtcagagaacgtcaacgtggtgaagcggctgttcaagatccagaacctcaatgccagcaccgtccgcacggtgatggtggccgactgcagccgcttcgacagccctgacctgctgctggaagccggtgacccggccacgtccccctgccgcatctttgacctgggcagcgacaacgaggaggtggtggctggcccggcccccgcccacgccaaggagggcttgcggcactttctggaccgcgtgctggaggggcgggcgcagccacagctgtcggagcgcatgctagagaccaaggtggccgagctgctggcccagggccacaccaagccacccgagcgcagtgccacaggcgccaagagcaagtacctcatcttcaccactggctgcctcacctactccccacaccagatcggtacacccctgccgccatgctgcccgcctcggtcctaggagcttgggggaggccgggcaggggtcctgaggggcagacagcaagcaagtccacaggcaaagctgggatcgttcactcgcccctggggtcacaagcccagacctggggcctgtgggatgagcagtgaaaacaaacgcaggcagggccgctggccagcaagcaaccgacgggcctgattcaggtctggggcccccggagcaggcagtgcccacggacctctgtggtgctcacagccccagagacaccactgaggcatcaagcagatcctgccacaccagatgaccacggcagggcccgtgctgggtgagggccggggctccgatgccttcttcgacgcgctggaccacgtcatagacatacacggacacatcatcggcatgggcctgtcgcccgacaacaggtacctgtacgtgaacagccgcgcctggcccaacggtgcggtggtggccgaccccatgcagccgccaccaatcgcggaggagattgacctgctggtgttcgacctcaagaccatgcgggaggtgaggcgggctctgcgtgcgcaccgcgcctacacgcccaacgacgagtgcttcttcatcttcctggacgtcagcagggacttcgtggccagcggggcggaggaccggcacggctacatctgggaccgccactacaacatctgtctggccaggctgcggcacgaggatgtggtcaactcagtggtcttcagtccccaggagcaggagctgctgctcacggccagcgacgacgccaccatcaaagcctggcgctccccacgcaccatgcgcgtcctccaggcacctcgcccacggcctcgcaccttcttctcctggcttgccagccagaggcgctgaggtgtgctgggtgcactggagccaccgggaccccttgaggacatcgccaggctctgtggctttttcccgagcgggagaggtggagatgcttatagcagttacgccttaggaaggggacaaccaggccccgccacacgctcacacacaaacctgctcacgcagctgtgatgcttggcacggggtggccagtgcagatggagcccaaggccccctcggcctcctgggcaacttggggtacacaggatactgggggtgccgctcctcactcaaccccaggctaggggtacacctgacccagctggcctcggcccggggcaccttcggctggtcctgtggggccctggacggtggcccagtggtggcaggggctgctcctggctgtggttgtgcgcccggggcttgggagcggccggtcacgctgctgtgggcccgagtgtgttgcatgtccacgcaccacccgttcagggccctgaataaacagttggcaacagca

SEQ ID NO: 7309 - DNA, 2274 bp, Homo sapiens
  source 1..2274: mol_type = unassigned DNA; mol_type = unassigned DNA
ggaagcgggtccgggtcgcgcagggcgggggcggcgcagcgggcggaggcggccgtgggccgcctgggcagaatgtcacgatggacgagggcggcacgcccctgctccccgacagcctggtctaccagatcttcctgagcctgggcccggccgacgtgctggccgccgggctggtgtgccgccaatggcaggccgtgtcgcgggacgagttcctgtggagggagcagttctaccgctactaccaggtggcccgcgacgtgccccgacacccagcggccatgtcctggtacgaggagttccagcggctgtatgacacggtgccctgcgtggaggtgcagacgctgcgggaacacacagaccaggtcctgcacctcagcttctcccattccgggtaccagttcgcgtcctgctccaaggactgcactgtgaagatctggagcaacgacctgaccatctcgctgctgcacagcgcggacatgcggccctacaactggagctacacccagttctcccagttcaacaaggacgactcgctactgctggcctcgggggtgttcctggggccgcacaactcctcatccggcgagattgctgtcatcagcctagactccttcgcgctgctgtcccgcgtgcggaacaagccctatgacgtgtttggctgttggctcaccgagaccagcctcatctcggggaacctgcaccgcatcggagatatcacctcctgctcggtgctgtggctcaacaatgccttccaggatgtggagtcagagaacgtcaacgtggtgaagcggctgttcaagatccagaacctcaatgccagcaccgtccgcacggtgatggtggccgactgcagccgcttcgacagccctgacctgctgctggaagccggtgacccggccacgtccccctgccgcatctttgacctgggcagcgacaacgaggaggtggtggctggcccggcccccgcccacgccaaggagggcttgcggcactttctggaccgcgtgctggaggggcgggcgcagccacagctgtcggagcgcatgctagagaccaaggtggccgagctgctggcccagggccacaccaagccacccgagcgcagtgccacaggcgccaagagcaagtacctcatcttcaccactggctgcctcacctactccccacaccagatcggcatcaagcagatcctgccacaccagatgaccacggcagggcccgtgctgggtgagggccggggctccgatgccttcttcgacgcgctggaccacgtcatagacatacacggacacatcatcggcatgggcctgtcgcccgacaacaggtacctgtacgtgaacagccgcgcctggcccaacggtgcggtggtggccgaccccatgcagccgccaccaatcgcggaggagattgacctgctggtgttcgacctcaagaccatgcgggaggtgaggcgggctctgcgtgcgcaccgcgcctacacgcccaacgacgagtgcttcttcatcttcctggacgtcagcagggacttcgtggccagcggggcggaggaccggcacggctacatctgggaccgccactacaacatctgtctggccaggctgcggcacgaggatgtggtcaactcagtggtcttcagtccccaggagcaggagctgctgctcacggccagcgacgacgccaccatcaaagcctggcgctccccacgcaccatgcgcgtcctccaggcacctcgcccacggcctcgcaccttcttctcctggcttgccagccagaggcgctgaggtgtgctgggtgcactggagccaccgggaccccttgaggacatcgccaggctctgtggctttttcccgagcgggagaggtggagatgcttatagcagttacgccttaggaaggggacaaccaggccccgccacacgctcacacacaaacctgctcacgcagctgtgatgcttggcacggggtggccagtgcagatggagcccaaggccccctcggcctcctgggcaacttggggtacacaggatactgggggtgccgctcctcactcaaccccaggctaggggtacacctgacccagctggcctcggcccggggcaccttcggctggtcctgtggggccctggacggtggcccagtggtggcaggggctgctcctggctgtggttgtgcgcccggggcttgggagcggccggtcacgctgctgtgggcccgagtgtgttgcatgtccacgcaccacccgttcagggccctgaataaacagttggcaacagca

SEQ ID NO: 7310 - DNA, 2392 bp, Homo sapiens
  source 1..2392: mol_type = unassigned DNA; mol_type = unassigned DNA
cgttgggcgggggcggcggtccgagcggctgcggcagcggaagcgggtccgggtcgcgcagggcgggggcggcgcagcgggcggaggcggccgtgggccgcctgggcagaatgtcacgatggacgagggcggcacgcccctgctccccgacagcctggtctaccagatcttcctgagcctgggcccggccgacgtgctggccgccgggctggtgtgccgccaatggcaggccgtgtcgcgggacgagttcctgtggagggagcagttctaccgctactaccaggtggcccgcgacgtgccccgacacccagcggccatgtcctggtacgaggagttccagcggctgtatgacacggtgccctgcgtggaggtgcagacgctgcgggaacacacagaccaggtcctgcacctcagcttctcccattccgggtaccagttcgcgtcctgctccaaggactgcactgtgaagatctggagcaacgacctgaccatctcgctgctgcacagcgcggacatgcggccctacaactggagctacacccagttctcccagttcaacaaggacgactcgctactgctggcctcgggggtgttcctggggccgcacaactcctcatccggcgagattgctgtcatcagcctagactccttcgcgctgctgtcccgcgtgcggaacaagccctatgacgtgtttggctgttggctcaccgagaccagcctcatctcggggaacctgcaccgcatcggagatatcacctcctgctcggtgctgtggctcaacaatgccttccaggtgcgtgcggggctaggggcggggctgccctcctggggcctggcgcccggcgcccacctggcacgtgcccccgcccccaggatgtggagtcagagaacgtcaacgtggtgaagcggctgttcaagatccagaacctcaatgccagcaccgtccgcacggtgatggtggccgactgcagccgcttcgacagccctgacctgctgctggaagccggtgacccggccacgtccccctgccgcatctttgacctgggcagcgacaacgaggaggtggtggctggcccggcccccgcccacgccaaggagggcttgcggcactttctggaccgcgtgctggaggggcgggcgcagccacagctgtcggagcgcatgctagagaccaaggtggccgagctgctggcccagggccacaccaagccacccgagcgcagtgccacaggcgccaagagcaagtacctcatcttcaccactggctgcctcacctactccccacaccagatcggcatcaagcagatcctgccacaccagatgaccacggcagggcccgtgctgggtgagggccggggctccgatgccttcttcgacgcgctggaccacgtcatagacatacacggacacatcatcggcatgggcctgtcgcccgacaacaggtacctgtacgtgaacagccgcgcctggcccaacggtgcggtggtggccgaccccatgcagccgccaccaatcgcggaggagattgacctgctggtgttcgacctcaagaccatgcgggaggtgaggcgggctctgcgtgcgcaccgcgcctacacgcccaacgacgagtgcttcttcatcttcctggacgtcagcagggacttcgtggccagcggggcggaggaccggcacggctacatctgggaccgccactacaacatctgtctggccaggctgcggcacgaggatgtggtcaactcagtggtcttcagtccccaggagcaggagctgctgctcacggccagcgacgacgccaccatcaaagcctggcgctccccacgcaccatgcgcgtcctccaggcacctcgcccacggcctcgcaccttcttctcctggcttgccagccagaggcgctgaggtgtgctgggtgcactggagccaccgggaccccttgaggacatcgccaggctctgtggctttttcccgagcgggagaggtggagatgcttatagcagttacgccttaggaaggggacaaccaggccccgccacacgctcacacacaaacctgctcacgcagctgtgatgcttggcacggggtggccagtgcagatggagcccaaggccccctcggcctcctgggcaacttggggtacacaggatactgggggtgccgctcctcactcaaccccaggctaggggtacacctgacccagctggcctcggcccggggcaccttcggctggtcctgtggggccctggacggtggcccagtggtggcaggggctgctcctggctgtggttgtgcgcccggggcttgggagcggccggtcacgctgctgtgggcccgagtgtgttgcatgtccacgcaccacccgttcagggccctgaataaacagttggcaacagca

SEQ ID NO: 7311 - DNA, 2339 bp, Homo sapiens
  source 1..2339: mol_type = unassigned DNA; mol_type = unassigned DNA
gggctccccgttgggcgggggcggcggtccgagcggctgcggcagcggaagcgggtccgggtcgcgcagggcgggggcggcgcagcgggcggaggcggccgtgggccgcctgggcagaatgtcacgatggacgagggcggcacgcccctgctccccgacagcctggtctaccagatcttcctgagcctgggcccggccgacgtgctggccgccgggctggtgtgccgccaatggcaggccgtgtcgcgggacgagttcctgtggagggagcagttctaccgctactaccaggtggcccgcgacgtgccccgacacccagcggccatgtcctggtacgaggagttccagcggctgtatgacacggtgccctgcgtggaggtgcagacgctgcgggaacacacagaccaggtcctgcacctcagcttctcccattccgggtaccagttcgcgtcctgctccaaggactgcactgtgaagatctggagcaacgacctgaccatctcgctgctgcacagcgcggacatgcggccctacaactggagctacacccagttctcccagttcaacaaggacgactcgctactgctggcctcgggggtgttcctggggccgcacaactcctcatccggcgagattgctgtcatcagcctaggtgagcacgggcggcgggttgaccctgcccccgccccacgccgacagcctgtccagccccggcctccccacagactccttcgcgctgctgtcccgcgtgcggaacaagccctatgacgtgtttggctgttggctcaccgagaccagcctcatctcggggaacctgcaccgcatcggagatatcacctcctgctcggtgctgtggctcaacaatgccttccaggatgtggagtcagagaacgtcaacgtggtgaagcggctgttcaagatccagaacctcaatgccagcaccgtccgcacggtgatggtggccgactgcagccgcttcgacagccctgacctgctgctggaagccggtgacccggccacgtccccctgccgcatctttgacctgggcagcgacaacgaggaggtggtggctggcccggcccccgcccacgccaaggagggcttgcggcactttctggaccgcgtgctggaggggcgggcgcagccacagctgtcggagcgcatgctagagaccaaggtggccgagctgctggcccagggccacaccaagccacccgagcgcagtgccacaggcgccaagagcatcaagcagatcctgccacaccagatgaccacggcagggcccgtgctgggtgagggccggggctccgatgccttcttcgacgcgctggaccacgtcatagacatacacggacacatcatcggcatgggcctgtcgcccgacaacaggtacctgtacgtgaacagccgcgcctggcccaacggtgcggtggtggccgaccccatgcagccgccaccaatcgcggaggagattgacctgctggtgttcgacctcaagaccatgcgggaggtgaggcgggctctgcgtgcgcaccgcgcctacacgcccaacgacgagtgcttcttcatcttcctggacgtcagcagggacttcgtggccagcggggcggaggaccggcacggctacatctgggaccgccactacaacatctgtctggccaggctgcggcacgaggatgtggtcaactcagtggtcttcagtccccaggagcaggagctgctgctcacggccagcgacgacgccaccatcaaagcctggcgctccccacgcaccatgcgcgtcctccaggcacctcgcccacggcctcgcaccttcttctcctggcttgccagccagaggcgctgaggtgtgctgggtgcactggagccaccgggaccccttgaggacatcgccaggctctgtggctttttcccgagcgggagaggtggagatgcttatagcagttacgccttaggaaggggacaaccaggccccgccacacgctcacacacaaacctgctcacgcagctgtgatgcttggcacggggtggccagtgcagatggagcccaaggccccctcggcctcctgggcaacttggggtacacaggatactgggggtgccgctcctcactcaaccccaggctaggggtacacctgacccagctggcctcggcccggggcaccttcggctggtcctgtggggccctggacggtggcccagtggtggcaggggctgctcctggctgtggttgtgcgcccggggcttgggagcggccggtcacgctgctgtgggcccgagtgtgttgcatgtccacgcaccacccgttcagggccctgaataaacagttggcaacagca

SEQ ID NO: 7312 - DNA, 1442 bp, Homo sapiens
  source 1..1442: mol_type = unassigned DNA; mol_type = unassigned DNA
ggcctcccttcccgggcctgggctgagggcagccgttggtgggtttcagggccgcctgggcagaatgtcacgatggacgagggcggcacgcccctgctccccgacagcctggtctaccagatcttcctgagcctgggcccggccgacgtgctggccgccgggctggtgtgccgccaatggcaggccgtgtcgcgggacgagttcctgtggagggagcagttctaccgctactaccaggtggcccgcgacgtgccccgacacccagcggccatgtcctggtacgaggagttccagcggctgtatgacacggtgccctgcgtggaggtgcagacgctgcgggaacacacagaccaggtcctgcacctcagcttctcccattccgggtaccagttcgcgtcctgctccaaggactgcactgtgaagatctggagcaacgacctgaccatctcgctgctgcacagcgcggacatgcggccctacaactggagctacacccagttctcccagttcaacaaggacgactcgctactgctggcctcgggggtgttcctggggccgcacaactcctcatccggcgagattgctgtcatcagcctaggtgagcacgggcggcgggttgaccctgcccccgccccacgccgacagcctgtccagccccggcctccccacagactccttcgcgctgctgtcccgcgtgcggaacaagccctatgacgtgtttggctgttggctcaccgagaccagcctcatctcggggaacctgcaccgcatcggagatatcacctcctgctcggtgctgtggctcaacaatgccttccaggatgtggagtcagagaacgtcaacgtggtgaagcggctgttcaagatccagaacctcaatgccagcaccgtccgcacggtgatggtggccgactgcagccgcttcgacagccctgacctgctgctggaagccggtgacccggccacgtccccctgccgcatctttgacctgggcagcgacaacgaggaggtggtggctggcccggcccccgcccacgccaaggagggcttgcggcactttctggaccgcgtgctggaggggcgggcgcagccacagctgtcggagcgcatgctagagaccaaggtggccgagctgctggcccagggccacaccaagccacccgagcgcagtgccacaggcgccaagagcaagtacctcatcttcaccactggctgcctcacctactccccacaccagatcggcatcaagcagatcctgccacaccagatgaccacggcagggcccgtgctgggtgagggccggggctccgatgccttcttcgacgcgctggaccacgtcatagacatacacggacacatcatcggcatgggcctgtcgcccgacaacaggtacctgtacgtgaacagccgcgcctggcccaacggtgcggtggtggccgacc

SEQ ID NO: 7313 - DNA, 785 bp, Homo sapiens
  source 1..785: mol_type = unassigned DNA; mol_type = unassigned DNA
gcggcgcagcgggcggaggcggccgtgggccgcctgggcagaatgtcacgatggacgagggcggcacgcccctgctccccgacagcctggtctaccagatcttcctgagcctgggcccggccgacgtgctggccgccgggctggtgtgccgccaatggcaggccgtgtcgcgggacgagttcctgtggagggagcagttctaccgctactaccaggtggcccgcgacgtgccccgacacccagcggccatgtcctggtacgaggagttccagcggctgtatgacacggtgccctgcgtggaggtgcagacgctgcgggaacacacagaccaggtcctgcacctcagcttctcccattccgggtaccagttcgcgtcctgctccaaggactgcactgtgaagtagcaggcccccgccccgcgacctggccaggcgatcactacagccgcccctgccgaacagatctggagcaacgacctgaccatctcgctgctgcacagcgcggacatgcggccctacaactggagctacacccagttctcccagttcaacaaggacgactcgctactgctggcctcgggggtgttcctggggccgcacaactcctcatccggcgagattgctgtcatcagcctagactccttcgcgctgctgtcccgcgtgcggaacaagccctatgacgtgtttggctgttggctcaccgagaccagcctcatctcggggaacctgcaccgcatcggagatatcacctcctgctcggtgctgtggctcaacaatgccttccag

SEQ ID NO: 7314 - DNA, 718 bp, Homo sapiens
  source 1..718: mol_type = unassigned DNA; mol_type = unassigned DNA
gttgggcgggggcggcggtccgagcggctgcggcagcggaagcgggtccgggtcgcgcagggcgggggcggcgcagcgggcggaggcggccgtgggccgcctgggcagaatgtcacgatggacgagggcggcacgcccctgctccccgacagcctggtctaccagatcttcctgagcctgggcccggccgacgtgctggccgccgggctggtgtgccgccaatggcaggccgtgtcgcgggacgagttcctgtggagggagcagttctaccgctactaccaggtggcccgcgacgtgccccgacacccagcggccatgtcctggtacgaggagttccagcggctgtatgacacggtgccctgcgtggaggtgcagacgctgcgggaacacacagaccaggtcctgcacctcagcttctcccattccgggtaccagttcgcgtcctgctccaaggactgcactgtgaaggcgatcactacagccgcccctgccgaacagatctggagcaacgacctgaccatctcgctgctgcacagcgcggacatgcggccctacaactggagctacacccagttctcccagttcaacaaggacgactcgctactgctggcctcgggggtgttcctggggccgcacaactcctcatccggcgagattgctgtcatcagcctagactccttcgcgctgctgtcccgcgtgcggaacaagccctatgacg

SEQ ID NO: 7315 - DNA, 839 bp, Homo sapiens
  source 1..839: mol_type = unassigned DNA; mol_type = unassigned DNA
gtgcaggagccccgaggccgcccgtgcgctcgtccccgccgtccgccccgagcccgccgggcagagctgctccagggccgcagggcggaggccactgcctggccgccccgagcttcctctcggcggaagcccgtccccggacggcgcctggtgtccccgtgcctcgcgtgcggcggtccgggccctggcgggctgaggggcgcccgctgccggccgcaggaggccgggggatgacgcggcggagaggggccggcccggcccgcccggagctgccgggtccttggttgggcggcggtacccgggcgtcccctgcagacacgcagccccgtggaactcccggcgggacggttggggctggaggaacaggacgcccgctctcggcctcccttcccgggcctgggctgagggcagccgttggtgggtttcagggccgcctgggcagaatgtcacgatggacgagggcggcacgcccctgctccccgacagcctggtctaccagatcttcctgagcctgggcccggccgacgtgctggccgccgggctggtgtgccgccaatggcaggccgtgtcgcgggacgagttcctgtggagggagcagttctaccgctactaccaggtggcccgcgacgtgccccgacacccagcggccatgtcctggtacgaggagttccagcggctgtatgacacggtgccctgcgtggaggtgcagacgctgcgggaacacacagaccaggtcctgcacctcagcttctcccattccgggtaccagttcgcgtcctgctccaaggactgcactgtgaagatctggagcaacgacctgaccatctcgctgctgcaca

SEQ ID NO: 7316 - DNA, 1581 bp, Homo sapiens
  source 1..1581: mol_type = unassigned DNA; mol_type = unassigned DNA
agacaagacgcgaggccggcagcgcccacccggtcgcaatggagcttcccctagggcggtgcgatgattcccgcacctgggacgatgactcggacccagagtcagagacagacccagacgcgcaggccaaggcctacgtggcccgcgttctcagtccgccaaaatccgggctggcgttctcgcgcccctcgcagctatccacacccgccgcgtccccgagcgcttcggagcctcgggccgcgtccagggtttcggccgtaagtgagccgggccttctgagccttcccccggagctgctgctcgagatctgctcctacctggacgcccgcctcgtgctccacgtcctgtcgcgggtgtgccacgcgctccgcgacctcgtgtctgaccatgtcacctggaggctacgcgcgctacgccgcgtacgcgcgccctacccagtggtggaagggtgggtcactctgtctgtcgggctcccgagatcgcaacgtcaacttgtgggacctgcggcagctggggacggagtccaaccaggttctgatcaagaccttaggcactaagcgaaatagtacccatgagggccagctcagccgtgctgtgcctctcctacctgcctgacatcctggtgactggcacctatgacaagaaggtgaccatctacgaccccagagccggcccagccctgttgaagcaccagcaactacactccagacccgtgctgaccctgctggcggatgaccggcacatcatctcaggcagcgaggaccacaccctggtggtggtggaccgccgagccaacagcgtcctgcagcgtctgcagctggactcctacctgctctgcatgtcctaccaggaaccccagctctgggctggtgacaaccagggcctgctgcacgtcttcgccaaccgcaacggctgcttccagcttatccggtcctttgatgtgggccacagctttcccatcactgggatccagtactccgtgggagccttgtacaccacatccactgacaagaccatccgggtgcacgtgcccacagacccaccaaggaccatttgcacccgaaggcatgacaatgggctcaatagggtctgtgctgagggcaacctggtggtggccggctctggagacctgtcgctagaggtctggaggctgcaggcctgagcaggtgggcgtggatgtggatactgcctgccggaggctgggcttcctcctctgttcttgggggaccatccccaatgttggtgctgcctccgccccgtgggcctagggcacaaggagtcccagccacattcgggagttggtggcggccgggatgcccacaaggaaggggtcattcttggcctgctccgtgcagaacttcagcagatcggcggccatctttggacacctgcagaccaactggttcagccagaccagacccaggcatgcacctgtcccctggcccatgtgttcccacctcttcccgcctcctgcactggccccgaccctcaccttcacttggtcgatgcctgcctccatctggagctgctccactgcccagagggcctgcccaatgtcactgttgatggccaccttgctgg

SEQ ID NO: 7317 - DNA, 1738 bp, Homo sapiens
  source 1..1738: mol_type = unassigned DNA; mol_type = unassigned DNA
ggaagtgccctcgtgctgcctaggagacaagacgcgaggccggcagcgcccacccggtcgcaatggagcttcccctagggcggtgcgatgattcccgcacctgggacgatgactcggacccagagtcagagacagacccagacgcgcaggccaaggcctacgtggcccgcgttctcagtccgccaaaatccgggctggcgttctcgcgcccctcgcagctatccacacccgccgcgtccccgagcgcttcggagcctcgggccgcgtccagggtttcggccgtaagtgagccgggccttctgagccttcccccggagctgctgctcgagatctgctcctacctggacgcccgcctcgtgctccacgtcctgtcgcgggtgtgccacgcgctccgcgacctcgtgtctgaccatgtcacctggaggctacgcgcgctacgccgcgtacgcgcgccctacccagtggtggaagagaagaactttgactggccggcagcctgcattgcgctggagcagcacctgtcccgctgggcagaggatgggcgctgggtcgaatacttctgcctggccgaaggccacgtggcttccgttgactcagtgctgctgctccagggtgggtcactctgtctgtcgggctcccgagatcgcaacgtcaacttgtgggacctgcggcagctggggacggagtccaaccaggttctgatcaagaccttaggcactaagcgaaatagtacccatgagggctgggtgtggtcactggcagcgcaggaccaccgcgtgtgctccggctcctgggacagcacagtgaagctctgggacatggcagcggatgggcagcagttcggcgagataaaggccagctcagccgtgctgtgcctctcctacctgcctgacatcctggtgactggcacctatgacaagaaggtgaccatctacgaccccagagccggcccagccctgttgaagcaccagcaactacactccagacccgtgctgaccctgctggcggatgaccggcacatcatctcaggcagcgaggaccacaccctggtggtggtggaccgccgagccaacagcgtcctgcagcgtctgcagctggactcctacctgctctgcatgtcctaccaggaaccccagctctgggctggtgacaaccagggcctgctgcacgtcttcgccaaccgcaacggctgcttccagcttatccggtcctttgatgtgggccacagctttcccatcactgggatccagtactccgtgggagccttgtacaccacatccactgacaagaccatccgggtgcacgtgcccacagacccaccaaggaccatttgcacccgaaggcatgacaatgggctcaatagggtctgtgctgagggcaacctggtggtggccggctctggagacctgtcgctagaggtctggaggctgcaggcctgagcaggtgggcgtggatgtggatactgcctgccggaggctgggcttcctcctctgttcttgggggaccatccccaatgttggtgctgcctccgccccgtgggcctagggcacaaggagtcccagccacattcgggtgagcgtcctggcctgggccctatgcccgggggaagggtgaaattggggttcaggcccacccagggggccgcttcccactcttgggccctggttttgttatgatttggatgccccgctctcagttgagagcgaaggagaaataaacctgacatgttggtgcttgg

SEQ ID NO: 7318 - DNA, 1437 bp, Homo sapiens
  source 1..1437: mol_type = unassigned DNA; mol_type = unassigned DNA
atggagcttcccctagggcggtgcgatgattcccgcacctgggacgatgactcggacccagagtcagagacagacccagacgcgcaggccaaggcctacgtggcccgcgttctcagtccgccaaaatccgggctggcgttctcgcgcccctcgcagctatccacacccgccgcgtccccgagcgcttcggagcctcgggccgcgtccagggtttcggccgtaagtgagccgggccttctgagccttcccccggagctgctgctcgagatctgctcctacctggacgcccgcctcgtgctccacgtcctgtcgcgggtgtgccacgcgctccgcgacctcgtgtctgaccatgtcacctggaggctacgcgcgctacgccgcaagaactttgactggccggcagcctgcattgcgctggagcagcacctgtcccgctgggcagaggatgggcgctgggtcgaatacttctgcctggccgaaggccacgtggcttccgttgactcagtgctgctgctccagggtgggtcactctgtctgtcgggctcccgagatcgcaacgtcaacttgtgggacctgcggcagctggggacggagtccaaccaggttctgatcaagaccttaggcactaagcgaaatagtacccatgagggctgggtgtggtcactggcagcgcaggaccaccgcgtgtgctccggctcctgggacagcacagtgaagctctgggacatggcagcggatgggcagcagttcggcgagataaaggccagctcagccgtgctgtgcctctcctacctgcctgacatcctggtgactggcacctatgacaagaaggtgaccatctacgaccccagagacaggatggagacccgggatgctctcatgggctggggggggccttcgaggggctctgatatccctcctcaccggcccatcacccatgaagccggcccagccctgttgaagcaccagcaactacactccagacccgtgctgaccctgctggcggatgaccggcacatcatctcaggcagcgaggaccacaccctggtggtggtggaccgccgagccaacagcgtcctgcagcgtctgcagctggactcctacctgctctgcatgtcctaccaggaaccccagctctgggctggtgacaaccagggcctgctgcacgtcttcgccaaccgcaacggctgcttccagcttatccggtcctttgatgtgggccacagctttcccatcactgggatccagtactccgtgggagccttgtacaccacatccactgacaagaccatccgggtgcacgtgcccacagacccaccaaggaccatttgcacccgaaggcatgacaatgggctcaatagggtctgtgctgagggcaacctggtggtggccggctctggagacctgtcgctagaggtctggaggctgcaggcctga

SEQ ID NO: 7319 - DNA, 1910 bp, Homo sapiens
  source 1..1910: mol_type = unassigned DNA; mol_type = unassigned DNA
tgggtgcacctgctgtgtagctcaagtgtgatgggctctggagtgccccacttctgatctcaggctgctatctctccacaccagctgtgtctccctgctaaccacgctaccagagctgtgattgtgcccgctgagtggactgcgttgtcagggagtgagtgctccatcatcgggagaatccaagcaggaccgccatggaggaaggtcaatattcagagatcgaggagcttcccaggaggcggtgttgcaggcgtgggactcagatcgtgctgctggggctggtgaccgccgctctgtgggctgggctgctgactctgcttctcctgtggcgtgaggacacccccagctccatgtggtccccccaactcatggggcccttctgtgttccctccttcacccccatctcagagctgggggagcccaacgcatcctctcaaaacccaattttcccatcctgcctcccatcttgccactgccagccctttcccatcccccaccctccagagcccctcaccccacacccagcatccctgtcctccacactttcagcacctccatggcttatacccaagacctccatccccagctgggaggtggggtgcaggcaggtgggggcactgacaatcccccctctccactcctcttctctccccctccccagactgggacaccacacagagtctaaaacagctggaagagagggctgcccggaacgtctctcaagtttccaagaacttggaaagccaccacggtgaccagatggcgcagaaatcccagtccacgcagatttcacaggaactggaggaacttcgagctgaacagcagagattgaaatctcaggacttggagctgtcctggaacctgaacgggcttcaagcagatctgagcagcttcaagtcccaggaattgaacgagaggaacgaagcttcagatttgctggaaagactccgggaggaggtgacaaagctaaggatggagttgcaggtgtccagcggctttgtgtgcaacacgtgccctgaaaagtggatcaatttccaacggaagtgctactacttcggcaagggcaccaagcagtgggtccacgcccggtatgcctgtgacgacatggaagggcagctggtcagcatccacagcccggaggagcaggacttcctgaccaagcatgccagccacaccggctcctggattggccttcggaacttggacctgaagggggagtttatctgggtggatgggagccacgtggactacagcaactgggctccaggggagcccaccagccggagccagggcgaggactgcgtgatgatgcggggctccggtcgctggaacgacgccttctgcgaccgtaagctgggcgcctgggtgtgcgaccggctggccacatgcacgccgccagccagcgaaggttccgcggagtccatgggacctgattcaagaccagaccctgacggccgcctgcccaccccctctgcccctctccactcttgagcatggatacagccaggcccagagcaagaccctgaagacccccaaccacggcctaaaagcctctttgtggctgaaaggtccctgtgacattttctgccacccaaacggaggcagctgacacatctcccgctcctctatggcccctgccttcccaggagtacaccccaacagcaccctctccagatgggagtgcccccaacagcaccctctccagatgagagtacaccccaacagcaccctctccagatgagagtacaccccaacagcaccctctccagatgagagtacaccccaacagcaccctctccagatgcagccccatctcctcagcaccccaggacctgagtatccccagctcaggtggtgagtcctcctgtccagcctgcatcaataaaatggggcagtgatggcctcccaca

SEQ ID NO: 7320 - DNA, 1596 bp, Homo sapiens
  source 1..1596: mol_type = unassigned DNA; mol_type = unassigned DNA
agtggctctactttcagaagaaagtgtctctcttcctgcttaaacctctgtctctgacggtccctgccaatcgctctggtcgaccccaacacactaggaggacagacacaggctccaaactccactaaccagagctgtgattgtgcccgctgagtggactgcgttgtcagggagtgagtgctccatcatcgggagaatccaagcaggaccgccatggaggaaggtcaatattcagagatcgaggagcttcccaggaggcggtgttgcaggcgtgggactcagatcgtgctgctggggctggtgaccgccgctctgtgggctgggctgctgactctgcttctcctgtggcactgggacaccacacagagtctaaaacagctggaagagagggctgcccggaacgtctctcaagtttccaagaacttggaaagccaccacggtgaccagatggcgcagaaatcccagtccacgcagatttcacaggaactggaggaacttcgagctgaacagcagagattgaaatctcaggacttggagctgtcctggaacctgaacgggcttcaagcagatctgagcagcttcaagtcccaggaattgaacgagaggaacgaagcttcagatttgctggaaagactccgggaggaggtgacaaagctaaggatggagttgcaggtgtccagcggctttgtgtgcaacacgtgccctgaaaagtggatcaatttccaacggaagtgctactacttcggcaagggcaccaagcagtgggtccacgcccggtatgcctgtgacgacatggaagggcagctggtcagcatccacagcccggaggagcaggacttcctgaccaagcatgccagccacaccggctcctggattggccttcggaacttggacctgaagggggagtttatctgggtggatgggagccacgtggactacagcaactgggctccaggggagcccaccagccggagccagggcgaggactgcgtgatgatgcggggctccggtcgctggaacgacgccttctgcgaccgtaagctgggcgcctgggtgtgcgaccggctggccacatgcacgccgccagccagcgaaggttccgcggagtccatgggacctgattcaagaccagaccctgacggccgcctgcccaccccctctgcccctctccactcttgagcatggatacagccaggcccagagcaagaccctgaagacccccaaccacggcctaaaagcctctttgtggctgaaaggtccctgtgacattttctgccacccaaacggaggcagctgacacatctcccgctcctctatggcccctgccttcccaggagtacaccccaacagcaccctctccagatgggagtgcccccaacagcaccctctccagatgagagtacaccccaacagcaccctctccagatgagagtacaccccaacagcaccctctccagatgagagtacaccccaacagcaccctctccagatgcagccccatctcctcagcaccccaggacctgagtatccccagctcaggtggtgagtcctcctgtccagcctgcatcaataaaatggggcagtgatggcctccca

SEQ ID NO: 7321 - DNA, 1560 bp, Homo sapiens
  source 1..1560: mol_type = unassigned DNA; mol_type = unassigned DNA
ctgcttaaacctctgtctctgacggtccctgccaatcgctctggtcgaccccaacacactaggaggacagacacaggctccaaactccactaagtgaccagagctgtgattgtgcccgctgagtggactgcgttgtcagggagtgagtgctccatcatcgggagaatccaagcaggaccgccatggaggaaggtcaatattcagagatcgaggagcttcccaggaggcggtgttgcaggcgtgggactcagatcgtgctgctggggctggtgaccgccgctctgtgggctgggctgctgactctgcttctcctgtggcactgggacaccacacagagtctaaaacagctggaagagagggctgcccggaacgtctctcaagtttccaagaacttggaaagccaccacggtgaccagatggcgcagaaatcccagtccacgcagatttcacaggaactggaggaacttcgagctgaacagcagagattgaaatctcaggacttggagctgtcctggaacctgaacgggcttcaagcagatctgagcagcttcaagtcccaggaattgaacgagaggaacgaagcttcagatttgctggaaagactccgggaggaggtgacaaagctaaggatggagttgcaggtgtccagcggctttgtgtgcaacacgtgccctgaaaagtggatcaatttccaacggaagtgctactacttcggcaagggcaccaagcagtgggtccacgcccggtatgcctgtgacgacatggaagggcagctggtcagcatccacagcccggaggagcaggacttcctgaccaagcatgccagccacaccggctcctggattggccttcggaacttggacctgaagggggagtttatctgggtggatgggagccacgtggactacagcaactgggctccaggggagcccaccagccggagccagggcgaggactgcgtgatgatgcggggctccggtcgctggaacgacgccttctgcgaccgtaagctgggcgcctgggtgtgcgaccggctggccacatgcacgccgccagccagcgaaggttccgcggagtccatgggacctgattcaagaccagaccctgacggccgcctgcccaccccctctgcccctctccactcttgagcatggatacagccaggcccagagcaagaccctgaagacccccaaccacggcctaaaagcctctttgtggctgaaaggtccctgtgacattttctgccacccaaacggaggcagctgacacatctcccgctcctctatggcccctgccttcccaggagtacaccccaacagcaccctctccagatgggagtgcccccaacagcaccctctccagatgagagtacaccccaacagcaccctctccagatgagagtacaccccaacagcaccctctccagatgagagtacaccccaacagcaccctctccagatgcagccccatctcctcagcaccccaggacctgagtatccccagctcaggtggtgagtcctcctgtccagcctgcatcaataaaatggggcagtgatggcc

SEQ ID NO: 7322 - DNA, 1872 bp, Homo sapiens
  source 1..1872: mol_type = unassigned DNA; mol_type = unassigned DNA
ctgacggtccctgccaatcgctctggtcgaccccaacacactaggaggacagacacaggctccaaactccactaagtgaccagagctgtgattgtgcccgctgagtggactgcgttgtcagggagtgagtgctccatcatcgggagaatccaagcaggaccgccatggaggaaggtcaatattcagagatcgaggagcttcccaggaggcggtgttgcaggcgtgggactcagatcgtgctgctggggctggtgaccgccgctctgtgggctgggctgctgactctgcttctcctgtggcgtgaggacacccccagctccatgtggtccccccaactcatggggcccttctgtgttccctccttcacccccatctcagagctgggggagcccaacgcatcctctcaaaacccaattttcccatcctgcctcccatcttgccactgccagccctttcccatcccccaccctccagagcccctcaccccacacccagcatccctgtcctccacactttcagcacctccatggcttatacccaagacctccatccccagctgggaggtggggtgcaggcaggtgggggcactgacaatcccccctctccactcctcttctctccccctccccagactgggacaccacacagagtctaaaacagctggaagagagggctgcccggaacgtctctcaagtttccaagaacttggaaagccaccacggtgaccagatggcgcagaaatcccagtccacgcagatttcacaggaactggaggaacttcgagctgaacagcagagattgaaatctcaggacttggagctgtcctggaacctgaacgggcttcaagcagatctgagcagcttcaagtcccaggaattgaacgagaggaacgaagcttcagatttgctggaaagactccgggaggaggtgacaaagctaaggatggagttgcaggtgtccagcggctttgtgtgcaacacgtgccctgaaaagtggatcaatttccaacggaagtgctactacttcggcaagggcaccaagcagtgggtccacgcccggtatgcctgtgacgacatggaagggcagctggtcagcatccacagcccggaggagcaggacttcctgaccaagcatgccagccacaccggctcctggattggccttcggaacttggacctgaagggggagtttatctgggtggatgggagccacgtggactacagcaactgggctccaggggagcccaccagccggagccagggcgaggactgcgtgatgatgcggggctccggtcgctggaacgacgccttctgcgaccgtaagctgggcgcctgggtgtgcgaccggctggccacatgcacgccgccagccagcgaaggttccgcggagtccatgggacctgattcaagaccagaccctgacggccgcctgcccaccccctctgcccctctccactcttgagcatggatacagccaggcccagagcaagaccctgaagacccccaaccacggcctaaaagcctctttgtggctgaaaggtccctgtgacattttctgccacccaaacggaggcagctgacacatctcccgctcctctatggcccctgccttcccaggagtacaccccaacagcaccctctccagatgggagtgcccccaacagcaccctctccagatgagagtacaccccaacagcaccctctccagatgagagtacaccccaacagcaccctctccagatgagagtacaccccaacagcaccctctccagatgcagccccatctcctcagcaccccaggacctgagtatccccagctcaggtggtgagtcctcctgtccagcctgcatcaataaaatggggcagtgatggc

SEQ ID NO: 7323 - DNA, 1577 bp, Homo sapiens
  source 1..1577: mol_type = unassigned DNA; mol_type = unassigned DNA
agaagaaagtgtctctcttcctgcttaaacctctgtctctgacggtccctgccaatcgctctggtcgaccccaacacactaggaggacagacacaggctccaaactccactaagtgaccagagctgtgattgtgcccgctgagtggactgcgttgtcagggagtgagtgctccatcatcgggagaatccaagcaggaccgccatggaggaaggtcaatattcagagatcgaggagcttcccaggaggcggtgttgcaggcgtgggactcagatcgtgctgctggggctggtgaccgccgctctgtgggctgggctgctgactctgcttctcctgtggcactgggacaccacacagagtctaaaacagctggaagagagggctgcccggaacgtctctcaagtttccaagaacttggaaagccaccacggtgaccagatggcgcagaaatcccagtccacgcagatttcacaggaactggaggaacttcgagctgaacagcagagattgaaatctcagggtgagagactgggatcggggttatgaagccagattgggtgggaaggagggagtgtctcagagccctggggaaccacgaggctggggggccaggcttggggggcaccctcggcctgtacacatcctccctgagaccagccctgcgctcctgcacacaccagacttggagctgtcctggaacctgaacgggcttcaagcagatctgagcagcttcaagtcccaggaattgaacgagaggaacgaagcttcagatttgctggaaagactccgggaggaggtgacaaagctaaggatggagttgcaggtgtccagcggctttgtgtgcaacacgtgccctgaaaagtggatcaatttccaacggaagtgctactacttcggcaagggcaccaagcagtgggtccacgcccggtatgcctgtgacgacatggaagggcagctggtcagcatccacagcccggaggagcaggacttcctgaccaagcatgccagccacaccggctcctggattggccttcggaacttggacctgaagggggagtttatctgggtggatgggagccacgtggactacagcaactgggctccaggggagcccaccagccggagccagggcgaggactgcgtgatgatgcggggctccggtcgctggaacgacgccttctgcgaccgtaagctgggcgcctgggtgtgcgaccggctggccacatgcacgccgccagccagcgaaggttccgcggagtccatgggacctgattcaagaccagaccctgacggccgcctgcccaccccctctgcccctctccactcttgagcatggatacagccaggcccagagcaagaccctgaagacccccaaccacggcctaaaagcctctttgtggctgaaaggtccctgtgacattttctgccacccaaacggaggcagctgacacatctcccgctcctctatggcccctgccttcccaggagtacaccccaacagcaccctctccagatgggagtgcccccaacagcaccctctccagatgagagtacaccccaacagcaccctctccagatg

SEQ ID NO: 7324 - DNA, 801 bp, Homo sapiens
  source 1..801: mol_type = unassigned DNA; mol_type = unassigned DNA
atgggtgcacctgctgtgtagctcaagtgtgatgggctctggagtgccccacttctgatctcaggctgctatctctccacaccagctgtgtctccctgctaaccacgctagtgagtccagattgtagactaaacaaaatcagcaaatggcccctgagtgccaccaagtcccagatgctatcctgtgctggtaactaggatttgatggctcaccctaaccatcattaaatcccaaatcagccagagctgtgattgtgcccgctgagtggactgcgttgtcagggagtgagtgctccatcatcgggagaatccaagcaggaccgccatggaggaaggtcaatattcagagatcgaggagcttcccaggaggcggtgttgcaggcgtgggactcagatcgtgctgctggggctggtgaccgccgctctgtgggctgggctgctgactctgcttctcctgtggcactgggacaccacacagagtctaaaacagctggaagagagggctgcccggaacgtctctcaagtttccaagaacttggaaagccaccacggtgaccagatggcgcagaaatcccagtccacgcagatttcacaggaactggaggaacttcgagctgaacagcagagattgaaatctcaggaattgaacgagaggaacgaagcttcagatttgctggaaagactccgggaggaggtgacaaagctaaggatggagttgcaggtgtccagcggctttgtgtgcaacacgtgccctgaaaagtggatcaatttccaacggaagtgctactacttcggcaagggc

SEQ ID NO: 7325 - DNA, 1482 bp, Homo sapiens
  source 1..1482: mol_type = unassigned DNA; mol_type = unassigned DNA
aacggcttcagctagggagcggggagcccaatagagtcagaggccaaatagaacaggaacttggaacaagcagaatttagcataatgaatcctccaagccaggagatcgaggagcttcccaggaggcggtgttgcaggcgtgggactcagatcgtgctgctggggctggtgaccgccgctctgtgggctgggctgctgactctgcttctcctgtggcactgggacaccacacagagtctaaaacagctggaagagagggctgcccggaacgtctctcaagtttccaagaacttggaaagccaccacggtgaccagatggcgcagaaatcccagtccacgcagatttcacaggaactggaggaacttcgagctgaacagcagagattgaaatctcaggacttggagctgtcctggaacctgaacgggcttcaagcagatctgagcagcttcaagtcccaggaattgaacgagaggaacgaagcttcagatttgctggaaagactccgggaggaggtgacaaagctaaggatggagttgcaggtgtccagcggctttgtgtgcaacacgtgccctgaaaagtggatcaatttccaacggaagtgctactacttcggcaagggcaccaagcagtgggtccacgcccggtatgcctgtgacgacatggaagggcagctggtcagcatccacagcccggaggagcaggacttcctgaccaagcatgccagccacaccggctcctggattggccttcggaacttggacctgaagggggagtttatctgggtggatgggagccacgtggactacagcaactgggctccaggggagcccaccagccggagccagggcgaggactgcgtgatgatgcggggctccggtcgctggaacgacgccttctgcgaccgtaagctgggcgcctgggtgtgcgaccggctggccacatgcacgccgccagccagcgaaggttccgcggagtccatgggacctgattcaagaccagaccctgacggccgcctgcccaccccctctgcccctctccactcttgagcatggatacagccaggcccagagcaagaccctgaagacccccaaccacggcctaaaagcctctttgtggctgaaaggtccctgtgacattttctgccacccaaacggaggcagctgacacatctcccgctcctctatggcccctgccttcccaggagtacaccccaacagcaccctctccagatgggagtgcccccaacagcaccctctccagatgagagtacaccccaacagcaccctctccagatgagagtacaccccaacagcaccctctccagatgagagtacaccccaacagcaccctctccagatgcagccccatctcctcagcaccccaggacctgagtatccccagctcaggtggtgagtcctcctgtccagcctgcatcaataaaatggggcagtgatggcctcccacatttgtccccttcttgg

SEQ ID NO: 7326 - DNA, 4340 bp, Homo sapiens
  source 1..4340: mol_type = unassigned DNA; mol_type = unassigned DNA
gtccgcctgccgcccgctggcctgctccctccggggcaagtcttgcttcttaagcgctcctttcacacacgcgcgcgctcgctgggccgtcccctcctctccggccctcctcctcctcctggtccttgctaacgctgccgtcggggaggattgatgtcccttcagcatcatgcagccgccgccgaggaaggacattcagtcagaagaaggctgctattgaaagagagtatgcacagggtatgcagaagttggctagtcaatacctgaagagagattggcctggagtaaaagctgatgatcggaatgattacaggagcatgtatcccgtttggaaatcttttctcgagggaacaatgcaggtagcccagtctcggatgaatatatgtgaaaactataaaaacttcatttctgagcctgcaaggacagtgagaagcttaaaagaacagcaactaaaaaggtgtgtggaccagttgacaaagatccaaactgaattacaagagacagtgaaagatttagctaaaggcaaaaagaaatactttgagactgaacagatggctcatgcagtacgagagaaagctgacatcgaggcaaaatctaaacttagtctttttcaatcaagaatcagtttacagaaggcaagtgtaaagttaaaagcccggcgatctgagtgtaattccaaagctacccacgcaaggaatgattatcttcttaccctagcggcagcaaatgcacatcaggatcgctactatcaaacagatttagttaacattatgaaggctcttgatggaaatgtgtatgatcatctcaaggattatttaatagccttcagccggactgagctagaaacatgccaagctgtgcagaacacattccagtttttattagaaaactccagcaaggtggtccgggactacaatcttcagctgtttttgcaagaaaacgctgtatttcacaaaccccagcccttccagttccagccttgtgacagtgatactagccgacagttagaatcagaaactgggaccacagaggagcacagtctaaataaggaagctcgaaaatgggccacacgtgtggcacgtgagcataaaaacattgttcaccaacaacgggttctaaatgatctggagtgtcatggagctgctgtatcagaacaaagccgagcagagctagaacagaaaatagatgaagctagagaaaatattcgtaaagcagagataattaaattgaaagctgaagcccggttggacctgctaaagcagattggtgtttctgtggacacatggctaaagagtgccatgaaccaagtaatggaagaactggaaaatgagcgatgggcccgccctcctgcagtgaccagtaatggcactttacactcgcttaatgcagataccgaaagagaagaaggcgaagagtttgaagataacatggatgttttcgatgacagcagttccagcccttctggcaccttaagaaattatccactcacctgcaaagttgtttattcctacaaggcttctcaaccagatgagttgaccattgaggaacatgaggtgttagaagtgattgaagatggagatatggaagactgggtaaaggctcgaaataaagttggccaagtgggttatgtgccagaaaagtacctacagtttcccacctcgaacagcctcctgagcatgctgcagtccctggccgctttggacagtcggtcacacacgtccagcaattccacggaagcagaactcgtttcaggcagcctcaacggagatgccagtgtatgttttgtgaaagcactttatgattatgagggccagacagatgatgagttatcttttcctgagggagcaataatccgtatcttgaacaaagaaaaccaagatgatgatggcttctgggaaggggaattcaatgggcgtattggagttttcccatcggtgctagtggaagaactttcagcctcagaaaatggtgacactccatggatgagagagattcagatctctccttcccccaagccacacgcctccctgcctccactgccgttgtacgaccagcctcccagcagcccctaccccagcccagataagaggagctccctgtactttccccggtctccttcagcaaacgaaaaaagccttcatgctgagtcaccaggattctcacaggcatcaaggcatactcctgagacctcatatggcaaactgcgacctgtccgggcagctccccctccacctacacagaatcaccgaaggccagcagagaagattgaagatgtggaaatcacactggtgtgatgatgggcttgcccatccattactgctacaatcaaggccaggcttggagtttggccagtcttgttttttaggcacctttgcatgatgatgactcttgaacagagcaaaaaacaaggaggattatgtgtgactgggtggcctggtagactcctcccacgttttgaatatttcgtgccttttttttttgttgtcattttctatgtcatttctcctaccatagcacaaatcctagcggaccctaggagcaaagaggggggcagccctcatgcctaacagtggtctgtttttatatgagactcaagaacaggcctcattccagggcacagtccctaaattactgatcatgtgcactcgtacagtatattactgtgaccacaaggatgtggcaaagattctcatctttcttcaagtggcttttgctcatctgattgagaattaatcagatcatgttggctacataaggaaacagaaggagggatttcaggagaggctggctcctccccaaggttagtccccagactgagaaagtgaaaccttattgggaaaaattggactgccctgaatttagcaccaattgcattaacgcacatctcttccacaactaacagacttaaaataacagtgtccttcgtattaatatctgtgccattcatttagaattagcagagctaatatggaggggctgaactagtagccacatcttgttcatcacatagactaatagaaaggaggctgtggctaaagcagaaatggaacttccggatctgaaattagccaatataatgttcttttgtatttgggtatttttcatcttaatttttacagcatatactcttcttaccagtatccttagaatccaaatgtctagataagttgaggacacatacctgcattgttgagcttctctactggggacgccccggcattattttattcccaagccagcagaccggcccagacagccaggctgtggctggtccagaccaactgctatggtggaaaatgcagcttccaggtcccactaccctgacatttccgtggaaggaagaacctggtggctcgtggaggaaaccagctttctatgagaaaggactgaaggattgcgcaccctgcacaagtacagattgaccaggaaaagacaagtgtcttctgtgtgtcacagggaaagccaggagtggccttctctgcaggccagcaagcctgcagcagcaggtgcccccacgtcaggtgctgactgtctgctgtccgctcctgtagaaggtagggagcacaatacctagggactaagggatgttcgccggttgtggtttgttttttttttttttccttggttaagaaatcaaatttgcagaatttaatctacaagttgtattatgctttgaaaactccatccctcctaagaatcttaaaaaacttgaaatgctcgccaaatgtccccatgggatttttgaccaaaagtaaggtgataactgaagaaatttttagttctttgatcacttcagtgacaatacccattaatgaatcttctccatgatttggggttttttttcgttgttgttttttacacttcttaacctgttgatctatttgaggtcttttgtgtttatcaaacttattcttaagtttaaaaaagaaattaaaagggtggtttttttaagattttaaagtttgctaacatattaaaaatcttcaaatgcttattaaatagagcagttcttgccacccagtcttgtattctgtctttagctagccaaattgtccttgaatttgggttttccacaacctcaaagggttatttgaaatcttttgttgtattttaaaatattttttggaagagctgctaattttattttaaaaaacaaagttgtgaaaacatgcctcctttttaaaaaataacccctccatccaggatatggaatccagcaccacagtgcacaggtcagggctcggagggagcctctgtgcagatgtgctttctttacagtggctgtaaaaagtttgtatttattatgtataaaatgttgaataataaaaaaaatggaatta

SEQ ID NO: 7327 - DNA, 4509 bp, Homo sapiens
  source 1..4509: mol_type = unassigned DNA; mol_type = unassigned DNA
gtccgcctgccgcccgctggcctgctccctccggggcaagtcttgcttcttaagcgctcctttcacacacgcgcgcgctcgctgggccgtcccctcctctccggccctcctcctcctcctggtccttgctaacgctgccgtcggggaggattgatgtcccttcagcatcatgcagccgccgccgaggaaggtgaaagttacacaagaactgaaaaacattcaagttgagcagatgacaaaacttcaagccaaacatcaagcagaatgtgatttgcttgaagatatgaggacattcagtcagaagaaggctgctattgaaagagagtatgcacagggtatgcagaagttggctagtcaatacctgaagagagattggcctggagtaaaagctgatgatcggaatgattacaggagcatgtatcccgtttggaaatcttttctcgagggaacaatgcaggtagcccagtctcggatgaatatatgtgaaaactataaaaacttcatttctgagcctgcaaggacagtgagaagcttaaaagaacagcaactaaaaaggtgtgtggaccagttgacaaagatccaaactgaattacaagagacagtgaaagatttagctaaaggcaaaaagaaatactttgagactgaacagatggctcatgcagtacgagagaaagctgacatcgaggcaaaatctaaacttagtctttttcaatcaagaatcagtttacagaaggcaagtgtaaagttaaaagcccggcgatctgagtgtaattccaaagctacccacgcaaggaatgattatcttcttaccctagcggcagcaaatgcacatcaggatcgctactatcaaacagatttagttaacattatgaaggctcttgatggaaatgtgtatgatcatctcaaggattatttaatagccttcagccggactgagctagaaacatgccaagctgtgcagaacacattccagtttttattagaaaactccagcaaggtggtccgggactacaatcttcagctgtttttgcaagaaaacgctgtatttcacaaaccccagcccttccagttccagccttgtgacagtgatactagtttaaaagccgcccaactggtggatattgagctctcccctgtcagtgctctgagaatgaccatagctgagagccgacagttagaatcagaaactgggaccacagaggagcacagtctaaataaggaagctcgaaaatgggccacacgtgtggcacgtgagcataaaaacattgttcaccaacaacgggttctaaatgatctggagtgtcatggagctgctgtatcagaacaaagccgagcagagctagaacagaaaatagatgaagctagagaaaatattcgtaaagcagagataattaaattgaaagctgaagcccggttggacctgctaaagcagattggtgtttctgtggacacatggctaaagagtgccatgaaccaagtaatggaagaactggaaaatgagcgatgggcccgccctcctgcagtgaccagtaatggcactttacactcgcttaatgcagataccgaaagagaagaaggcgaagagtttgaagataacatggatgttttcgatgacagcagttccagcccttctggcaccttaagaaattatccactcacctgcaaagttgtttattcctacaaggcttctcaaccagatgagttgaccattgaggaacatgaggtgttagaagtgattgaagatggagatatggaagactgggtaaaggctcgaaataaagttggccaagtgggttatgtgccagaaaagtacctacagtttcccacctcgaacagcctcctgagcatgctgcagtccctggccgctttggacagtcggtcacacacgtccagcaattccacggaagcagaactcgtttcaggcagcctcaacggagatgccagtgtatgttttgtgaaagcactttatgattatgagggccagacagatgatgagttatcttttcctgagggagcaataatccgtatcttgaacaaagaaaaccaagatgatgatggcttctgggaaggggaattcaatgggcgtattggagttttcccatcggtgctagtggaagaactttcagcctcagaaaatggtgacactccatggatgagagagattcagatctctccttcccccaagccacacgcctccctgcctccactgccgttgtacgaccagcctcccagcagcccctaccccagcccagataagaggagctccctgtactttccccggtctccttcagcaaacgaaaaaagccttcatgctgagtcaccaggattctcacaggcatcaaggcatactcctgagacctcatatggcaaactgcgacctgtccgggcagctccccctccacctacacagaatcaccgaaggccagcagagaagattgaagatgtggaaatcacactggtgtgatgatgggcttgcccatccattactgctacaatcaaggccaggcttggagtttggccagtcttgttttttaggcacctttgcatgatgatgactcttgaacagagcaaaaaacaaggaggattatgtgtgactgggtggcctggtagactcctcccacgttttgaatatttcgtgccttttttttttgttgtcattttctatgtcatttctcctaccatagcacaaatcctagcggaccctaggagcaaagaggggggcagccctcatgcctaacagtggtctgtttttatatgagactcaagaacaggcctcattccagggcacagtccctaaattactgatcatgtgcactcgtacagtatattactgtgaccacaaggatgtggcaaagattctcatctttcttcaagtggcttttgctcatctgattgagaattaatcagatcatgttggctacataaggaaacagaaggagggatttcaggagaggctggctcctccccaaggttagtccccagactgagaaagtgaaaccttattgggaaaaattggactgccctgaatttagcaccaattgcattaacgcacatctcttccacaactaacagacttaaaataacagtgtccttcgtattaatatctgtgccattcatttagaattagcagagctaatatggaggggctgaactagtagccacatcttgttcatcacatagactaatagaaaggaggctgtggctaaagcagaaatggaacttccggatctgaaattagccaatataatgttcttttgtatttgggtatttttcatcttaatttttacagcatatactcttcttaccagtatccttagaatccaaatgtctagataagttgaggacacatacctgcattgttgagcttctctactggggacgccccggcattattttattcccaagccagcagaccggcccagacagccaggctgtggctggtccagaccaactgctatggtggaaaatgcagcttccaggtcccactaccctgacatttccgtggaaggaagaacctggtggctcgtggaggaaaccagctttctatgagaaaggactgaaggattgcgcaccctgcacaagtacagattgaccaggaaaagacaagtgtcttctgtgtgtcacagggaaagccaggagtggccttctctgcaggccagcaagcctgcagcagcaggtgcccccacgtcaggtgctgactgtctgctgtccgctcctgtagaaggtagggagcacaatacctagggactaagggatgttcgccggttgtggtttgttttttttttttttccttggttaagaaatcaaatttgcagaatttaatctacaagttgtattatgctttgaaaactccatccctcctaagaatcttaaaaaacttgaaatgctcgccaaatgtccccatgggatttttgaccaaaagtaaggtgataactgaagaaatttttagttctttgatcacttcagtgacaatacccattaatgaatcttctccatgatttggggttttttttcgttgttgttttttacacttcttaacctgttgatctatttgaggtcttttgtgtttatcaaacttattcttaagtttaaaaaagaaattaaaagggtggtttttttaagattttaaagtttgctaacatattaaaaatcttcaaatgcttattaaatagagcagttcttgccacccagtcttgtattctgtctttagctagccaaattgtccttgaatttgggttttccacaacctcaaagggttatttgaaatcttttgttgtattttaaaatattttttggaagagctgctaattttattttaaaaaacaaagttgtgaaaacatgcctcctttttaaaaaataacccctccatccaggatatggaatccagcaccacagtgcacaggtcagggctcggagggagcctctgtgcagatgtgctttctttacagtggctgtaaaaagtttgtatttattatgtataaaatgttgaataataaaaaaaatggaatt

SEQ ID NO: 7328 - DNA, 3154 bp, Homo sapiens
  source 1..3154: mol_type = unassigned DNA; mol_type = unassigned DNA
ggcggcgcaggcggccgaccgggagcgcggacaacgcggctgcggctaacccgccgcccggccggctgagaccctcgcgcccctgctcctggggcccccgccccctcgccgtctccgcctccttcctcacacacccccgggccgcccgggccgcccgggccccaagccttcccggtgctcctccctcgtctcctcacactcgctctctggctggggtccgcctgccgcccgctggcctgctccctccggggcaagtcttgcttcttaagcgctcctttcacacacgcgcgcgctcgctgggccgtcccctcctctccggccctcctcctcctcctggtccttgctaacgctgccgtcggggaggattgatgtcccttcagcatcatgcagccgccgccgaggaaggtgaaagttacacaagaactgaaaaacattcaagttgagcagatgacaaaacttcaagccaaacatcaagcagaatgtgatttgcttgaagatatgaggacattcagtcagaagaaggctgctattgaaagagagtatgcacagggtatgcagaagttggctagtcaatacctgaagagagattggcctggagtaaaagctgatgatcggaatgattacaggagcatgtatcccgtttggaaatcttttctcgagggaacaatgcaggtagcccagtctcggatgaatatatgtgaaaactataaaaacttcatttctgagcctgcaaggacagtgagaagcttaaaagaacagcaactaaaaaggtgtgtggaccagttgacaaagatccaaactgaattacaagagacagtgaaagatttagctaaaggcaaaaagaaatactttgagactgaacagatggctcatgcagtacgagagaaagctgacatcgaggcaaaatctaaacttagtctttttcaatcaagaatcagtttacagaaggcaagtgtaaagttaaaagcccggcgatctgagtgtaattccaaagctacccacgcaaggaatgattatcttcttaccctagcggcagcaaatgcacatcaggatcgctactatcaaacagatttagttaacattatgaaggctcttgatggaaatgtgtatgatcatctcaaggattatttaatagccttcagccggactgagctagaaacatgccaagctgtgcagaacacattccagtttttattagaaaactccagcaaggtggtccgggactacaatcttcagctgtttttgcaagaaaacgctgtatttcacaaaccccagcccttccagttccagccttgtgacagtgatactagccgacagttagaatcagaaactgggaccacagaggagcacagtctaaataaggaagctcgaaaatgggccacacgtgtggcacgtgagcataaaaacattgttcaccaacaacgggttctaaatgatctggagtgtcatggagctgctgtatcagaacaaagccgagcagagctagaacagaaaatagatgaagctagagaaaatattcgtaaagcagagataattaaattgaaagctgaagcccggttggacctgctaaagcagattggtgtttctgtggacacatggctaaagagtgccatgaaccaagtaatggaagaactggaaaatgagcgatgggcccgccctcctgcagtgaccagtaatggcactttacactcgcttaatgcagataccgaaagagaagaaggcgaagagtttgaagataacatggatgttttcgatgacagcagttccagcccttctggcaccttaagaaattatccactcacctgcaaagttgtttattcctacaaggcttctcaaccagatgagttgaccattgaggaacatgaggtgttagaagtgattgaagatggagatatggaagactgggtaaaggctcgaaataaagttggccaagtgggttatgtgccagaaaagtacctacagtttcccacctcgaacagcctcctgagcatgctgcagtccctggccgctttggacagtcggtcacacacgtccagcaattccacggaagcagaactcgtttcaggcagcctcaacggagatgccagtgtatgttttgtgaaagcactttatgattatgagggccagacagatgatgagttatcttttcctgagggagcaataatccgtatcttgaacaaagaaaaccaagatgatgatggcttctgggaaggggaattcaatgggcgtattggagttttcccatcggtgctagtggaagaactttcagcctcagaaaatggtgacactccatggatgagagagattcagatctctccttcccccaagccacacgcctccctgcctccactgccgttgtacgaccagcctcccagcagcccctaccccagcccagataagaggagctccctgtactttccccggtctccttcagcaaacgaaaaaagccttcatgctgagtcaccaggattctcacaggcatcaaggcatactcctgagacctcatatggcaaactgcgacctgtccgggcagctccccctccacctacacagaatcaccgaaggccagcagagaagattgaagatgtggaaatcacactggtgtgatgatgggcttgcccatccattactgctacaatcaaggccaggcttggagtttggccagtcttgttttttaggcacctttgcatgatgatgactcttgaacagagcaaaaaacaaggaggattatgtgtgactgggtggcctggtagactcctcccacgttttgaatatttcgtgccttttttttttgttgtcattttctatgtcatttctcctaccatagcacaaatcctagcggaccctaggagcaaagaggggggcagccctcatgcctaacagtggtctgtttttatatgagactcaagaacaggcctcattccagggcacagtccctaaattactgatcatgtgcactcgtacagtatattactgtgaccacaaggatgtggcaaagattctcatctttcttcaagtggcttttgctcatctgattgagaattaatcagatcatgttggctacataaggaaacagaaggagggatttcaggagaggctggctcctccccaaggttagtccccagactgagaaagtgaaaccttattgggaaaa

SEQ ID NO: 7329 - DNA, 932 bp, Homo sapiens
  source 1..932: mol_type = unassigned DNA; mol_type = unassigned DNA
tgaccattgaggaacatgaggtgttagaagtgattgaagatggagatatggaagactgggtaaaggctcgaaataaagttggccaagtgggttatgtgccagaaaagtacctacagtttcccacctcgaacagcctcctgagcatgctgcagtccctggccgctttggacagtcggtcacacacgtccagcaattccacggaagcagaactcgtttcaggcagcctcaacggagatgccagtgatctctccttcccccaagccacacgcctccctgcctccactgccgttgtacgaccagcctcccagcagcccctaccccagcccagataagaggagctccctgtactttccccggtctccttcagcaaacgaaaaaagccttcatgctgagtcaccaggattctcacaggcatcaaggcatactcctgagacctcatatggcaaactgcgacctgtccgggcagctccccctccacctacacagaatcaccgaaggccagcagagaagattgaagatgtggaaatcacactggtgtgatgatgggcttgcccatccattactgctacaatcaaggccaggcttggagtttggccagtcttgttttttaggcacctttgcatgatgatgactcttgaacagagcaaaaaacaaggaggattatgtgtgactgggtggcctggtagactcctcccacgttttgaatatttcgtgccttttttttttgttgtcattttctatgtcatttctcctaccatagcacaaatcctagcggaccctaggagcaaagaggggggcagccctcatgcctaacagtggtctgtttttatatgagactcaagaacaggcctcattccagggcacagtccctaaattactgatcatgtgcactcgtacagtatattactgtgaccacaaggatgtggcaaaga

SEQ ID NO: 7330 - DNA, 2215 bp, Homo sapiens
  source 1..2215: mol_type = unassigned DNA; mol_type = unassigned DNA
gctgccgtcggggaggattgatgtcccttcagcatcatgcagccgccgccgaggaaggtgaaagttacacaagaactgaaaaacattcaagttgagcagatgacaaaacttcaagccaaacatcaagcagaatgtgatttgcttgaagatatgaggacattcagtcagaagaaggctgctattgaaagagagtatgcacagggtatgcagaagttggctagtcaatacctgaagagagattggcctggagtaaaagctgatgatcggaatgattacagtgtgtggaccagttgacaaagatccaaactgaattacaagagacagtgaaagatttagctaaaggcaaaaagaaatactttgagactgaacagatggctcatgcagtacgagagaaagctgacatcgaggcaaaatctaaacttagtctttttcaatcaagaatcagtttacagaaggcaagtgtaaagttaaaagcccggcgatctgagtgtaattccaaagctacccacgcaaggaatgattatcttcttaccctagcggcagcaaatgcacatcaggatcgctactatcaaacagatttagttaacattatgaaggctcttgatggaaatgtgtatgatcatctcaaggattatttaatagccttcagccggactgagctagaaacatgccaagctgtgcagaacacattccagtttttattagaaaactccagcaaggtggtccgggactacaatcttcagctgtttttgcaagaaaacgctgtatttcacaaaccccagcccttccagttccagccttgtgacagtgatactagtttaaaagccgcccaactggtggatattgagctctcccctgtcagtgctctgagaatgaccatagctgagagccgacagttagaatcagaaactgggaccacagaggagcacagtctaaataaggaagctcgaaaatgggccacacgtgtggcacgtgagcataaaaacattgttcaccaacaacgggttctaaatgatctggagtgtcatggagctgctgtatcagaacaaagccgagcagagctagaacagaaaatagatgaagctagagaaaatattcgtaaagcagagataattaaattgaaagctgaagcccggttggacctgctaaagcagattggtgtttctgtggacacatggctaaagagtgccatgaaccaagtaatggaagaactggaaaatgagcgatgggcccgccctcctgcagtgaccagtaatggcactttacactcgcttaatgcagataccgaaagagaagaaggcgaagagtttgaagataacatggatgttttcgatgacagcagttccagcccttctggcaccttaagaaattatccactcacctgcaaagttgtttattcctacaaggcttctcaaccagatgagttgaccattgaggaacatgaggtgttagaagtgattgaagatggagatatggaagactgggtaaaggctcgaaataaagttggccaagtgggttatgtgccagaaaagtacctacagtttcccacctcgaacagcctcctgagcatgctgcagtccctggccgctttggacagtcggtcacacacgtccagcaattccacggaagcagaactcgtttcaggcagcctcaacggagatgccagtgtatgttttgtgaaagcactttatgattatgagggccagacagatgatgagttatcttttcctgagggagcaataatccgtatcttgaacaaagaaaaccaagatgatgatggcttctgggaaggggaattcaatgggcgtattggagttttcccatcggtgctagtggaagaactttcagcctcagaaaatggtgacactccatggatgagagagattcagatctctccttcccccaagccacacgcctccctgcctccactgccgttgtacgaccagcctcccagcagcccctaccccagcccagataagaggagctccctgtactttccccggtctccttcagcaaacgaaaaaagccttcatgctgagtcaccaggattctcacaggcatcaaggcatactcctgagacctcatatggcaaactgcgacctgtccgggcagctccccctccacctacacagaatcaccgaaggccagcagagaagattgaagatgtggaaatcacactggtgtgatgatgggcttgcccatccattactgctac

SEQ ID NO: 7331 - DNA, 1867 bp, Homo sapiens
  source 1..1867: mol_type = unassigned DNA; mol_type = unassigned DNA
aagcagaatgtgatttgcttgaagatatgaggacattcagtcagaagaaggctgctattgaaagagagtatgcacagtattccattgtatggatataccacagtttatccattttcctgttgatggacatggtatgcagaagttggctagtcaatacctgaagagagattggcctggagtaaaagctgatgatcggaatgattacaggagcatgtatcccgtttggaaatcttttctcgagggaacaatgcaggtagcccagtctcggatgaatatatgtgaaaactataaaaacttcatttctgagcctgcaaggacagtgagaagcttaaaagaacagcaactaaaaaggtgtgtggaccagttgacaaagatccaaactgaattacaagagacagtgaaagatttagctaaaggcaaaaagaaatactttgagactgaacagatggctcatgcagtacgagagaaagctgacatcgaggcaaaatctaaacttagtctttttcaatcaagaatcagtttacagaaggcaagtgtaaagttaaaagcccggcgatctgagtgtaattccaaagctacccacgcaaggaatgattatcttcttaccctagcggcagcaaatgcacatcaggatcgctactatcaaacagatttagttaacattatgaaggctcttgatggaaatgtgtatgatcatctcaaggattatttaatagccttcagccggactgagctagaaacatgccaagctgtgcagaacacattccagtttttattagaaaactccagcaaggtggtccgggactacaatcttcagctgtttttgcaagaaaacgctgtatttcacaaaccccagcccttccagttccagccttgtgacagtgatactagccgacagttagaatcagaaactgggaccacagaggagcacagtctaaataaggaagctcgaaaatgggccacacgtgtggcacgtgagcataaaaacattgttcaccaacaacgggttctaaatgatctggagtgtcatggagctgctgtatcagaacaaagccgagcagagctagaacagaaaatagatgaagctagagaaaatattcgtaaagcagagataattaaattgaaagctgaagcccggttggacctgctaaagcagattggtgtttctgtggacacatggctaaagagtgccatgaaccaagtaatggaagaactggaaaatgagcgatgggcccgccctcctgcagtgaccagtaatggcactttacactcgcttaatgcagataccgaaagagaagaaggcgaagagtttgaagataacatggatgttttcgatgacagcagttccagcccttctggcaccttaagaaattatccactcacctgcaaagttgtttattcctacaaggcttctcaaccagatgagttgaccattgaggaacatgaggtgttagaagtgattgaagatggagatatggaagactgggtaaaggctcgaaataaagttggccaagtgggttatgtgccagaaaagtacctacagtttcccacctcgaacagcctcctgagcatgctgcagtccctggccgctttggacagtcggtcacacacgtccagcaattccacggaagcagaactcgtttcaggcagcctcaacggagatgccagtggtaaagactgaaacaaggcactctttatttggtcacgtttgacctaaactgtattgccctggagtaagccttcagtaggataaaaagcacaactttcctcctgtcctataatatgcttttctttatatggtcacgtttgtcctgcacagtagaaccctaaagttaatcattcatcagtgagtaaaaaaattacaact

SEQ ID NO: 7332 - DNA, 578 bp, Homo sapiens
  source 1..578: mol_type = unassigned DNA; mol_type = unassigned DNA
ggttctaaatgatctggagtgtcatggagctgctgtatcagaacaaagccgagcagagctagaacagaaaatagatgaagctagagaaaatattcgtaaagcagagataattaaattgaaagctgaagcccggttggacctgctaaagcagattggtgtttctgtggacacatggctaaagagtgccatgaaccaagtaatggaagaactggaaaatgagcgatgggcccgccctcctgcagtgaccagtaatggcactttacactcgataccgaaagagaagaaggcgaagagtttgaagataacatggatgttttcgatgacagcagttccagcccttctggcaccttaagaaattatccactcacctgcaaagttgtttattcctacaaggcttctcaaccagatgagttgaccattgaggaacatgaggtgttagaagtgattgaagatggagatatggaagactgggtaaaggctcgaaataaagttggccaagtgggttatgtgccagaaaagtacctacagtttcccacctcgaacagcctcctgagcatgctgcagtccctggccgcttt

SEQ ID NO: 7333 - DNA, 321 bp, Homo sapiens
  source 1..321: mol_type = unassigned DNA; mol_type = unassigned DNA
ctgaacagatggctcatgcagtacgagagaaagctgacatcgaggcaaaatctaaacttagtctttttcaatcaagaatcagtttacagaaggcaagtgtaaagttaaaagcccggcgatctgagtgtaattccaaagctacccacgcaaggaatgattatcttcttaccctagcggcagcaaatgcacatcaggatcgctactatcaaacagatttagttaacattatgaaggtgcggcaaacatttgttatctagtggttattgatgtagaagatacaagagtgatgtaagaaataaaataatgactcaaactgggaaa

SEQ ID NO: 7334 - DNA, 587 bp, Homo sapiens
  source 1..587: mol_type = unassigned DNA; mol_type = unassigned DNA
tagtcaccgcctccccaccccaagggaaaacaaattaaggattgacgggtcctgcctcgtccccggctgaggggcgaggaggctgtcgtgctgtcttcagaaaagcgaggaccgggcccgggaggtgaaagttacacaagaactgaaaaacattcaagttgagcagatgacaaaacttcaagccaaacatcaagcagaatgtgatttgcttgaagatatgaggacattcagtcagaagaaggctgctattgaaagagagtatgcacagggtatgcagaagttggctagtcaatacctgaagagagattggcctggagtaaaagctgatgatcggaatgattacaggagcatgtatcccgtttggaaatcttttctcgagggaacaatgcaggtagcccagtctcggatgaatatatgtgaaaactataaaaacttcatttctgagcctgcaaggacagtgagaagcttaaaagaacagcaactaaaaaggtgtgtggaccagttgacaaagatccaaactgaattacaagagacagtgaaagatttagctaaaggcaaaaagaaatactttgagactgaacagatgg

SEQ ID NO: 7335 - DNA, 741 bp, Homo sapiens
  source 1..741: mol_type = unassigned DNA; mol_type = unassigned DNA
ggccttttcacggttttaggctctacagagagcggctgcagagctcacccggctggcaggagccaccgaggccggacacgtgggcgacttattgaccaagtggggaggaagcagccccgcactgctctcccgactgcggaccaccgttgggctcctgcgcatcctaagccccaccgcctcacctccagtccccacagcgttcgcgctcccagccggggtccagccggccggtgagcgcctggggaccgcagaggtgagagtcgcgcccgggagtccgccgcctgcgccaggatggagttcgtgaaatgccttggccaccccgaagagttctacaacctggtgcgcttccggatcgggggcaagcggaaggtgatgcccaagatggaccaggactcgctcagcagcagcctgaaaacttgctacaagtatctcaatcagaccagtcgcagtttcgcagctgttatccaggcgctggatggggaaatgcgcaacgcagtgtgcatattttatctggttctccgagctctggacacactggaagatgacatgaccatcagtgtggaaaagaaggtcccgctgttacacaactttcactctttcctttaccaaccagactggcggttcatggagagcaaggagaaggatcgccaggtgctggaggacttcccaacgatctcccttgagtttagaaatctggctgagaaataccaaacagtgattgccgacatttgccggagaatg

SEQ ID NO: 7336 - DNA, 2176 bp, Homo sapiens
  source 1..2176: mol_type = unassigned DNA; mol_type = unassigned DNA
aatcagcgcccgtcagcccaccccacgaggccgcagctagccccgctggcggccgaggccggttgaagtgggcggagcggcgggcggggcgtcgccgtactaggcctgccccctgtccggccagcccctcgaagcacctactccacaggtccagccggccggtgagcgcctggggaccgcagaggtgagagtcgcgcccgggagtccgccgcctgcgccaggatggagttcgtgaaatgccttggccaccccgaagagttctacaacctggtgcgcttccggatcgggggcaagcggaaggtgatgcccaagatggaccaggactcgctcagcagcagcctgaaaacttgctacaagtatctcaatcagaccagtcgcagtttcgcagctgttatccaggcgctggatggggaaatgcgcaacgcagtgtgcatattttatctggttctccgagctctggacacactggaagatgacatgaccatcagtgtggaaaagaaggtcccgctgttacacaactttcactctttcctttaccaaccagactggcggttcatggagagcaaggagaaggatcgccaggtgctggaggacttcccaacgatctcccttgagtttagaaatctggctgagaaataccaaacagtgattgccgacatttgccggagaatgggcattgggatggcagagtttttggataagcatgtgacctctgaacaggagtgggacaagtactgccactatgttgctgggctggtcggaattggcctttcccgtcttttctcagcctcagagtttgaagaccccttagttggtgaagatacagaacgtgccaactctatgggcctgtttttgcagaaaacaaacatcatccgtgactatctggaagaccagcaaggaggaagagagttctggcctcaagaggtttggagcaggtatgttaagaagttaggggattttgctaagccggagaatattgacttggccgtgcagtgcctgaatgaacttataaccaatgcactgcaccacatcccagatgtcatcacctacctttcgagactcagaaaccagagtgtgtttaacttctgtgctattccacaggtgatggccattgccactttggctgcctgttataataaccagcaggtgttcaaaggggcagtgaagattcggaaagggcaagcagtgaccctgatgatggatgccaccaatatgccagctgtcaaagccatcatatatcagtatatggaagagatttatcatagaatccccgactcagacccatcttctagcaaaacaaggcagatcatctccaccatccggacgcagaatcttcccaactgtcagctgatttcccgaagccactactcccccatctacctgtcgtttgtcatgcttttggctgccctgagctggcagtacctgaccactctctcccaggtaacagaagactatgttcagactggagaacactgatcccaaatttgtccatagctgaagtccaccataaagtggatttactttttttctttaaggatggatgttgtgttctctttatttttttcctactactttaatccctaaaagaacgctgtgtggctgggacctttaggaaagtgaaatgcaggtgagaagaacctaaacatgaaaggaaagggtgcctcatcccagcaacctgtccttgtgggtgatgatcactgtgctgcttgtggctcatggcagagcattcagtgccacggtttaggtgaagtcgctgcatatgtgactgtcatgagatcctacttagtatgatcctggctagaatgataattaaaagtatttaatttgaagcaccatttgaatgttcgtaatagtagaaaatgatgtgaattttctttctgttcggctcctatttttctcatcattttgttttctttaattgggttgaatggagtagatagaaatatttatggtttaggtaacagttagatgtttcctaagaatgcaaactgccttttccacacaaaggctgggaataaaattctgggtattctcgtattctcatttaaaggagtttagctttcagagagaaacagcaggattgcttttgaccttttagaagattggtctccagtaaaggtggacatttttgagatttttataataaagaatttaattgctctgcatttgtcaagta

SEQ ID NO: 7337 - DNA, 1558 bp, Homo sapiens
  source 1..1558: mol_type = unassigned DNA; mol_type = unassigned DNA
gcagctagccccgctggcggccgaggccggttgaagtgggcggagcggcgggcggggcgtcgccgtactaggcctgccccctgtccggccagcccctcgaagcacctactccacaggtccagccggccggtgagcgcctggggaccgcagaggtgagagtcgcgcccgggagtccgccgcctgcgccaggatggagttcgtgaaatgccttggccaccccgaagagttctacaacctggtgcgcttccggatcgggggcaagcggaagcctcagagtttgaagaccccttagttggtgaagatacagaacgtgccaactctatgggcctgtttttgcagaaaacaaacatcatccgtgactatctggaagaccagcaaggaggaagagagttctggcctcaagaggtttggagcaggtatgttaagaagttaggggattttgctaagccggagaatattgacttggccgtgcagtgcctgaatgaacttataaccaatgcactgcaccacatcccagatgtcatcacctacctttcgagactcagaaaccagagtgtgtttaacttctgtgctattccacaggtgatggccattgccactttggctgcctgttataataaccagcaggtgttcaaaggggcagtgaagattcggaaagggcaagcagtgaccctgatgatggatgccaccaatatgccagctgtcaaagccatcatatatcagtatatggaagagatttatcatagaatccccgactcagacccatcttctagcaaaacaaggcagatcatctccaccatccggacgcagaatcttcccaactgtcagctgatttcccgaagccactactcccccatctacctgtcgtttgtcatgcttttggctgccctgagctggcagtacctgaccactctctcccaggtaacagaagactatgttcagactggagaacactgatcccaaatttgtccatagctgaagtccaccataaagtggatttactttttttctttaaggatggatgttgtgttctctttatttttttcctactactttaatccctaaaagaacgctgtgtggctgggacctttaggaaagtgaaatgcaggtgagaagaacctaaacatgaaaggaaagggtgcctcatcccagcaacctgtccttgtgggtgatgatcactgtgctgcttgtggctcatggcagagcattcagtgccacggtttaggtgaagtcgctgcatatgtgactgtcatgagatcctacttagtatgatcctggctagaatgataattaaaagtatttaatttgaagcaccatttgaatgttcgtaatagtagaaaatgatgtgaattttctttctgttcggctcctatttttctcatcattttgttttctttaattgggttgaatggagtagatagaaatatttatggtttaggtaacagttagatgtttcctaagaatgcaaactgccttttccacacaaaggctgggaataaaattctgggtattctcgtattctcatttaaaggagtttagctttcagagagaaacagca

SEQ ID NO: 7338 - DNA, 1393 bp, Homo sapiens
  source 1..1393: mol_type = unassigned DNA; mol_type = unassigned DNA
tcgaagcacctactccacaggtccagccggccggtgagcgcctggggaccgcagaggtgagagtcgcgcccgggagtccgccgcctgcgccaggatggagttcgtgaaatgccttggccaccccgaagagttctacaacctggtgcgcttccggatcgggggcaagcggaaggtgatgcccaagatggaccaggactcgctcagcagcagcctgaaaacttgctacaagtatctcaatcagaccagtcgcagtttcgcagctgttatccaggcgctggatggggaaatgcgcaacgcagtgtgcatattttatctggttctccgagctctggacacactggaagatgacatgaccatcagtgtggaaaagaaggtcccgctgttacacaactttcactctttcctttaccaaccagactggcggttcatggagagcaaggagaaggatcgccaggtgctggaggacttcccaacgtactgccactatgttgctgggctggtcggaattggcctttcccgtcttttctcagcctcagagtttgaagaccccttagttggtgaagatacagaacgtgccaactctatgggcctgtttttgcagaaaacaaacatcatccgtgactatctggaagaccagcaaggaggaagagagttctggcctcaagaggtttggagcaggtatgttaagaagttaggggattttgctaagccggagaatattgacttggccgtgcagtgcctgaatgaacttataaccaatgcactgcaccacatcccagatgtcatcacctacctttcgagactcagaaaccagagtgtgtttaacttctgtgctattccacaggtgatggccattgccactttggctgcctgttataataaccagcaggtgttcaaaggggcagtgaagattcggaaagggcaagcagtgaccctgatgatggatgccaccaatatgccagctgtcaaagccatcatatatcagtatatggaagagatttatcatagaatccccgactcagacccatcttctagcaaaacaaggcagatcatctccaccatccggacgcagaatcttcccaactgtcagctgatttcccgaagccactactcccccatctacctgtcgtttgtcatgcttttggctgccctgagctggcagtacctgaccactctctcccaggtaacagaagactatgttcagactggagaacactgatcccaaatttgtccatagctgaagtccaccataaagtggatttactttttttctttaaggatggatgttgtgttctctttatttttttcctactactttaatccctaaaagaacgctgtgtggctgggacctttaggaaagtgaaatgcaggtgagaagaacctaaacatgaaa

SEQ ID NO: 7339 - DNA, 898 bp, Homo sapiens
  source 1..898: mol_type = unassigned DNA; mol_type = unassigned DNA
gaagcacctactccacaggtccagccggccggtgagcgcctggggaccgcagaggtgagagtcgcgcccgggagtccgccgcctgcgccaggatggagttcgtgaaatgccttggccaccccgaagagttctacaacctggtgcgcttccggatcgggggcaagcggaaggtgatgcccaagatggaccagactggcggttcatggagagcaaggagaaggatcgccaggtgctggaggacttcccaacgatctcccttgagtttagaaatctggctgagaaataccaaacagtgattgccgacatttgccggagaatgggcattgggatggcagagtttttggataagcatgtgacctctgaacaggagtgggacaagtactgccactatgttgctgggctggtcggaattggcctttcccgtcttttctcagcctcagagtttgaagaccccttagttggtgaagatacagaacgtgccaactctatgggcctgtttttgcagaaaacaaacatcatccgtgactatctggaagaccagcaaggaggaagagagttctggcctcaagaggtttggagcaggtatgttaagaagttaggggattttgctaagccggagaatattgacttggccgtgcagtgcctgaatgaacttataaccaatgcactgcaccacatcccagatgtcatcacctacctttcgagactcagaaaccagagtgtgtttaacttctgtgctattccacaggtgatggccattgccactttggctgcctgttataataaccagcaggtgttcaaaggggcagtgaagattcggaaagggcaagcagtgaccctgatgatggatgccaccaatatgccagctgtcaaagccatcatatatcagtatatggaa

SEQ ID NO: 7340 - DNA, 1773 bp, Homo sapiens
  source 1..1773: mol_type = unassigned DNA; mol_type = unassigned DNA
gaagcacctactccacaggtccagccggccggtgagcgcctggggaccgcagaggtgagagtcgcgcccgggagtccgccgcctgcgccaggatggagttcgtgaaatgccttggccaccccgaagagttctacaacctggtgcgcttccggatcgggggcaagcggaaggtgatgcccaagatggaccagataacatcacatgaaggccgtttctggaatgaagtctgactcctccagtttcaccacctcttccggagctctccccgccttgctgccttccatcgcttcatcctcggtgcttcctgagttttaaaatcgcctatctacgcttccaagttccaatgagttatctaacgtctatggattagctaggtggttggtggaaggactcgctcagcagcagcctgaaaacttgctacaagtatctcaatcagaccagtcgcagtttcgcagctgttatccaggcgctggatggggaaatgcgcaacgcagtgtgcatattttatctggttctccgagctctggacacactggaagatgacatgaccatcagtgtggaaaagaaggtcccgctgttacacaactttcactctttcctttaccaaccagactggcggttcatggagagcaaggagaaggatcgccaggtgctggaggacttcccaacgatctcccttgagtttagaaatctggctgagaaataccaaacagtgattgccgacatttgccggagaatgggcattgggatggcagagtttttggataagcatgtgacctctgaacaggagtgggacaagtactgccactatgttgctgggctggtcggaattggcctttcccgtcttttctcagcctcagagtttgaagaccccttagttggtgaagatacagaacgtgccaactctatgggcctgtttttgcagaaaacaaacatcatccgtgactatctggaagaccagcaaggaggaagagagttctggcctcaagaggtttggagcaggtatgttaagaagttaggggattttgctaagccggagaatattgacttggccgtgcagtgcctgaatgaacttataaccaatgcactgcaccacatcccagatgtcatcacctacctttcgagactcagaaaccagagtgtgtttaacttctgtgctattccacaggtgatggccattgccactttggctgcctgttataataaccagcaggtgttcaaaggggcagtgaagattcggaaagggcaagcagtgaccctgatgatggatgccaccaatatgccagctgtcaaagccatcatatatcagtatatggaagagatttatcatagaatccccgactcagacccatcttctagcaaaacaaggcagatcatctccaccatccggacgcagaatcttcccaactgtcagctgatttcccgaagccactactcccccatctacctgtcgtttgtcatgcttttggctgccctgagctggcagtacctgaccactctctcccaggtaacagaagactatgttcagactggagaacactgatcccaaatttgtccatagctgaagtccaccataaagtggatttactttttttctttaaggatggatgttgtgttctctttatttttttcctactactttaatccctaaaagaacgctgtgtggctgggacctttaggaaagtgaaatgcaggtgagaagaacctaaacatgaaaggaaagggtgcctcatcccagcaacctgtccttgtgggtgatgatcactgtgctgc

SEQ ID NO: 7341 - DNA, 932 bp, Homo sapiens
  source 1..932: mol_type = unassigned DNA; mol_type = unassigned DNA
acctactccacaggtccagccggccggtgagcgcctggggaccgcagaggtgagagtcgcgcccgggagtccgccgcctgcgccaggatggagttcgtgaaatgccttggccaccccgaagagttctacaacctggtgcgcttccggatcgggggcaagcggaaggtgatgcccaagatggaccagcaacgcagtgtgcatattttatctggttctccgagctctggacacactggaagatgacatgaccatcagtgtggaaaagaaggtcccgctgttacacaactttcactctttcctttaccaaccagactggcggttcatggagagcaaggagaaggatcgccaggtgctggaggacttcccaacgatctcccttgagtttagaaatctggctgagaaataccaaacagtgattgccgacatttgccggagaatgggcattgggatggcagagtttttggataagcatgtgacctctgaacaggagtgggacaagtactgccactatgttgctgggctggtcggaattggcctttcccgtcttttctcagcctcagagtttgaagaccccttagttggtgaagatacagaacgtgccaactctatgggcctgtttttgcagaaaacaaacatcatccgtgactatctggaagaccagcaaggaggaagagagttctggcctcaagaggtttggagcaggtatgttaagaagttaggggattttgctaagccggagaatattgacttggccgtgcagtgcctgaatgaacttataaccaatgcactgcaccacatcccagatgtcatcacctacctttcgagactcagaaaccagagtgtgtttaacttctgtgctattccacaggtgatggccattgccactttggctgcctgttataataaccagcaggtgttcaaaggggcagtga

SEQ ID NO: 7342 - DNA, 1596 bp, Homo sapiens
  source 1..1596: mol_type = unassigned DNA; mol_type = unassigned DNA
cggccggtgagcgcctggggaccgcagaggtgagagtcgcgcccgggagtccgccgcctgcgccaggatggagttcgtgaaatgccttggccaccccgaagagttctacaacctggtgcgcttccggatcgggggcaagcggaaggactcgctcagcagcagcctgaaaacttgctacaagtatctcaatcagaccagtcgcagtttcgcagctgttatccaggcgctggatggggaaatgcgcaacgcagtgtgcatattttatctggttctccgagctctggacacactggaagatgacatgaccatcagtgtggaaaagaaggtcccgctgttacacaactttcactctttcctttaccaaccagactggcggttcatggagagcaaggagaaggatcgccaggtgctggaggacttcccaacgatctcccttgagtttagaaatctggctgagaaataccaaacagtgattgccgacatttgccggagaatgggcattgggatggcagagtttttggataagcatgtgacctctgaacaggagtgggacaagtactgccactatgttgctgggctggtcggaattggcctttcccgtcttttctcagcctcagagtttgaagaccccttagttggtgaagatacagaacgtgccaactctatgggcctgtttttgcagaaaacaaacatcatccgtgactatctggaagaccagcaaggaggaagagagttctggcctcaagaggtttggagcaggtatgttaagaagttaggggattttgctaagccggagaatattgacttggccgtgcagtgcctgaatgaacttataaccaatgcactgcaccacatcccagatgtcatcacctacctttcgagactcagaaaccagagtgtgtttaacttctgtgctattccacaggtgatggccattgccactttggctgcctgttataataaccagcaggtgttcaaaggggcagtgaagattcggaaagggcaagcagtgaccctgatgatggatgccaccaatatgccagctgtcaaagccatcatatatcagtatatggaagagatttatcatagaatccccgactcagacccatcttctagcaaaacaaggcagatcatctccaccatccggacgcagaatcttcccaactgtcagctgatttcccgaagccactactcccccatctacctgtcgtttgtcatgcttttggctgccctgagctggcagtacctgaccactctctcccaggtaacagaagactatgttcagactggagaacactgatcccaaatttgtccatagctgaagtccaccataaagtggatttactttttttctttaaggatggatgttgtgttctctttatttttttcctactactttaatccctaaaagaacgctgtgtggctgggacctttaggaaagtgaaatgcaggtgagaagaacctaaacatgaaaggaaagggtgcctcatcccagcaacctgtccttgtgggtgatgatcactgtgctgcttgtggctcatggcagagcattcagtgccacggtttaggtgaagtcgctgcatatgtgactgtcat

SEQ ID NO: 7343 - DNA, 810 bp, Homo sapiens
  source 1..810: mol_type = unassigned DNA; mol_type = unassigned DNA
gccggtgagcgcctggggaccgcagaggtgagagtcgcgcccgggagtccgccgcctgcgccaggatggagttcgtgaaatgccttggccaccccgaagagttctacaacctggtgcgcttccggatcgggggcaagcggaaggtgatgcccaagatggaccagggcccgggtggacgcggccgtcctggctgacctgtccctgcccccgcaagccgccctgggcatgagcgacttttgcgtggttcccggtggttgcgctccccgtttcgtcccctccgtgagcatcggcgcttaccgataacatcacatgaaggccgtttctggaatgaagtctgactcctccagtttcaccacctcttccggagctctccccgccttgctgccttccatcgcttcatcctcggtgcttcctgagttttaaaatcgcctatctacgcttccaagttccaatgagttatctaacgtctatggattagctaggtggttggtggaaggtcagaacttggttttacttagatttttatctgcctcatgcctgtactatttgtttaatgaatgcataggaggtgtttttattccaacaagaaaattattcgtacgcgattattgaatgaatagacaaattcagccaagttcttctggtctggaccagcctggctgatttctgtaacttttttgggccaacaggacagtagcaaatgtgactcaggccgaggcttgataggtgcctgaacatcggagtctttctttcagtgtccatgtgcttcagtaaacacactagaaaataaatttctggtttttgtcccca

SEQ ID NO: 7344 - DNA, 642 bp, Homo sapiens
  source 1..642: mol_type = unassigned DNA; mol_type = unassigned DNA
ggaccgcagaggtgagagtcgcgcccgggagtccgccgcctgcgccaggatggagttcgtgaaatgccttggccaccccgaagagttctacaacctggtgcgcttccggatcgggggcaagcggaaggtgatgcccaagatggaccagataacatcacatgaaggccgtttctggaatgaagtctgactcctccagtttcaccacctcttccggagctctccccgccttgctgccttccatcgcttcatcctcggtgcttcctgagttttaaaatcgcctatctacgcttccaagttccaatgagttatctaacgtctatggattagctaggtggttggtggaaggtcagaacttggttttacttagatttttatctgcctcatgcctgtactatttgtttaatgaatgcataggaggtgtttttattccaacaagaaaattattcgtacgcgattattgaatgaatagacaaattcagccaagttcttctggtctggaccagcctggctgatttctgtaacttttttgggccaacaggacagtagcaaatgtgactcaggccgaggcttgataggtgcctgaacatcggagtctttctttcagtgtccatgtgcttcagtaaacacactagaaaataaatt

SEQ ID NO: 7345 - DNA, 2013 bp, Homo sapiens
  source 1..2013: mol_type = unassigned DNA; mol_type = unassigned DNA
atctggggcaaggggcgcggcgagcagggccgacgcctgggtgttcccgtccccctttcctcgagccttccccctgtagggcccgggtggacgcggccgtcctggctgacctgtccctgcccccgcaagccgccctgggcatgagcgacttttgcgtggttcccggtggttgcgctccccgtttcgtcccctccgtgagcatcggcgcttaccggtattttaacccgagggttacacatctgaggcaatgtgggtgggttacgcgggagaggacgagtgagttttttggtaagcggaatgaactatgcagataacatcacatgaaggccgtttctggaatgaagtctgactcctccagtttcaccacctcttccggagctctccccgccttgctgccttccatcgcttcatcctcggtgcttcctgagttttaaaatcgcctatctacgcttccaagttccaatgagttatctaacgtctatggattagctaggtggttggtggaaggactcgctcagcagcagcctgaaaacttgctacaagtatctcaatcagaccagtcgcagtttcgcagctgttatccaggcgctggatggggaaatgcgcaacgcagtgtgcatattttatctggttctccgagctctggacacactggaagatgacatgaccatcagtgtggaaaagaaggtcccgctgttacacaactttcactctttcctttaccaaccagactggcggttcatggagagcaaggagaaggatcgccaggtgctggaggacttcccaacgatctcccttgagtttagaaatctggctgagaaataccaaacagtgattgccgacatttgccggagaatgggcattgggatggcagagtttttggataagcatgtgacctctgaacaggagtgggacaagtactgccactatgttgctgggctggtcggaattggcctttcccgtcttttctcagcctcagagtttgaagaccccttagttggtgaagatacagaacgtgccaactctatgggcctgtttttgcagaaaacaaacatcatccgtgactatctggaagaccagcaaggaggaagagagttctggcctcaagaggtttggagcaggtatgttaagaagttaggggattttgctaagccggagaatattgacttggccgtgcagtgcctgaatgaacttataaccaatgcactgcaccacatcccagatgtcatcacctacctttcgagactcagaaaccagagtgtgtttaacttctgtgctattccacaggtgatggccattgccactttggctgcctgttataataaccagcaggtgttcaaaggggcagtgaagattcggaaagggcaagcagtgaccctgatgatggatgccaccaatatgccagctgtcaaagccatcatatatcagtatatggaagagatttatcatagaatccccgactcagacccatcttctagcaaaacaaggcagatcatctccaccatccggacgcagaatcttcccaactgtcagctgatttcccgaagccactactcccccatctacctgtcgtttgtcatgcttttggctgccctgagctggcagtacctgaccactctctcccaggtaacagaagactatgttcagactggagaacactgatcccaaatttgtccatagctgaagtccaccataaagtggatttactttttttctttaaggatggatgttgtgttctctttatttttttcctactactttaatccctaaaagaacgctgtgtggctgggacctttaggaaagtgaaatgcaggtgagaagaacctaaacatgaaaggaaagggtgcctcatcccagcaacctgtccttgtgggtgatgatcactgtgctgcttgtggctcatggcagagcattcagtgccacggtttaggtgaagtcgctgcatatgtgactgtcatgagatcctacttagtatgatcctggctagaatgataattaaaagtatttaatttg

SEQ ID NO: 7346 - DNA, 327 bp, Homo sapiens
  source 1..327: mol_type = unassigned DNA; mol_type = unassigned DNA
cgggtggacgcggccgtcctggctgacctgtccctgcccccgcaagccgccctgggcatgagcgacttttgcgtggttcccggtggttgcgctccccgtttcgtcccctccgtgagcatcggcgcttaccgcggaatgaactatgcagataacatcacatgaaggccgtttctggaatgaagtctgactcctccagtttcaccacctcttccggagctctccccgccttgctgccttccatcgcttcatcctcggtgcttcctgagttttaaaatcgcctatctacgcttccaagttccaatgagttatctaacgtctatggattag

SEQ ID NO: 7347 - DNA, 1761 bp, Homo sapiens
  source 1..1761: mol_type = unassigned DNA; mol_type = unassigned DNA
aattgatggcgggggagccggatgtcagtggatggaaaattattacgaggaaacacaggggtgtgcattcttgctgaaggcaggccagagttatcagacatcacctgagggatggagggggatgtggaacctaatcggctgtctagggtgatcagatactgaagttgggggattctggtcaaatcaatttagcaggattcttggtaaaactgggcgatgcaaagacagatgcgttgagtacaaagtccaggccttattgggaagaggatttcagcggagcccgagtagagtttggtctagggagactctgtcactgggaggacgagcgagccgctcggaagtgcgctgggttcccttagcggccagtgggttctggactcgctcagcagcagcctgaaaacttgctacaagtatctcaatcagaccagtcgcagtttcgcagctgttatccaggcgctggatggggaaatgcgcaacgcagtgtgcatattttatctggttctccgagctctggacacactggaagatgacatgaccatcagtgtggaaaagaaggtcccgctgttacacaactttcactctttcctttaccaaccagactggcggttcatggagagcaaggagaaggatcgccaggtgctggaggacttcccaacgatctcccttgagtttagaaatctggctgagaaataccaaacagtgattgccgacatttgccggagaatgggcattgggatggcagagtttttggataagcatgtgacctctgaacaggagtgggacaagtactgccactatgttgctgggctggtcggaattggcctttcccgtcttttctcagcctcagagtttgaagaccccttagttggtgaagatacagaacgtgccaactctatgggcctgtttttgcagaaaacaaacatcatccgtgactatctggaagaccagcaaggaggaagagagttctggcctcaagaggtttggagcaggtatgttaagaagttaggggattttgctaagccggagaatattgacttggccgtgcagtgcctgaatgaacttataaccaatgcactgcaccacatcccagatgtcatcacctacctttcgagactcagaaaccagagtgtgtttaacttctgtgctattccacaggtgatggccattgccactttggctgcctgttataataaccagcaggtgttcaaaggggcagtgaagattcggaaagggcaagcagtgaccctgatgatggatgccaccaatatgccagctgtcaaagccatcatatatcagtatatggaagagatttatcatagaatccccgactcagacccatcttctagcaaaacaaggcagatcatctccaccatccggacgcagaatcttcccaactgtcagctgatttcccgaagccactactcccccatctacctgtcgtttgtcatgcttttggctgccctgagctggcagtacctgaccactctctcccaggtaacagaagactatgttcagactggagaacactgatcccaaatttgtccatagctgaagtccaccataaagtggatttactttttttctttaaggatggatgttgtgttctctttatttttttcctactactttaatccctaaaagaacgctgtgtggctgggacctttaggaaagtgaaatgcaggtgagaagaacctaaacatgaaaggaaagggtgcctcatcccagcaacctgtccttgtgggtgatgatcactgtgctgct

SEQ ID NO: 7348 - DNA, 1890 bp, Homo sapiens
  source 1..1890: mol_type = unassigned DNA; mol_type = unassigned DNA
gcgtattcgagtagagggcgagcccgtcccgcccctcgtcgggcgcttcccagatctgcttgagtctatggaggaaaaactccgcggggtccgcgattcccatggccgcagccgcctgcggcaccaaggccatggccctcttcaagcgcaccttggtgctgagtcccgccgcggcgcccaggggcccgggcgcaggcaccgccccgcggggctgctgcttgcctcctgccgcctggccctgcaaggactggcctcggggagagggcggcaggctgtggagccgcctgccccagtcccactcccactcccactcccactcccactcccactcctgctcctcgacgtctcccaccgccgtgtgtgttgtctgcccgcaggactcgctcagcagcagcctgaaaacttgctacaagtatctcaatcagaccagtcgcagtttcgcagctgttatccaggcgctggatggggaaatgcgcaacgcagtgtgcatattttatctggttctccgagctctggacacactggaagatgacatgaccatcagtgtggaaaagaaggtcccgctgttacacaactttcactctttcctttaccaaccagactggcggttcatggagagcaaggagaaggatcgccaggtgctggaggacttcccaacgatctcccttgagtttagaaatctggctgagaaataccaaacagtgattgccgacatttgccggagaatgggcattgggatggcagagtttttggataagcatgtgacctctgaacaggagtgggacaagtactgccactatgttgctgggctggtcggaattggcctttcccgtcttttctcagcctcagagtttgaagaccccttagttggtgaagatacagaacgtgccaactctatgggcctgtttttgcagaaaacaaacatcatccgtgactatctggaagaccagcaaggaggaagagagttctggcctcaagaggtttggagcaggtatgttaagaagttaggggattttgctaagccggagaatattgacttggccgtgcagtgcctgaatgaacttataaccaatgcactgcaccacatcccagatgtcatcacctacctttcgagactcagaaaccagagtgtgtttaacttctgtgctattccacaggtgatggccattgccactttggctgcctgttataataaccagcaggtgttcaaaggggcagtgaagattcggaaagggcaagcagtgaccctgatgatggatgccaccaatatgccagctgtcaaagccatcatatatcagtatatggaagagatttatcatagaatccccgactcagacccatcttctagcaaaacaaggcagatcatctccaccatccggacgcagaatcttcccaactgtcagctgatttcccgaagccactactcccccatctacctgtcgtttgtcatgcttttggctgccctgagctggcagtacctgaccactctctcccaggtaacagaagactatgttcagactggagaacactgatcccaaatttgtccatagctgaagtccaccataaagtggatttactttttttctttaaggatggatgttgtgttctctttatttttttcctactactttaatccctaaaagaacgctgtgtggctgggacctttaggaaagtgaaatgcaggtgagaagaacctaaacatgaaaggaaagggtgcctcatcccagcaacctgtccttgtgggtgatgatcactgtgctgcttgtggctcatggcagagcattcagtgccacggtttaggtgaagtcgctgcatatgtgactgtcatgagatcctacttagtatgatcctggctagaatgataattaaaagtatttaatttgaagcacc

SEQ ID NO: 7349 - DNA, 712 bp, Homo sapiens
  source 1..712: mol_type = unassigned DNA; mol_type = unassigned DNA
gaaaaactccgcggggtccgcgattcccatggccgcagccgcctgcggcaccaaggccatggccctcttcaagcgcaccttggtgctgagtcccgccgcggcgcccaggggcccgggcgcaggcaccgccccgcggggctgctgcttgcctcctgccgcctggccctgcaaggactggcctcggggagagggcggcaggctgtggagccgcctgccccagtcccactcccactcccactcccactcccactcccactcctgctcctcgacgtctcccaccgccgtgtgtgttgtctgcccgcaggactcgctcagcagcagcctgaaaacttgctacaagtatctcaatcagaccagtcgcagtttcgcagctgttatccaggcgctggatggggaaatgcgcaacgcagtgtgcatattttatctggttctccgagctctggacacactggaagatgacatgaccatcagtgtggaaaagaaggtcccgctgttacacaactttcactctttcctttaccaaccagactggcggttcatggagagcaaggagaaggatcgccaggtgctggaggacttcccaacggtgagtggggttacgcatcttgtctacggactgttgtgttcataattgctaacgtggttgtccggtagcctccatacatgtggagaaaggttaaataagcattctgagggcagcataatgtgaggg

SEQ ID NO: 7350 - DNA, 768 bp, Homo sapiens
  source 1..768: mol_type = unassigned DNA; mol_type = unassigned DNA
cgattcccatggccgcagccgcctgcggcaccaaggccatggccctcttcaagcgcaccttggtgctgagtcccgccgcggcgcccaggggcccgggcgcaggcaccgccccgcggggctgctgcttgcctcctgccgcctggccctgcaaggactggcctcggggagagggcggcaggctgtggagccgcctgccccagtcccactcccactcccactcccactcccactcccactcctgctcctcgacgtctcccaccgccgtgtgtgttgtctgcccgcaggactcgctcagcagcagcctgaaaacttgctacaagtatctcaatcagaccagtcgcagtttcgcagctgttatccaggcgctggatggggaaatgcgcaacgcagtgtgcatattttatctggttctccgagctctggacacactggaagatgacatgaccatcagtgtggaaaagaaggtcccgctgttacacaactttcactctttcctttaccaaccagactggcggttcatggagagcaaggagaaggatcgccaggtgctggaggacttcccaacgatctcccttgagtttagaaatctggctgagaaataccaaacagtgattgccgacatttgccggagaatgggcattgggatggcagagtttttggataagcatgtgacctctgaacaggagtgggacaagtactgccactatgttgctgggctggtcggaattggcctttcccgtcttttctcagcctcagagtttgaagacc

SEQ ID NO: 7351 - DNA, 583 bp, Homo sapiens
  source 1..583: mol_type = unassigned DNA; mol_type = unassigned DNA
caggactcgctcagcagcagcctgaaaacttgctacaagtatctcaatcagaccagtcgcagtttcgcagctgttatccaggcgctggatggggaaatgcgcaacgcagtgtgcatattttatctggttctccgagctctggacacactggaagatgacatgaccatcagtgtggaaaagaaggtcccgctgttacacaactttcactctttcctttaccaaccagactggcggttcatggagagcaaggagaaggatcgccaggtgctggaggacttcccaacgatctcccttgagtttagaaatctggctgagaaataccaaacagtgattgccgacatttgccggagaatgggcattgggatggcagagtttttggataagcatgtgacctctgaacaggagtgggacaagcctcagagtttgaagaccccttagttggtgaagatacagaacgtgccaactctatgggcctgtttttgcagaaaacaaacatcatccgtgactatctggaagaccagcaaggaggaagagagttctggcctcaagaggtttggagcaggtatgttaagaagttagggga

SEQ ID NO: 7352 - DNA, 1909 bp, Homo sapiens
  source 1..1909: mol_type = unassigned DNA; mol_type = unassigned DNA
cttggcagctgaacctgcctgtgagcaggtcgtgtatttctcggcttcccttatccaactttgcatttctatttctagcatattgggttgattcttttgaagctgcctctgtgcacattacacccatgaacttagaccagttgcctttatgtatgatcgtatttatactgagaagttactgtgttttttgactttcttttctatttgctacatattagttcggtctaaacgtttggtcttctggtctccatagttctacattggttaaatgcaactcacttctgggagtagtggtgacattcaactagtaggctttttaataaactacagaagttcattactctcatcaacgcagtgtgcatattttatctggttctccgagctctggacacactggaagatgacatgaccatcagtgtggaaaagaaggtcccgctgttacacaactttcactctttcctttaccaaccagactggcggttcatggagagcaaggagaaggatcgccaggtgctggaggacttcccaacgatctcccttgagtttagaaatctggctgagaaataccaaacagtgattgccgacatttgccggagaatgggcattgggatggcagagtttttggataagcatgtgacctctgaacaggagtgggacaagtactgccactatgttgctgggctggtcggaattggcctttcccgtcttttctcagcctcagagtttgaagaccccttagttggtgaagatacagaacgtgccaactctatgggcctgtttttgcagaaaacaaacatcatccgtgactatctggaagaccagcaaggaggaagagagttctggcctcaagaggtttggagcaggtatgttaagaagttaggggattttgctaagccggagaatattgacttggccgtgcagtgcctgaatgaacttataaccaatgcactgcaccacatcccagatgtcatcacctacctttcgagactcagaaaccagagtgtgtttaacttctgtgctattccacaggtgatggccattgccactttggctgcctgttataataaccagcaggtgttcaaaggggcagtgaagattcggaaagggcaagcagtgaccctgatgatggatgccaccaatatgccagctgtcaaagccatcatatatcagtatatggaagagatttatcatagaatccccgactcagacccatcttctagcaaaacaaggcagatcatctccaccatccggacgcagaatcttcccaactgtcagctgatttcccgaagccactactcccccatctacctgtcgtttgtcatgcttttggctgccctgagctggcagtacctgaccactctctcccaggtaacagaagactatgttcagactggagaacactgatcccaaatttgtccatagctgaagtccaccataaagtggatttactttttttctttaaggatggatgttgtgttctctttatttttttcctactactttaatccctaaaagaacgctgtgtggctgggacctttaggaaagtgaaatgcaggtgagaagaacctaaacatgaaaggaaagggtgcctcatcccagcaacctgtccttgtgggtgatgatcactgtgctgcttgtggctcatggcagagcattcagtgccacggtttaggtgaagtcgctgcatatgtgactgtcatgagatcctacttagtatgatcctggctagaatgataattaaaagtatttaatttgaagcaccatttgaatgttcgtaatagtagaaaatgatgtgaattttctttctgttcggctcctatttttctcatcattttgttttctttaattgggttgaatggagtagatagaaatatttatggtttaggtaacagttagatgtttcctaaga

SEQ ID NO: 7353 - DNA, 1472 bp, Homo sapiens
  source 1..1472: mol_type = unassigned DNA; mol_type = unassigned DNA
gcacattacacccatgaacttagaccagttgcctttatgtatgatcgtatttatactgagaagttactgtgttttttgactttcttttctatttgctacatattagttcggtctaaacgtttggtcttctggtctccatagttctacattggttaaatgcaactcacttctgggagtagtggtgacattcaactagtaggctttttaataaactacagaagttcattactctcatgtaaggaaggaaaactaatgtaactttcgttaagtatgaaaagcgttggatatccttatagttctttagagttaagggtgagatgggtttagaaagtggccaggcacaagttattttaaaataaaaaatctttggctgtttgttccaatatattaatagttttcccttttttacagcaacgcagtgtgcatattttatctggttctccgagctctggacacactggaagatgacatgaccatcagtgtggaaaagaaggtcccgctgttacacaactttcactctttcctttaccaaccagactggcggttcatggagagcaaggagaaggatcgccaggtgctggaggacttcccaacgatctcccttgagtttagaaatctggctgagaaataccaaacagtgattgccgacatttgccggagaatgggcattgggatggcagagtttttggataagcatgtgacctctgaacaggagtgggacaagtactgccactatgttgctgggctggtcggaattggcctttcccgtcttttctcagcctcagagtttgaagaccccttagttggtgaagatacagaacgtgccaactctatgggcctgtttttgcagaaaacaaacatcatccgtgactatctggaagaccagcaaggaggaagagagttctggcctcaagaggtttggagcaggtatgttaagaagttaggggattttgctaagccggagaatattgacttggccgtgcagtgcctgaatgaacttataaccaatgcactgcaccacatcccagatgtcatcacctacctttcgagactcagaaaccagagtgtgtttaacttctgtgctattccacaggtgatggccattgccactttggctgcctgttataataaccagcaggtgttcaaaggggcagtgaagattcggaaagggcaagcagtgaccctgatgatggatgccaccaatatgccagctgtcaaagccatcatatatcagtatatggaagagatttatcatagaatccccgactcagacccatcttctagcaaaacaaggcagatcatctccaccatccggacgcagaatcttcccaactgtcagctgatttcccgaagccactactcccccatctacctgtcgtttgtcatgcttttggctgccctgagctggcagtacctgaccactctctcccaggtaacagaagactatgttcagactggagaacactgatccc

SEQ ID NO: 7354 - DNA, 570 bp, Homo sapiens
  source 1..570: mol_type = unassigned DNA; mol_type = unassigned DNA
aataccaaacagtgattgccgacatttgccggagaatgggcattgggatggcagagtttttggataagcatgtgacctctgaacaggagtgggacaagtgctttaaaaatcgtctcttacagtactgccactatgttgctgggctggtcggaattggcctttcccgtcttttctcagcctcagagtttgaagaccccttagttggtgaagatacagaacgtgccaactctatgggcctgtttttgcagaaaacaaacatcatccgtgactatctggaagaccagcaaggaggaagagagttctggcctcaagaggtttggagcaggtatgttaagaagttaggggattttgctaagccggagaatattgacttggccgtgcagtgcctgaatgaacttataaccaatgcactgcaccacatcccagatgtcatcacctacctttcgagactcagaaaccagagtgtgtttaacttctgtgctattccacaggtgatggccattgccactttggctgcctgttataataaccagcaggtgttcaaaggggcagtgaagattcggaaagggc

SEQ ID NO: 7355 - DNA, 418 bp, Homo sapiens
  source 1..418: mol_type = unassigned DNA; mol_type = unassigned DNA
gctaagccggagaatattgacttggccgtgcagtgcctgaatgaacttataaccaatgcactgcaccacatcccagatgtcatcacctacctttcgagactcagaaaccagagtgtgtttaacttctgtgctattccacaggtgatggccattgccactttggctgcctgttataataaccagcaggtgttcaaaggggcagtgaagattcggaaagggcaagcagtgaccctgatgatggatgccaccaatatgccagctgtcaaagccatcatatatcagtatatggaagaggtgggtttttatttaactacttggataatttgtagctacttttatgatttagtaatgtcactgtttaaccaggtttggatattagatgatcctaacaattcactatcctgtggcctaaagagac

SEQ ID NO: 7356 - DNA, 2368 bp, Homo sapiens
  source 1..2368: mol_type = unassigned DNA; mol_type = unassigned DNA
aatcagcgcccgtcagcccaccccacgaggccgcagctagccccgctggcggccgaggccggttgaagtgggcggagcggcgggcggggcgtcgccgtactaggcctgccccctgtccggccagcccctcgaagcacctactccacaggtccagccggccggtgagcgcctggggaccgcagaggtgagagtcgcgcccgggagtccgccgcctgcgccaggatggagttcgtgaaatgccttggccaccccgaagagttctacaacctggtgcgcttccggatcgggggcaagcggaaggtgatgcccaagatggaccagataacatcacatgaaggccgtttctggaatgaagtctgactcctccagtttcaccacctcttccggagctctccccgccttgctgccttccatcgcttcatcctcggtgcttcctgagttttaaaatcgcctatctacgcttccaagttccaatgagttatctaacgtctatggattagctaggtggttggtggaaggactcgctcagcagcagcctgaaaacttgctacaagtatctcaatcagaccagtcgcagtttcgcagctgttatccaggcgctggatggggaaatgcgcaacgcagtgtgcatattttatctggttctccgagctctggacacactggaagatgacatgaccatcagtgtggaaaagaaggtcccgctgttacacaactttcactctttcctttaccaaccagactggcggttcatggagagcaaggagaaggatcgccaggtgctggaggacttcccaacgatctcccttgagtttagaaatctggctgagaaataccaaacagtgattgccgacatttgccggagaatgggcattgggatggcagagtttttggataagcatgtgacctctgaacaggagtgggacaagtactgccactatgttgctgggctggtcggaattggcctttcccgtcttttctcagcctcagagtttgaagaccccttagttggtgaagatacagaacgtgccaactctatgggcctgtttttgcagaaaacaaacatcatccgtgactatctggaagaccagcaaggaggaagagagttctggcctcaagaggtttggagcaggtatgttaagaagttaggggattttgctaagccggagaatattgacttggccgtgcagtgcctgaatgaacttataaccaatgcactgcaccacatcccagatgtcatcacctacctttcgagactcagaaaccagagtgtgtttaacttctgtgctattccacaggtgatggccattgccactttggctgcctgttataataaccagcaggtgttcaaaggggcagtgaagattcggaaagggcaagcagtgaccctgatgatggatgccaccaatatgccagctgtcaaagccatcatatatcagtatatggaagagatttatcatagaatccccgactcagacccatcttctagcaaaacaaggcagatcatctccaccatccggacgcagaatcttcccaactgtcagctgatttcccgaagccactactcccccatctacctgtcgtttgtcatgcttttggctgccctgagctggcagtacctgaccactctctcccaggtaacagaagactatgttcagactggagaacactgatcccaaatttgtccatagctgaagtccaccataaagtggatttactttttttctttaaggatggatgttgtgttctctttatttttttcctactactttaatccctaaaagaacgctgtgtggctgggacctttaggaaagtgaaatgcaggtgagaagaacctaaacatgaaaggaaagggtgcctcatcccagcaacctgtccttgtgggtgatgatcactgtgctgcttgtggctcatggcagagcattcagtgccacggtttaggtgaagtcgctgcatatgtgactgtcatgagatcctacttagtatgatcctggctagaatgataattaaaagtatttaatttgaagcaccatttgaatgttcgtaatagtagaaaatgatgtgaattttctttctgttcggctcctatttttctcatcattttgttttctttaattgggttgaatggagtagatagaaatatttatggtttaggtaacagttagatgtttcctaagaatgcaaactgccttttccacacaaaggctgggaataaaattctgggtattctcgtattctcatttaaaggagtttagctttcagagagaaacagcaggattgcttttgaccttttagaagattggtctccagtaaaggtggacatttttgagatttttataataaagaatttaattgctctgcatttgtc

SEQ ID NO: 7357 - DNA, 2289 bp, Homo sapiens
  source 1..2289: mol_type = unassigned DNA; mol_type = unassigned DNA
aaaaacggtggcaacacgctgggtttgctttacaacgcttgggaagctttgttgtttgcaataaattttaatacttgtctgtttcggtctgcactgcctttatgagctgtaacactcacagggtaggtttgcagcttcactcctgaagccagtaagacaacgaacccactgggagaaacaaacaactccagacgcgccgacttaagagctgtaatactcgctgtgacggtctgcagcttcactcctgagccagcgagaccacgaacccaccagaaggaagaaactccgaacacatctgaacatcagaaggaacagactccggacacgccgcctttaagaactgtaacactcaccgcgagggtgggcggtttcattcctgaagtcagtgagaccaagaaccaaccaattccggacacacttggactcgacagactctaaggactcgctcagcagcagcctgaaaacttgctacaagtatctcaatcagaccagtcgcagtttcgcagctgttatccaggcgctggatggggaaatgcgcaacgcagtgtgcatattttatctggttctccgagctctggacacactggaagatgacatgaccatcagtgtggaaaagaaggtcccgctgttacacaactttcactctttcctttaccaaccagactggcggttcatggagagcaaggagaaggatcgccaggtgctggaggacttcccaacgatctcccttgagtttagaaatctggctgagaaataccaaacagtgattgccgacatttgccggagaatgggcattgggatggcagagtttttggataagcatgtgacctctgaacaggagtgggacaagtactgccactatgttgctgggctggtcggaattggcctttcccgtcttttctcagcctcagagtttgaagaccccttagttggtgaagatacagaacgtgccaactctatgggcctgtttttgcagaaaacaaacatcatccgtgactatctggaagaccagcaaggaggaagagagttctggcctcaagaggtttggagcaggtatgttaagaagttaggggattttgctaagccggagaatattgacttggccgtgcagtgcctgaatgaacttataaccaatgcactgcaccacatcccagatgtcatcacctacctttcgagactcagaaaccagagtgtgtttaacttctgtgctattccacaggtgatggccattgccactttggctgcctgttataataaccagcaggtgttcaaaggggcagtgaagattcggaaagggcaagcagtgaccctgatgatggatgccaccaatatgccagctgtcaaagccatcatatatcagtatatggaagagatttatcatagaatccccgactcagacccatcttctagcaaaacaaggcagatcatctccaccatccggacgcagaatcttcccaactgtcagctgatttcccgaagccactactcccccatctacctgtcgtttgtcatgcttttggctgccctgagctggcagtacctgaccactctctcccaggtaacagaagactatgttcagactggagaacactgatcccaaatttgtccatagctgaagtccaccataaagtggatttactttttttctttaaggatggatgttgtgttctctttatttttttcctactactttaatccctaaaagaacgctgtgtggctgggacctttaggaaagtgaaatgcaggtgagaagaacctaaacatgaaaggaaagggtgcctcatcccagcaacctgtccttgtgggtgatgatcactgtgctgcttgtggctcatggcagagcattcagtgccacggtttaggtgaagtcgctgcatatgtgactgtcatgagatcctacttagtatgatcctggctagaatgataattaaaagtatttaatttgaagcaccatttgaatgttcgtaatagtagaaaatgatgtgaattttctttctgttcggctcctatttttctcatcattttgttttctttaattgggttgaatggagtagatagaaatatttatggtttaggtaacagttagatgtttcctaagaatgcaaactgccttttccacacaaaggctgggaataaaattctgggtattctcgtattctcatttaaaggagtttagctttcagagagaaacagcaggattgcttttgaccttttagaagattggtctccagtaaaggtggacatttttgagatttttataataaagaatttaattgctctgcatttgtc

SEQ ID NO: 7358 - DNA, 2660 bp, Homo sapiens
  source 1..2660: mol_type = unassigned DNA; mol_type = unassigned DNA
aaaaacggtggcaacacgctgggtttgctttacaacgcttgggaagctttgttgtttgcaataaattttaatacttgtctgtttcggtctgcactgcctttatgagctgtaacactcacagggtaggtttgcagcttcactcctgaagccagtaagacaacgaacccactgggagaaacaaacaactccagacgcgccgacttaagagctgtaatactcgctgtgacggtctgcagcttcactcctgagccagcgagaccacgaacccaccagaaggaagaaactccgaacacatctgaacatcagaaggaacagactccggacacgccgcctttaagaactgtaacactcaccgcgagggtgggcggtttcattcctgaagtcagtgagaccaagaaccaaccaattccggacacacttggactcgacagactctaaggctctacagagagcggctgcagagctcacccggctggcaggagccaccgaggccggacacgtgggcgacttattgaccaagtggggaggaagcagccccgcactgctctcccgactgcggaccaccgttgggctcctgcgcatcctaagccccaccgcctcacctccagtccccacagcgttcgcgctcccagccggggtccagccggccggtgagcgcctggggaccgcagaggtgagagtcgcgcccgggagtccgccgcctgcgccaggatggagttcgtgaaatgccttggccaccccgaagagttctacaacctggtgcgcttccggatcgggggcaagcggaaggtgatgcccaagatggaccaggactcgctcagcagcagcctgaaaacttgctacaagtatctcaatcagaccagtcgcagtttcgcagctgttatccaggcgctggatggggaaatgcgcaacgcagtgtgcatattttatctggttctccgagctctggacacactggaagatgacatgaccatcagtgtggaaaagaaggtcccgctgttacacaactttcactctttcctttaccaaccagactggcggttcatggagagcaaggagaaggatcgccaggtgctggaggacttcccaacgatctcccttgagtttagaaatctggctgagaaataccaaacagtgattgccgacatttgccggagaatgggcattgggatggcagagtttttggataagcatgtgacctctgaacaggagtgggacaagtactgccactatgttgctgggctggtcggaattggcctttcccgtcttttctcagcctcagagtttgaagaccccttagttggtgaagatacagaacgtgccaactctatgggcctgtttttgcagaaaacaaacatcatccgtgactatctggaagaccagcaaggaggaagagagttctggcctcaagaggtttggagcaggtatgttaagaagttaggggattttgctaagccggagaatattgacttggccgtgcagtgcctgaatgaacttataaccaatgcactgcaccacatcccagatgtcatcacctacctttcgagactcagaaaccagagtgtgtttaacttctgtgctattccacaggtgatggccattgccactttggctgcctgttataataaccagcaggtgttcaaaggggcagtgaagattcggaaagggcaagcagtgaccctgatgatggatgccaccaatatgccagctgtcaaagccatcatatatcagtatatggaagagatttatcatagaatccccgactcagacccatcttctagcaaaacaaggcagatcatctccaccatccggacgcagaatcttcccaactgtcagctgatttcccgaagccactactcccccatctacctgtcgtttgtcatgcttttggctgccctgagctggcagtacctgaccactctctcccaggtaacagaagactatgttcagactggagaacactgatcccaaatttgtccatagctgaagtccaccataaagtggatttactttttttctttaaggatggatgttgtgttctctttatttttttcctactactttaatccctaaaagaacgctgtgtggctgggacctttaggaaagtgaaatgcaggtgagaagaacctaaacatgaaaggaaagggtgcctcatcccagcaacctgtccttgtgggtgatgatcactgtgctgcttgtggctcatggcagagcattcagtgccacggtttaggtgaagtcgctgcatatgtgactgtcatgagatcctacttagtatgatcctggctagaatgataattaaaagtatttaatttgaagcaccatttgaatgttcgtaatagtagaaaatgatgtgaattttctttctgttcggctcctatttttctcatcattttgttttctttaattgggttgaatggagtagatagaaatatttatggtttaggtaacagttagatgtttcctaagaatgcaaactgccttttccacacaaaggctgggaataaaattctgggtattctcgtattctcatttaaaggagtttagctttcagagagaaacagcaggattgcttttgaccttttagaagattggtctccagtaaaggtggacatttttgagatttttataataaagaatttaattgctctgcatttgtc

SEQ ID NO: 7359 - DNA, 2462 bp, Homo sapiens
  source 1..2462: mol_type = unassigned DNA; mol_type = unassigned DNA
aaaaacggtggcaacacgctgggtttgctttacaacgcttgggaagctttgttgtttgcaataaattttaatacttgtctgtttcggtctgcactgcctttatgagctgtaacactcacagggtaggtttgcagcttcactcctgaagccagtaagacaacgaacccactgggagaaacaaacaactccagacgcgccgacttaagagctgtaatactcgctgtgacggtctgcagcttcactcctgagccagcgagaccacgaacccaccagaaggaagaaactccgaacacatctgaacatcagaaggaacagactccggacacgccgcctttaagaactgtaacactcaccgcgagggtgggcggtttcattcctgaagtcagtgagaccaagaaccaaccaattccggacacacttggactcgacagactctaaggtccagccggccggtgagcgcctggggaccgcagaggtgagagtcgcgcccgggagtccgccgcctgcgccaggatggagttcgtgaaatgccttggccaccccgaagagttctacaacctggtgcgcttccggatcgggggcaagcggaaggtgatgcccaagatggaccaggactcgctcagcagcagcctgaaaacttgctacaagtatctcaatcagaccagtcgcagtttcgcagctgttatccaggcgctggatggggaaatgcgcaacgcagtgtgcatattttatctggttctccgagctctggacacactggaagatgacatgaccatcagtgtggaaaagaaggtcccgctgttacacaactttcactctttcctttaccaaccagactggcggttcatggagagcaaggagaaggatcgccaggtgctggaggacttcccaacgatctcccttgagtttagaaatctggctgagaaataccaaacagtgattgccgacatttgccggagaatgggcattgggatggcagagtttttggataagcatgtgacctctgaacaggagtgggacaagtactgccactatgttgctgggctggtcggaattggcctttcccgtcttttctcagcctcagagtttgaagaccccttagttggtgaagatacagaacgtgccaactctatgggcctgtttttgcagaaaacaaacatcatccgtgactatctggaagaccagcaaggaggaagagagttctggcctcaagaggtttggagcaggtatgttaagaagttaggggattttgctaagccggagaatattgacttggccgtgcagtgcctgaatgaacttataaccaatgcactgcaccacatcccagatgtcatcacctacctttcgagactcagaaaccagagtgtgtttaacttctgtgctattccacaggtgatggccattgccactttggctgcctgttataataaccagcaggtgttcaaaggggcagtgaagattcggaaagggcaagcagtgaccctgatgatggatgccaccaatatgccagctgtcaaagccatcatatatcagtatatggaagagatttatcatagaatccccgactcagacccatcttctagcaaaacaaggcagatcatctccaccatccggacgcagaatcttcccaactgtcagctgatttcccgaagccactactcccccatctacctgtcgtttgtcatgcttttggctgccctgagctggcagtacctgaccactctctcccaggtaacagaagactatgttcagactggagaacactgatcccaaatttgtccatagctgaagtccaccataaagtggatttactttttttctttaaggatggatgttgtgttctctttatttttttcctactactttaatccctaaaagaacgctgtgtggctgggacctttaggaaagtgaaatgcaggtgagaagaacctaaacatgaaaggaaagggtgcctcatcccagcaacctgtccttgtgggtgatgatcactgtgctgcttgtggctcatggcagagcattcagtgccacggtttaggtgaagtcgctgcatatgtgactgtcatgagatcctacttagtatgatcctggctagaatgataattaaaagtatttaatttgaagcaccatttgaatgttcgtaatagtagaaaatgatgtgaattttctttctgttcggctcctatttttctcatcattttgttttctttaattgggttgaatggagtagatagaaatatttatggtttaggtaacagttagatgtttcctaagaatgcaaactgccttttccacacaaaggctgggaataaaattctgggtattctcgtattctcatttaaaggagtttagctttcagagagaaacagcaggattgcttttgaccttttagaagattggtctccagtaaaggtggacatttttgagatttttataataaagaatttaattgctctgcatttgtc

SEQ ID NO: 7360 - DNA, 1987 bp, Homo sapiens
  source 1..1987: mol_type = unassigned DNA; mol_type = unassigned DNA
agggcccgggtggacgcggccgtcctggctgacctgtccctgcccccgcaagccgccctgggcatgagcgacttttgcgtggttcccggtggttgcgctccccgtttcgtcccctccgtgagcatcggcgcttaccggactcgctcagcagcagcctgaaaacttgctacaagtatctcaatcagaccagtcgcagtttcgcagctgttatccaggcgctggatggggaaatgcgcaacgcagtgtgcatattttatctggttctccgagctctggacacactggaagatgacatgaccatcagtgtggaaaagaaggtcccgctgttacacaactttcactctttcctttaccaaccagactggcggttcatggagagcaaggagaaggatcgccaggtgctggaggacttcccaacgatctcccttgagtttagaaatctggctgagaaataccaaacagtgattgccgacatttgccggagaatgggcattgggatggcagagtttttggataagcatgtgacctctgaacaggagtgggacaagtactgccactatgttgctgggctggtcggaattggcctttcccgtcttttctcagcctcagagtttgaagaccccttagttggtgaagatacagaacgtgccaactctatgggcctgtttttgcagaaaacaaacatcatccgtgactatctggaagaccagcaaggaggaagagagttctggcctcaagaggtttggagcaggtatgttaagaagttaggggattttgctaagccggagaatattgacttggccgtgcagtgcctgaatgaacttataaccaatgcactgcaccacatcccagatgtcatcacctacctttcgagactcagaaaccagagtgtgtttaacttctgtgctattccacaggtgatggccattgccactttggctgcctgttataataaccagcaggtgttcaaaggggcagtgaagattcggaaagggcaagcagtgaccctgatgatggatgccaccaatatgccagctgtcaaagccatcatatatcagtatatggaagagatttatcatagaatccccgactcagacccatcttctagcaaaacaaggcagatcatctccaccatccggacgcagaatcttcccaactgtcagctgatttcccgaagccactactcccccatctacctgtcgtttgtcatgcttttggctgccctgagctggcagtacctgaccactctctcccaggtaacagaagactatgttcagactggagaacactgatcccaaatttgtccatagctgaagtccaccataaagtggatttactttttttctttaaggatggatgttgtgttctctttatttttttcctactactttaatccctaaaagaacgctgtgtggctgggacctttaggaaagtgaaatgcaggtgagaagaacctaaacatgaaaggaaagggtgcctcatcccagcaacctgtccttgtgggtgatgatcactgtgctgcttgtggctcatggcagagcattcagtgccacggtttaggtgaagtcgctgcatatgtgactgtcatgagatcctacttagtatgatcctggctagaatgataattaaaagtatttaatttgaagcaccatttgaatgttcgtaatagtagaaaatgatgtgaattttctttctgttcggctcctatttttctcatcattttgttttctttaattgggttgaatggagtagatagaaatatttatggtttaggtaacagttagatgtttcctaagaatgcaaactgccttttccacacaaaggctgggaataaaattctgggtattctcgtattctcatttaaaggagtttagctttcagagagaaacagcaggattgcttttgaccttttagaagattggtctccagtaaaggtggacatttttgagatttttataataaagaatttaattgctctgcatttgtc

SEQ ID NO: 7361 - DNA, 5816 bp, Homo sapiens
  source 1..5816: mol_type = unassigned DNA; mol_type = unassigned DNA
ccgccccgcgcctaggctgttgctggccgcggccgccgccctcccccggcccaatggcgtggcggcacagtcagtgatgtgacgctcaggcttgtccggcccccggctcgcagcccattacaccatccgtcgcagcagtcgctgcagccgctgcagtccgagccgactaagggcgggaggcagctcgggtggcggggcgtggcgaacagcgcggccggattcattcctttggggcgcggagcatggaggagctgtgcggccgcaggcggagcagggcggcccgggcggcggtggggacaacggtttccctttgaaggggacggacaaagcccgagtgaccagcggcggcggggaggactagtccccgggcagtttggtgccctggttgtcagatgttggaaagcagtaggacggaacatactcttcgtggttgtgtatccgttctggggtgcagcaattaacattggactttggttcctgtgactcttgcctgtgtcgatagagttaaactggagctctgctttgaaagataaataaagcacagcctctcaactggacataaatggatctaaagacagcagtatttaacgcagctcgggatggcaaactccggcttctcaccaaattgttggcaagcaaatccaaagaggaggtttcctccttgatctctgaaaaaacaaatggggccacgccactcttgatggccgccaggtatgggcaccttgacatggtggaattcctcctagagcaatgcagtgcctccatagaagttgggggctccgtcaattttgatggcgaaaccattgagggggctccccctttatgggccgcttctgcagcaggacatctgaaggtggtccagtccttgttaaatcatggagcatctgtcaacaacacgactttaaccaattcaactcctcttcgagctgcgtgtttcgatggccatttggaaatagtgaagtaccttgtagaacacaaagctgatttggaagtgtcaaaccgacatgggcatacgtgcttgatgatttcatgttacaaaggacataaagagattgctcagtatttacttgaaaagggggcagatgttaatagaaaaagtgtcaaaggtaatactgcattgcatgattgtgcagaatctggaagtttggacatcatgaagatgcttcttatgtattgtgccaagatggaaaaggatggttatggaatgactccccttctctcagcaagtgtgactggtcacacaaatattgtggattttctgacacaccatgcacagaccagcaagacagaacgtattaatgctctagagcttctgggagctacatttgtagacaaaaaaagagatctgcttggggctttgaaatactggaaaaaggcaatgaacatgaggtacagtgataggactaatattattagtaaaccagtgccacagacactaataatggcttatgattatgccaaggaagtgaacagtgcagaagagctagaaggtcttattgctgatcctgatgagatgagaatgcaggcactattaatcagagaacgtattcttggtccttctcatcctgatacctcttactatattagatatagaggcgctgtctatgcagactctggaaatttcaaacgatgcatcaacctatggaagtatgctttggatatgcagcagagcaatttggatcctttaagcccaatgaccgccagcagcttattatcttttgcagaactattctcctttatgctacaggatagggctaaaggcctgctgggtactactgttacatttgatgatcttatgggcatactttgcaaaagcgtccttgaaatagagcgagctatcaaacaaactcagtgtccagctgacccattacagttaaataaggccctttctattattttgcacttaatttgcttgttagagaaagttccttgtactctagaacaagaccatttcaaaaagcagactatatacaggtttcttaagctgcatccaaggggaaagaataacttcagccctcttcatctggctgtggacaagaatactacatgtgtagggcggtaccctgtttgtaaatttccatctctacaagttactgcaatactgatagaatgtggtgctgatgtgaacgtcagagactcggatgacaacagtcccctgcatatcgctgctcttaacaaccatccagacatcatgaatctccttattaaatcaggtgcacattttgatgccacaaacttgcacaaacaaactgctagtgacttgctggatgagaaggaaatagctaaaaatttaatccagcctataaatcataccacattgcagtgtcttgctgctcgtgtcatagtgaatcatagaatatattataaagggcatatcccagaaaagctagagacttttgtttcccttcatagatgataacttgactgtattttagcactgttaaagcacgaattggtaacagttgtttcataaatgagcactgttgtgataacaccagcattcatttagcttgattgatatcattgtgctctcattggctaaagcattataagcatcaaatttacaacattggtttcccaatatttaatataaatataccatataatatattgtttgtgaattattgagaaatgtaacattcaaatttctaaaattgtctgccaaaggcttattcattctggttttgtttgctgttgggtgtttggggcagagttaaccatttctccatggtgtctttatactttactggtttgtgaattttatacaattgaaagtctttttttcttgcttctttcttctcttctcaagtttcccccctgtttctactttattgtttgtcctaaccatttctactacagttttttccttatggacccatactaggttgtacaaaccttaaggactcgttaccatttgcagttaccataagtgctttatcttctctatgcacaggcttaaacttgactgttgtatgttagcatattttctatgcagcagttggtcaacttcaactcaaaacactgttttcttatgtttgttacaaacttaattttttgaaagtactctgtagcatgacaatttttagagctgcaggttagctattatagctcaagcttttttgtttgtttttttcttcactttcttcacatctgaggtttctttctctaatccactgaaattattgtgtgctaaatttgggaaacagatctattctaactcattaacccagttgaaatttaggtctgtcatcttaatatatcatgcagtaaaaggaagaatctttttaaagtgacccacctttcatgctgctccagcattgtcctgcttgtgctgatggtgtgattaggtgtagagaatttgcttaaatttaacttcaaagttcatcacacagcttaatgagtcacattgaaatactcagtaattgaactgcaaatcacttttagttacaaaaagagctaaagcatgtcagtggcatgatgcttgccaagccagatctaggcatctaggataattaaggtattttagtatgcaatttactgccataatatcaaaggtcagtaacagtgttctttctttcttcaagcttatgtatacctttaaagataacttgcatgaattactttgattactttggtctcaattatttgtcaccccagttaaacatgaaaggttgcagtgcttcctgttcccttactggaagttagctttttcttttctctttcttcctttctttctctcactctttctttctctttctctttctctctctctctctctctcactcactcactcacagatttgctaatgccacagaaagggctcttttaacttaagataagtgaaaagtactaaaaaagattcaggtaattatcattcagcactttattgtaattcagaataaaatttatgatggcatatttgccctgcaaatgtcttaatgaagttgttctcaataaaaagctccttattgatttgagaaaaactcagtttacctgtgagttcaatgagctggatcactcacttggatttttgtgttgacattttattctgagggttgatgttacactatttaaggagtcatcaatgcaaacagtcacattaggtatgtcatcatctttagtcagtaaaaaccttgtaatgaggagtagtaaataaacaagagaacattagactttttggttaaataattgagatttaatttttaaaagatattcttactcatttgctaggttgtaaatttgatttcaccattaagaaaaggtaaattggatataaatgaacgatctccaactttttgatgaagaggttttactatctctcactgtgggaaaatttgatgaaatatttgaactgtcacatatattaagaatactttatgatttagaccaatattctagaaatatcaaatgtcagtatcttgaaatcatctgcctctaactttgtggtataagaattatatatgaataagctattatttttataaaggaaaactttgccattatagtaaattacattagttgatctcgataatttgaggataacagatgacaattgaatttttaattgatttagtatttcctcctcctctttgggggctgggtgggagggcttacatgctcttatagtgaggcacatctcactgttttgcagcagaatttgaattgtgcaactcctgtgtaaagtaaggatttctttaaatagcatttttgcaccagtaaaaatagataacttagaactcagtcttgataactgaaatgacttatttcacttagaatacatttctcccttctctgccatctccacaaatgccattgggaggttttgaaaaaccagttaatttaatagctcaaaattgtccctgattttattttcttttagggaaaattgtttcataaatgtgacactgataaagcctttgtcagaaagtattctcacaattatgagatggattataataaaatacttaaatttgtgttattttttgaaccacagatgagtaaatttaataatgaaccaattacactcttgagtctaactaaactgtacactgtagcacggtgttattgactggagttaatgtgtaagttattaacatttctatgaaaatgcccttttggggcctcctgaattttagatgttccactgttttgatcatttctataaaagaaatggtcattttacttagatgccagtctactttataaagacaaatggattatagacttaaaaatagtcatttttcttattcataaatctgacaggcataaacccaaatcaaagataatttggtgcccattatgaatttgaagttaagtgatagctcacttgtaaagtgactaccttaatgtgtatagagaccccagtctactattatttgggaaaattgtttaggttatatgggaaaagtagctctttaaaaatcatattgcccaacagaaaccttaggctgaatttacaggtatgataatttttgtaattaattttcttagaattgtgcaggctggatgagataatgacatactcttttacactgtaacagcagcattattgcctagaactttaaccattttagagttagatactaaggaaacaaactaattggtcatcatcattttctttttttctttttcttttttttttttttgcccttatgtgtcactaaacaactagtttctctcccttttgtcagttcccattgtgtattttttcaaaagaagtactgtattcggatgccagctaataaattgtcacacaatggaaaatcatatgccacaacattcattgtaaggtttaataaaattaaatttgcaccaaa

SEQ ID NO: 7362 - DNA, 3322 bp, Homo sapiens
  source 1..3322: mol_type = unassigned DNA; mol_type = unassigned DNA
aaaggaaacacaagttgcttttgataacacatgatgcaaagaaagaattagaaagaatgagcaatgaagccggtataaatgacaaacaagtgtccaaaggcccaagaagttactaccaaaagctttcaaacaatattggtttatctttaaagacacatccatagcatactttaaaaataaggaacttgaacaaggagaaccactagaaaaactaaatcttagaggctgcgaagttgtgcccgatgtaaatgtagcaggaagaaaatttggaatcaagttactaatccctgttgccgatggtatgaatgaaatgtatttgagatgtgaccatgagaatcaatacgcccaatggatggctgcctgcatgttggcatcgaagggcaaaaccatggcagacagctcctaccagccagaggtcctcaacatcctttcatttctgaggatgaaaaacaggaactctgcatctcaggtggcttccagtctcgaaaacatggatatgaacccagaatgttttgtgtcaccacggtgtgcaaaaagacacaaatccaaacagctggccgcccggatcctggaggcgcaccagaacgtggcccagatgcccctggtcgaagccaagctgcggttcatccaggcgtggcagtcactgcctgagtttggcctcacctactaccttgtcagatttaaaggaagcaaaaaagatgacattctgggagtttcatataacaggttgattaaaattgatgcagccaccgggattccagtgacaacatggagattcacaaatatcaaacagtggaatgtaaactgggaaacccggcaggtggtcatcgagtttgaccaaaacgtctttactgctttcacctgcctgagtgcagattgcaagattgtgcacgagtacattggcggctacattttcttgtccacccgctccaaggaccagaatgaaacactcgatgaggacttgttccacaaattgaccggcggtcaggattgaaacaagcacgcgtgctcggctcacaccaacaaggcaagccaaaggcgcccctccccagagggatccctaacgtgcccagcatgtagattctggactaacagacaacatacattcaccgctggtcacccagatcctcattcaaacccactgctggcacatccctttccttactttgccctgtgctaccagccacggaaggagcctctcttgttttttctataaaatgggtaggcaggagaaaagcaggtgccctaagattgctctaaggcccagcatgtggttacagttctctgacttgcagaacctgccaggtgtatggctacaagttatcctcgtgctgatctgtctcattactaagtcaatggagaagacagaaaggtaaaaatcacgtgtagcaagaacaactcttatttcacaaactcaggtatgaaacgaaacgcctgtccttcatggaactgcttttagctcctgtcttttcaaaatggcagagggagttcctacacacactttttccctggaggccaaggtctaggggtagaaaggggaggggtggggctaccaggtagcagttgacaacccaaggtcagaggagtggccctcagtgtcatctgtccacagtgatacctgccaagatgaccactgacccacatctggtcttagtcattggtctcctcagatttctggggccacctgcaagccccattccattcctacagatctctcagccacctgtaagtcctttgtgaagatgtgggtgacacagggggacaggaaaacccatttctcaacccagatccatgtctccactgcttctactctgggttgggattcaggaagacaggcacagtcctctctgttcatagaaacacctgccagtgtcaaggattccagtcaggtgtctatcccaactggtcagggagagaagggcagacccattctcaaagaccaccatgtccaaggtctgacagctccccactggctgcccccacaggggctttaggctggtctgggtcatggggaagcgtccctcttatcgctggtctgtgttctcctggatttggtatctatgttggtacgactcctggccttttatctaaaggactttggcttttgtaaatcacaagccaataatagacttttttctccccctctgttttttgctgtgtcatctctgccttgagactgccttgagacagtgcttgccttgagagagtgagccaattaacagctgcctgaattgtcattttccattttggtttgttagaggtgggaggggtgggttttgagaaggtcaaaagcaataccagaagtaaagggaaatatcagacaatattttattattttttcatagatgttctgccacacaaagaacttggggtgtaaggataaggcaaaagctccaatcccatttttcagttctcctaggatgcacccctcagggagcctggccagagttccgaggcccgtgagcgtcagctgttgctttattttccatcaaagccctctgagaagtgagacctcagcaattccgggagccacatagagacagacttggcaagggaccccctggttctgagccagtagctgccatctggaaattcctcttttagcctctccttagaggtgaatgtgaatgaagcctcccaggcacccgctgaatttctgaggccttgcttaaagctcagaagtggtttaggcatttggaaaatctggttcacatcataaagaacttgatttgaaatgttttctatagaaacaagtgctaagtgtaccgtatatacttgatgttggtcatttctcagtcctatttctcagttctattattttagaacctagtcagttctttaagattataactggtcctacattaaaataatgcttctcgatgtcagattttacctgtttgctgctgagaacatctctgcctaatttaccaaagccagaccttcagttcaacatgcttccttagcttttcatagttgtctgacatttccatgaaaacaaaggaaccaactttgttttaaccaaactttgtttggttacagttttcaggggagcgtttcttccatgacacacagcaacatcccaaagaaataaacaagtgtgacaaaaaaaaaaaaaaacaaacctaaatgctactgttccaaagagcaacttgatggttttttttaatactgagtgcaaaaggtcacccaaattcctatgatgaaattttaaattaatgggcacctttcaacatcatttgcttccttatctacagttgattcagaaatctgcattttttattcttttatatgacttttaagtaaaagatttatatggatttga

SEQ ID NO: 7363 - DNA, 5151 bp, Homo sapiens
  source 1..5151: mol_type = unassigned DNA; mol_type = unassigned DNA
ctggagtctcccctggtcgggagcctcagccttctggagactgacaccaccctcttactcagagacgaatcgttttgtcgttgccttcacctccctgaccacaagtgctccggggctctttctgagggaggcagctgttctaggcgggaggctggagtctcctgggcctggacgcaccccggggtgtgagtgatgggtatgcctgaaaggaggggaagtggcgcggctttaatcatctgggctagtccccggcgggcctgggggaacagggaaactggaggcggccttaaagcgtcaggatgagacatcgcaagaggagctgcagatactgagcgtgcgccccgggttctcgccgccttctctccgccgagcagcccttcggccaccctttgcccttaaaaatctgcagactgcgcctcctctccgcgggagcgagacctagcaggcccggggctgggcgtgccctcgcctgccacgctgcgcgctgccctcagccgggccgctggggccgtgcagtgcaccgggcacgccgcgccaggctgggggcaggcaccgagcctccgtgggaggtcccgaggcagcttcgcctgctcgccctggctccagccctcacctgccgcagccttagctgagcagccgccgccactgggcgccccccgctccccacttcgccagcgcccgctcctcggctcggcccggggtagtttgtagggacgcagctctccacgtgcgcgactgcgaggctggacgctacgggctcctggaaaggagacaccagcatttgccacaatgctgtcatccactgactttacatttgcttcctgggagcttgtggtccgcgttgaccatcccaatgaagagcagcagaaagacgtcacactgagagtatctggagaccttcatgttggaggagtgatgctcaagttagtagaacagatcaatatatcccaagactggtcagactttgctctttggtgggaacagaagcattgctggcttctgaaaacccactggaccctggacaaatatggggtccaggcagatgcaaagcttctcttcacccctcagcataaaatgctgcgccttcgtctgccgaatttgaagatggtgaggttgcgagtcagcttctcagctgtggtttttaaagctgtcagtgatatctgcaaaatcctgaatattagaagatcagaagagctttccttgttaaagccgtctggtgactattttaagaagaagaagaaaaaagacaaaaataataaggaacccataattgaagatattctaaacctggagagttctccaacagcttcaggttcatcagtaagtcctggtttatacagtaaaaccatgacccctatatatgaccccatcaatggaacaccagcatcatccaccatgacttggttcagtgacagccctttgacggaacaaaactgcagcatcctcgcattcagccaacccccccagtccccagaagcacttgcggatatgtaccagcctcggtctctggttgataaagccaagctcaatgcaggttggctagactcctcacgctcccttatggaacaaggcatccaagaggatgagcagctgctcttacgatttaaatattattctttcttcgacttgaatcctaaatatgatgctgtccgaataaaccaactctatgagcaagccaggtgggccattctcttagaagaaattgattgcacagaggaagaaatgttgatctttgcagctctacagtaccacattagcaaactgtcgttgtctgctgaaacacaggattttgcaggcgagtccgaggttgatgaaatagaagcggcgctttctaatttggaagtaaccctagaaggtggaaaagcggacagccttttggaggacattactgatatccctaaacttgcagataatctcaaattatttaggcccaagaagttactaccaaaagctttcaaacaatattggtttatctttaaagacacatccatagcatactttaaaaataaggaacttgaacaaggagaaccactagaaaaactaaatcttagaggctgcgaagttgtgcccgatgtaaatgtagcaggaagaaaatttggaatcaagttactaatccctgttgccgatggtatgaatgaaatgtatttgagatgtgaccatgagaatcaatacgcccaatggatggctgcctgcatgttggcatcgaagggcaaaaccatggcagacagctcctaccagccagaggtcctcaacatcctttcatttctgaggatgaaaaacaggaactctgcatctcaggtggcttccagtctcgaaaacatggatatgaacccagaatgttttgtgtcaccacggtgtgcaaaaagacacaaatccaaacagctggccgcccggatcctggaggcgcaccagaacgtggcccagatgcccctggtcgaagccaagctgcggttcatccaggcgtggcagtcactgcctgagtttggcctcacctactaccttgtcagatttaaaggaagcaaaaaagatgacattctgggagtttcatataacaggttgattaaaattgatgcagccaccgggattccagtgacaacatggagattcacaaatatcaaacagtggaatgtaaactgggaaacccggcaggtggtcatcgagtttgaccaaaacgtctttactgctttcacctgcctgagtgcagattgcaagattgtgcacgagtacattggcggctacattttcttgtccacccgctccaaggaccagaatgaaacactcgatgaggacttgttccacaaattgaccggcggtcaggattgaaacaagcacgcgtgctcggctcacaccaacaaggcaagccaaaggcgcccctccccagagggatccctaacgtgcccagcatgtagattctggactaacagacaacatacattcaccgctggtcacccagatcctcattcaaacccactgctggcacatccctttccttactttgccctgtgctaccagccacggaaggagcctctcttgttttttctataaaatgggtaggcaggagaaaagcaggtgccctaagattgctctaaggcccagcatgtggttacagttctctgacttgcagaacctgccaggtgtatggctacaagttatcctcgtgctgatctgtctcattactaagtcaatggagaagacagaaaggtaaaaatcacgtgtagcaagaacaactcttatttcacaaactcaggtatgaaacgaaacgcctgtccttcatggaactgcttttagctcctgtcttttcaaaatggcagagggagttcctacacacactttttccctggaggccaaggtctaggggtagaaaggggaggggtggggctaccaggtagcagttgacaacccaaggtcagaggagtggccctcagtgtcatctgtccacagtgatacctgccaagatgaccactgacccacatctggtcttagtcattggtctcctcagatttctggggccacctgcaagccccattccattcctacagatctctcagccacctgtaagtcctttgtgaagatgtgggtgacacagggggacaggaaaacccatttctcaacccagatccatgtctccactgcttctactctgggttgggattcaggaagacaggcacagtcctctctgttcatagaaacacctgccagtgtcaaggattccagtcaggtgtctatcccaactggtcagggagagaagggcagacccattctcaaagaccaccatgtccaaggtctgacagctccccactggctgcccccacaggggctttaggctggtctgggtcatggggaagcgtccctcttatcgctggtctgtgttctcctggatttggtatctatgttggtacgactcctggccttttatctaaaggactttggcttttgtaaatcacaagccaataatagacttttttctccccctctgttttttgctgtgtcatctctgccttgagactgccttgagacagtgcttgccttgagagagtgagccaattaacagctgcctgaattgtcattttccattttggtttgttagaggtgggaggggtgggttttgagaaggtcaaaagcaataccagaagtaaagggaaatatcagacaatattttattattttttcatagatgttctgccacacaaagaacttggggtgtaaggataaggcaaaagctccaatcccatttttcagttctcctaggatgcacccctcagggagcctggccagagttccgaggcccgtgagcgtcagctgttgctttattttccatcaaagccctctgagaagtgagacctcagcaattccgggagccacatagagacagacttggcaagggaccccctggttctgagccagtagctgccatctggaaattcctcttttagcctctccttagaggtgaatgtgaatgaagcctcccaggcacccgctgaatttctgaggccttgcttaaagctcagaagtggtttaggcatttggaaaatctggttcacatcataaagaacttgatttgaaatgttttctatagaaacaagtgctaagtgtaccgtatatacttgatgttggtcatttctcagtcctatttctcagttctattattttagaacctagtcagttctttaagattataactggtcctacattaaaataatgcttctcgatgtcagattttacctgtttgctgctgagaacatctctgcctaatttaccaaagccagaccttcagttcaacatgcttccttagcttttcatagttgtctgacatttccatgaaaacaaaggaaccaactttgttttaaccaaactttgtttggttacagttttcaggggagcgtttcttccatgacacacagcaacatcccaaagaaataaacaagtgtgacaaaaaaaaaaaaaaacaaacctaaatgctactgttccaaagagcaacttgatggttttttttaatactgagtgcaaaaggtcacccaaattcctatgatgaaattttaaattaatgggcacctttcaacatcatttgcttccttatctacagttgattcagaaatctgcattttttattcttttatatgacttttaagtaaaagatttatatggatttga

SEQ ID NO: 7364 - DNA, 567 bp, Homo sapiens
  source 1..567: mol_type = unassigned DNA; mol_type = unassigned DNA
ccagttaccccctgaaacatttcagttgtgaacgttctttcctgctagcttctcccatgaggggaaaacgatgggtttgaaattcacatccctatctgtactttgaagaacaccagcatttgccacaatgctgtcatccactgactttacatttgcttcctgggagcttgtggtccgcgttgaccatcccaatgaagagcagcagaaagacgtcacactgagagtatctggagaccttcatgttggaggagtgatgctcaagttagtagaacagatcaatatatcccaagactggtcagactttgctctttggtgggaacagaagcattgctggcttctgaaaacccactggaccctggacaaatatggggtccaggcagatgcaaagcttctcttcacccctcagcataaaatgctgcgccttcgtctgccgaatttgaagatggtgaggttgcgagtcagcttctcagctgtggtttttaaagctgtcagtgatatctgcaaaatcctgaatattagaagatcagaagagctttccttgttaaagccgtctggtgactattttaa
